United States Patent Application Publication US 2007/0214517 A1 - sequence listing, part 73

SEQ ID NO: 95616 - protein, 548 aa, Arabidopsis thaliana; identical to SEQ ID NO: 91860
  peptide (1)..(548): Ceres Seq. ID no. 12729765
  misc_feature (1)..(548): Homolog of NCBI NO: 15218171 NR Description: wall-associated kinase 3; protein id: At1g21240.1
  misc_feature (1)..(548): Homolog of NCBI NO: 15218170 NR Description: wall-associated kinase 5; protein id: At1g21230.1
  misc_feature (90)..(548): Homolog of NCBI NO: 25287657 NR Description: F16F4.8 protein - Arabidopsis thaliana
  misc_feature (1)..(123): Homolog of NCBI NO: 25287657 NR Description: F16F4.8 protein - Arabidopsis thaliana
  misc_feature (1)..(548): Homolog of NCBI NO: 15218959 NR Description: wall-associated kinase 2; protein id: supported by cDNA: gi_17064909 [Arabidopsis thaliana]
  misc_feature (1)..(548): Homolog of NCBI NO: 25287666 NR Description: wall-associated serine/threonine kinase (EC
  misc_feature (1)..(548): Homolog of NCBI NO: 25287665 NR Description: hypothetical protein F16F4.10 [imported] -
  misc_feature (1)..(548): Homolog of NCBI NO: 15218167 NR Description: wall-associated kinase 4; protein id: At1g21210.1
  misc_feature (42)..(499): Homolog of NCBI NO: 38347179 NR Description: OSJNBa0024J22.5 [Oryza sativa (japonica
  misc_feature (1)..(93): Homolog of NCBI NO: 38347179 NR Description: OSJNBa0024J22.5 [Oryza sativa (japonica

SEQ ID NO: 95617 - DNA, 2614 bp, Arabidopsis thaliana; identical to SEQ ID NO: 91861
  misc_feature (1)..(2614): Ceres Seq. ID no. 12729802
  misc_feature: MA Experiment ID: 20000315 Result: Down-regulated in Transcription
  misc_feature: MA Experiment 20000315 PARAMETER Experiment Name: At_14day_Shoots-Roots_Sub_P Parameter: Age (day) Value: 14
  misc_feature: MA Experiment 20000315 PARAMETER Experiment Name: At_14day_Shoots-Roots_Sub_P Parameter: Organism Value: A. thaliana
  misc_feature: MA Experiment 20000315 PARAMETER Experiment Name: At_14day_Shoots-Roots_Sub_P Parameter: Plant Line Value: WS
  misc_feature: MA Experiment 20000315 PARAMETER Experiment Name: At_14day_Shoots-Roots_Sub_P Parameter: Tissue Value: Shoots vs. Whole Plant
  misc_feature: MA Experiment ID: 20000327 Result: Down-regulated in Transcription
  misc_feature: MA Experiment 20000327 PARAMETER Experiment Name: At_42deg_Heat_Sub_P Parameter: Age (day) Value: 14
  misc_feature: MA Experiment 20000327 PARAMETER Experiment Name: At_42deg_Heat_Sub_P Parameter: Organism Value: A. thaliana
  misc_feature: MA Experiment 20000327 PARAMETER Experiment Name: At_42deg_Heat_Sub_P Parameter: Plant Line Value: WS
  misc_feature: MA Experiment 20000327 PARAMETER Experiment Name: At_42deg_Heat_Sub_P Parameter: Temperature (deg C) Value: 42 vs. 22
  misc_feature: MA Experiment 20000327 PARAMETER Experiment Name: At_42deg_Heat_Sub_P Parameter: Timepoint (hr) Value: 1
  misc_feature: MA Experiment 20000327 PARAMETER Experiment Name: At_42deg_Heat_Sub_P Parameter: Tissue Value: Aerial
  misc_feature: MA Experiment ID: 20000328 Result: Down-regulated in Transcription
  misc_feature: MA Experiment 20000328 PARAMETER Experiment Name: At_42deg_Heat_Sub_P Parameter: Age (day) Value: 14
  misc_feature: MA Experiment 20000328 PARAMETER Experiment Name: At_42deg_Heat_Sub_P Parameter: Organism Value: A. thaliana
  misc_feature: MA Experiment 20000328 PARAMETER Experiment Name: At_42deg_Heat_Sub_P Parameter: Plant Line Value: WS
  misc_feature: MA Experiment 20000328 PARAMETER Experiment Name: At_42deg_Heat_Sub_P Parameter: Temperature (deg C) Value: 42 vs. 22
  misc_feature: MA Experiment 20000328 PARAMETER Experiment Name: At_42deg_Heat_Sub_P Parameter: Timepoint (hr) Value: 6
  misc_feature: MA Experiment 20000328 PARAMETER Experiment Name: At_42deg_Heat_Sub_P Parameter: Tissue Value: Aerial

SEQ ID NO: 95618 - protein, 756 aa, Arabidopsis thaliana; identical to SEQ ID NO: 91862
  peptide (1)..(756): Ceres Seq. ID no. 12729803
  misc_feature (11)..(145): Pfam Name: Universal stress protein family Pfam Description: Universal stress protein family
  misc_feature (3)..(357): Homolog of NCBI NO: 15223890 NR Description: hypothetical protein; protein id: At1g77280.1
  misc_feature (381)..(645): Homolog of NCBI NO: 15223890 NR Description: hypothetical protein; protein id: At1g77280.1
  misc_feature (626)..(756): Homolog of NCBI NO: 15223890 NR Description: hypothetical protein; protein id: At1g77280.1
  misc_feature (240)..(756): Homolog of NCBI NO: 15237563 NR Description: putative protein; protein id: At5g63940.1, by cDNA: gi_20260317 [Arabidopsis thaliana] contains similarity to protein kinase~gene_id:MBM17.4
  misc_feature (5)..(155): Homolog of NCBI NO: 15237563 NR Description: putative protein; protein id: At5g63940.1, by cDNA: gi_20260317 [Arabidopsis thaliana] contains similarity to protein kinase~gene_id:MBM17.4
  misc_feature (287)..(756): Homolog of NCBI NO: 28376688 NR Description: putative serine/threonine kinase [Oryza sativa
  misc_feature (1)..(166): Homolog of NCBI NO: 28376688 NR Description: putative serine/threonine kinase [Oryza sativa
  misc_feature (395)..(737): Homolog of NCBI NO: 15227291 NR Description: putative protein kinase; protein id: At2g16750.1
  misc_feature (395)..(737): Homolog of NCBI NO: 15236248 NR Description: protein kinase - like; protein id: At4g35030.1
  misc_feature (371)..(688): Homolog of NCBI NO: 40253745 NR Description: SERK1 protein-like [Oryza sativa (japonica

SEQ ID NO: 95619 - protein, 742 aa, Arabidopsis thaliana; identical to SEQ ID NO: 91863
  peptide (1)..(742): Ceres Seq. ID no. 12729804
  misc_feature (1)..(131): Pfam Name: Universal stress protein family Pfam Description: Universal stress protein family
  misc_feature (1)..(343): Homolog of NCBI NO: 15223890 NR Description: hypothetical protein; protein id: At1g77280.1
  misc_feature (367)..(631): Homolog of NCBI NO: 15223890 NR Description: hypothetical protein; protein id: At1g77280.1
  misc_feature (612)..(742): Homolog of NCBI NO: 15223890 NR Description: hypothetical protein; protein id: At1g77280.1
  misc_feature (226)..(742): Homolog of NCBI NO: 15237563 NR Description: putative protein; protein id: At5g63940.1, by cDNA: gi_20260317 [Arabidopsis thaliana] contains similarity to protein kinase~gene_id:MBM17.4
  misc_feature (1)..(141): Homolog of NCBI NO: 15237563 NR Description: putative protein; protein id: At5g63940.1, by cDNA: gi_20260317 [Arabidopsis thaliana] contains similarity to protein kinase~gene_id:MBM17.4
  misc_feature (273)..(742): Homolog of NCBI NO: 28376688 NR Description: putative serine/threonine kinase [Oryza sativa
  misc_feature (1)..(152): Homolog of NCBI NO: 28376688 NR Description: putative serine/threonine kinase [Oryza sativa
  misc_feature (381)..(723): Homolog of NCBI NO: 15227291 NR Description: putative protein kinase; protein id: At2g16750.1
  misc_feature (381)..(723): Homolog of NCBI NO: 15236248 NR Description: protein kinase - like; protein id: At4g35030.1
  misc_feature (357)..(674): Homolog of NCBI NO: 40253745 NR Description: SERK1 protein-like [Oryza sativa (japonica

SEQ ID NO: 95620 - protein, 651 aa, Arabidopsis thaliana; identical to SEQ ID NO: 91864
  peptide (1)..(651): Ceres Seq. ID no. 12729805
  misc_feature (1)..(252): Homolog of NCBI NO: 15223890 NR Description: hypothetical protein; protein id: At1g77280.1
  misc_feature (276)..(540): Homolog of NCBI NO: 15223890 NR Description: hypothetical protein; protein id: At1g77280.1
  misc_feature (521)..(651): Homolog of NCBI NO: 15223890 NR Description: hypothetical protein; protein id: At1g77280.1
  misc_feature (135)..(651): Homolog of NCBI NO: 15237563 NR Description: putative protein; protein id: At5g63940.1, by cDNA: gi_20260317 [Arabidopsis thaliana] contains similarity to protein kinase~gene_id:MBM17.4
  misc_feature (1)..(50): Homolog of NCBI NO: 15237563 NR Description: putative protein; protein id: At5g63940.1, by cDNA: gi_20260317 [Arabidopsis thaliana] contains similarity to protein kinase~gene_id:MBM17.4
  misc_feature (182)..(651): Homolog of NCBI NO: 28376688 NR Description: putative serine/threonine kinase [Oryza sativa
  misc_feature (1)..(61): Homolog of NCBI NO: 28376688 NR Description: putative serine/threonine kinase [Oryza sativa
  misc_feature (290)..(632): Homolog of NCBI NO: 15227291 NR Description: putative protein kinase; protein id: At2g16750.1
  misc_feature (290)..(632): Homolog of NCBI NO: 15236248 NR Description: protein kinase - like; protein id: At4g35030.1
  misc_feature (266)..(583): Homolog of NCBI NO: 40253745 NR Description: SERK1 protein-like [Oryza sativa (japonica

SEQ ID NO: 95621 - DNA, 3260 bp, Arabidopsis thaliana; identical to SEQ ID NO: 91865
  misc_feature (1)..(3260): Ceres Seq. ID no. 12729806
  misc_feature: MA Experiment ID: 20001558 Result: Down-regulated in Transcription
  misc_feature: MA Experiment 20001558 PARAMETER Experiment Name: At_Drought_Soil_Dry_P Parameter: Age (day) Value: 27
  misc_feature: MA Experiment 20001558 PARAMETER Experiment Name: At_Drought_Soil_Dry_P Parameter: Organism Value: A. thaliana
  misc_feature: MA Experiment 20001558 PARAMETER Experiment Name: At_Drought_Soil_Dry_P Parameter: Plant Line Value: WS
  misc_feature: MA Experiment 20001558 PARAMETER Experiment Name: At_Drought_Soil_Dry_P Parameter: Post Timepoint (hr) Value: 6
  misc_feature: MA Experiment 20001558 PARAMETER Experiment Name: At_Drought_Soil_Dry_P Parameter: Post-Treatment Value: Re-Water vs. No Drought
  misc_feature: MA Experiment 20001558 PARAMETER Experiment Name: At_Drought_Soil_Dry_P Parameter: Timepoint (day) Value: 13
  misc_feature: MA Experiment 20001558 PARAMETER Experiment Name: At_Drought_Soil_Dry_P Parameter: Treatment Value: Drought vs. No Drought
  misc_feature: MA Experiment ID: 20001560 Result: Down-regulated in Transcription
  misc_feature: MA Experiment 20001560 PARAMETER Experiment Name: At_Drought_Soil_Dry_P Parameter: Age (day) Value: 28
  misc_feature: MA Experiment 20001560 PARAMETER Experiment Name: At_Drought_Soil_Dry_P Parameter: Organism Value: A. thaliana
  misc_feature: MA Experiment 20001560 PARAMETER Experiment Name: At_Drought_Soil_Dry_P Parameter: Plant Line Value: WS
  misc_feature: MA Experiment 20001560 PARAMETER Experiment Name: At_Drought_Soil_Dry_P Parameter: Post Timepoint (hr) Value: None
  misc_feature: MA Experiment 20001560 PARAMETER Experiment Name: At_Drought_Soil_Dry_P Parameter: Post-Treatment Value: None
  misc_feature: MA Experiment 20001560 PARAMETER Experiment Name: At_Drought_Soil_Dry_P Parameter: Timepoint (day) Value: 14
  misc_feature: MA Experiment 20001560 PARAMETER Experiment Name: At_Drought_Soil_Dry_P Parameter: Treatment Value: Drought vs. No Drought

SEQ ID NO: 95622 - protein, 985 aa, Arabidopsis thaliana; identical to SEQ ID NO: 91866
  peptide (1)..(985): Ceres Seq. ID no. 12729807
  misc_feature (642)..(822): Homolog of NCBI NO: 37589440 NR Description: Unknown (protein for MGC:68997) [Xenopus laevis]
  misc_feature (829)..(982): Homolog of NCBI NO: 37589440 NR Description: Unknown (protein for MGC:68997) [Xenopus laevis]
  misc_feature (669)..(834): Homolog of NCBI NO: 8480400 NR Description: Putative inorganic polyphosphate/ATP-NAD kinase
  misc_feature (669)..(834): Homolog of NCBI NO: 10434887 NR Description: unnamed protein product [Homo sapiens]
  misc_feature (669)..(834): Homolog of NCBI NO: 12804579 NR Description: Similar to hypothetical protein FLJ13052 [Homo
  misc_feature (829)..(982): Homolog of NCBI NO: 8480400 NR Description: Putative inorganic polyphosphate/ATP-NAD kinase
  misc_feature (829)..(982): Homolog of NCBI NO: 10434887 NR Description: unnamed protein product [Homo sapiens]
  misc_feature (829)..(982): Homolog of NCBI NO: 12804579 NR Description: Similar to hypothetical protein FLJ13052 [Homo
  misc_feature (829)..(982): Homolog of NCBI NO: 20070326 NR Description: NAD kinase [Homo sapiens]
  misc_feature (701)..(834): Homolog of NCBI NO: 20070326 NR Description: NAD kinase [Homo sapiens]

SEQ ID NO: 95623 - protein, 973 aa, Arabidopsis thaliana; identical to SEQ ID NO: 91867
  peptide (1)..(973): Ceres Seq. ID no. 12729808
  misc_feature (630)..(810): Homolog of NCBI NO: 37589440 NR Description: Unknown (protein for MGC:68997) [Xenopus laevis]
  misc_feature (817)..(970): Homolog of NCBI NO: 37589440 NR Description: Unknown (protein for MGC:68997) [Xenopus laevis]
  misc_feature (657)..(822): Homolog of NCBI NO: 8480400 NR Description: Putative inorganic polyphosphate/ATP-NAD kinase
  misc_feature (657)..(822): Homolog of NCBI NO: 10434887 NR Description: unnamed protein product [Homo sapiens]
  misc_feature (657)..(822): Homolog of NCBI NO: 12804579 NR Description: Similar to hypothetical protein FLJ13052 [Homo
  misc_feature (817)..(970): Homolog of NCBI NO: 8480400 NR Description: Putative inorganic polyphosphate/ATP-NAD kinase
  misc_feature (817)..(970): Homolog of NCBI NO: 10434887 NR Description: unnamed protein product [Homo sapiens]
  misc_feature (817)..(970): Homolog of NCBI NO: 12804579 NR Description: Similar to hypothetical protein FLJ13052 [Homo
  misc_feature (817)..(970): Homolog of NCBI NO: 20070326 NR Description: NAD kinase [Homo sapiens]
  misc_feature (689)..(822): Homolog of NCBI NO: 20070326 NR Description: NAD kinase [Homo sapiens]

SEQ ID NO: 95624 - protein, 868 aa, Arabidopsis thaliana; identical to SEQ ID NO: 91868
  peptide (1)..(868): Ceres Seq. ID no. 12729809
  misc_feature (525)..(705): Homolog of NCBI NO: 37589440 NR Description: Unknown (protein for MGC:68997) [Xenopus laevis]
  misc_feature (712)..(865): Homolog of NCBI NO: 37589440 NR Description: Unknown (protein for MGC:68997) [Xenopus laevis]
  misc_feature (552)..(717): Homolog of NCBI NO: 8480400 NR Description: Putative inorganic polyphosphate/ATP-NAD kinase
  misc_feature (552)..(717): Homolog of NCBI NO: 12804579 NR Description: Similar to hypothetical protein FLJ13052 [Homo
  misc_feature (552)..(717): Homolog of NCBI NO: 10434887 NR Description: unnamed protein product [Homo sapiens]
  misc_feature (712)..(865): Homolog of NCBI NO: 8480400 NR Description: Putative inorganic polyphosphate/ATP-NAD kinase
  misc_feature (712)..(865): Homolog of NCBI NO: 10434887 NR Description: unnamed protein product [Homo sapiens]
  misc_feature (712)..(865): Homolog of NCBI NO: 12804579 NR Description: Similar to hypothetical protein FLJ13052 [Homo
  misc_feature (712)..(865): Homolog of NCBI NO: 20070326 NR Description: NAD kinase [Homo sapiens]
  misc_feature (584)..(717): Homolog of NCBI NO: 20070326 NR Description: NAD kinase [Homo sapiens]

SEQ ID NO: 95625 - DNA, 792 bp, Arabidopsis thaliana; identical to SEQ ID NO: 91869
  misc_feature (1)..(792): Ceres Seq. ID no. 12729830
  misc_feature: MA Experiment ID: 20000264 Result: Up-regulated in Transcription
  misc_feature: MA Experiment 20000264 PARAMETER Experiment Name: At_Open_Flower_P Parameter: Age (day) Value: 21
  misc_feature: MA Experiment 20000264 PARAMETER Experiment Name: At_Open_Flower_P Parameter: Plant Line Value: WS
  misc_feature: MA Experiment 20000264 PARAMETER Experiment Name: At_Open_Flower_P Parameter: Tissue Value: Open Flower vs. Whole Plant
  misc_feature: MA Experiment ID: 20000265 Result: Up-regulated in Transcription
  misc_feature: MA Experiment 20000265 PARAMETER Experiment Name: At_Open_Flower_P Parameter: Age (day) Value: 21
  misc_feature: MA Experiment 20000265 PARAMETER Experiment Name: At_Open_Flower_P Parameter: Plant Line Value: WS
  misc_feature: MA Experiment 20000265 PARAMETER Experiment Name: At_Open_Flower_P Parameter: Tissue Value: Closed Flower vs. Whole Plant
  misc_feature: MA Experiment ID: 20000286 Result: Up-regulated in Transcription
  misc_feature: MA Experiment 20000286 PARAMETER Experiment Name: At_Open_Flower_P Parameter: Age (day) Value: 21
  misc_feature: MA Experiment 20000286 PARAMETER Experiment Name: At_Open_Flower_P Parameter: Plant Line Value: WS
  misc_feature: MA Experiment 20000286 PARAMETER Experiment Name: At_Open_Flower_P Parameter: Tissue Value: Half Open vs. Whole Plant
  misc_feature: MA Experiment ID: 20000794 Result: Up-regulated in Transcription
  misc_feature: MA Experiment 20000794 PARAMETER Experiment Name: At_Petals_P Parameter: Age (day) Value: 23-25 days
  misc_feature: MA Experiment 20000794 PARAMETER Experiment Name: At_Petals_P Parameter: Plant Line Value: WS
  misc_feature: MA Experiment 20000794 PARAMETER Experiment Name: At_Petals_P Parameter: Tissue Value: Petals vs. Whole plant
  misc_feature: MA Experiment ID: 20001910 Result: Up-regulated in Transcription
  misc_feature: MA Experiment 20001910 PARAMETER Experiment Name: At_Drought_Reproduction_P Parameter: Age (day) Value: 37
  misc_feature: MA Experiment 20001910 PARAMETER Experiment Name: At_Drought_Reproduction_P Parameter: Organism Value: A. thaliana
  misc_feature: MA Experiment 20001910 PARAMETER Experiment Name: At_Drought_Reproduction_P Parameter: Plant Line Value: WS
  misc_feature: MA Experiment 20001910 PARAMETER Experiment Name: At_Drought_Reproduction_P Parameter: Timepoint (day) Value: 7
  misc_feature: MA Experiment 20001910 PARAMETER Experiment Name: At_Drought_Reproduction_P Parameter: Tissue Value: Flowers
  misc_feature: MA Experiment 20001910 PARAMETER Experiment Name: At_Drought_Reproduction_P Parameter: Treatment Value: Drought vs. No Drought
  misc_feature: MA Experiment ID: 20001911 Result: Up-regulated in Transcription
  misc_feature: MA Experiment 20001911 PARAMETER Experiment Name: At_Drought_Reproduction_P Parameter: Age (day) Value: 40
  misc_feature: MA Experiment 20001911 PARAMETER Experiment Name: At_Drought_Reproduction_P Parameter: Organism Value: A. thaliana
  misc_feature: MA Experiment 20001911 PARAMETER Experiment Name: At_Drought_Reproduction_P Parameter: Plant Line Value: WS
  misc_feature: MA Experiment 20001911 PARAMETER Experiment Name: At_Drought_Reproduction_P Parameter: Timepoint (day) Value: 10
  misc_feature: MA Experiment 20001911 PARAMETER Experiment Name: At_Drought_Reproduction_P Parameter: Tissue Value: Flowers
  misc_feature: MA Experiment 20001911 PARAMETER Experiment Name: At_Drought_Reproduction_P Parameter: Treatment Value: Drought vs. No Drought

SEQ ID NO: 95626 - protein, 263 aa, Arabidopsis thaliana; identical to SEQ ID NO: 91870
  peptide (1)..(263): Ceres Seq. ID no. 12729831
  misc_feature (203)..(263): Pfam Name: SNARE domain Pfam Description: SNARE domain
  misc_feature (1)..(263): Homolog of NCBI NO: 15222976 NR Description: synaptosomal associated protein (SNAP25A), protein id: At1g13890.1 [Arabidopsis thaliana]
  misc_feature (16)..(263): Homolog of NCBI NO: 15240163 NR Description: syntaxin SNAP33; protein id: At5g61210.1, by cDNA: 14562., supported by cDNA: gi_16323046 [Arabidopsis >gi|27805727|sp|Q9S7P9|SN33_ARATH SNAP25 homologous protein
  misc_feature (16)..(263): Homolog of NCBI NO: 21553460 NR Description: snap25a [Arabidopsis thaliana]
  misc_feature (13)..(263): Homolog of NCBI NO: 32308074 NR Description: SNAP-34 [Hordeum vulgare subsp. vulgare]
  misc_feature (30)..(263): Homolog of NCBI NO: 15241436 NR Description: SNAP25 - like protein; protein id: At5g07880.1 thaliana] >gi|27805728|sp|Q9SD96|SN29_ARATH SNAP25 homologous
  misc_feature (64)..(261): Homolog of NCBI NO: 6755588 NR Description: synaptosomal-associated protein;
  misc_feature (64)..(261): Homolog of NCBI NO: 18765733 NR Description: synaptosomal-associated protein 25 isoform
  misc_feature (66)..(263): Homolog of NCBI NO: 29378329 NR Description: synaptosomal-associated 25 protein isoform A
  misc_feature (54)..(261): Homolog of NCBI NO: 40555928 NR Description: synaptosomal-associated protein 25 [Lateolabrax
  misc_feature (64)..(261): Homolog of NCBI NO: 17737875 NR Description: Synapse protein 24 CG9474-PA [Drosophila

SEQ ID NO: 95627 - protein, 163 aa, Arabidopsis thaliana; identical to SEQ ID NO: 91871
  peptide (1)..(163): Ceres Seq. ID no. 12729832
  misc_feature (103)..(163): Pfam Name: SNARE domain Pfam Description: SNARE domain
  misc_feature (1)..(163): Homolog of NCBI NO: 15222976 NR Description: synaptosomal associated protein (SNAP25A), protein id: At1g13890.1 [Arabidopsis thaliana]
  misc_feature (1)..(163): Homolog of NCBI NO: 15240163 NR Description: syntaxin SNAP33; protein id: At5g61210.1, by cDNA: 14562., supported by cDNA: gi_16323046 [Arabidopsis >gi|27805727|sp|Q9S7P9|SN33_ARATH SNAP25 homologous protein
  misc_feature (1)..(163): Homolog of NCBI NO: 21553460 NR Description: snap25a [Arabidopsis thaliana]
  misc_feature (1)..(163): Homolog of NCBI NO: 32308074 NR Description: SNAP-34 [Hordeum vulgare subsp. vulgare]
  misc_feature (1)..(163): Homolog of NCBI NO: 15241436 NR Description: SNAP25 - like protein; protein id: At5g07880.1 thaliana] >gi|27805728|sp|Q9SD96|SN29_ARATH SNAP25 homologous
  misc_feature (1)..(161): Homolog of NCBI NO: 6755588 NR Description: synaptosomal-associated protein;
  misc_feature (1)..(161): Homolog of NCBI NO: 18765733 NR Description: synaptosomal-associated protein 25 isoform
  misc_feature (1)..(163): Homolog of NCBI NO: 29378329 NR Description: synaptosomal-associated 25 protein isoform A
  misc_feature (1)..(161): Homolog of NCBI NO: 40555928 NR Description: synaptosomal-associated protein 25 [Lateolabrax
  misc_feature (1)..(161): Homolog of NCBI NO: 17737875 NR Description: Synapse protein 24 CG9474-PA [Drosophila

SEQ ID NO: 95628 - protein, 149 aa, Arabidopsis thaliana; identical to SEQ ID NO: 91872
  peptide (1)..(149): Ceres Seq. ID no. 12729833
  misc_feature (89)..(149): Pfam Name: SNARE domain Pfam Description: SNARE domain
  misc_feature (1)..(149): Homolog of NCBI NO: 15222976 NR Description: synaptosomal associated protein (SNAP25A), protein id: At1g13890.1 [Arabidopsis thaliana]
  misc_feature (1)..(149): Homolog of NCBI NO: 15240163 NR Description: syntaxin SNAP33; protein id: At5g61210.1, by cDNA: 14562., supported by cDNA: gi_16323046 [Arabidopsis >gi|27805727|sp|Q9S7P9|SN33_ARATH SNAP25 homologous protein
  misc_feature (1)..(149): Homolog of NCBI NO: 21553460 NR Description: snap25a [Arabidopsis thaliana]
  misc_feature (1)..(149): Homolog of NCBI NO: 32308074 NR Description: SNAP-34 [Hordeum vulgare subsp. vulgare]
  misc_feature (1)..(149): Homolog of NCBI NO: 15241436 NR Description: SNAP25 - like protein; protein id: At5g07880.1 thaliana] >gi|27805728|sp|Q9SD96|SN29_ARATH SNAP25 homologous
  misc_feature (1)..(147): Homolog of NCBI NO: 6755588 NR Description: synaptosomal-associated protein;
  misc_feature (1)..(147): Homolog of NCBI NO: 18765733 NR Description: synaptosomal-associated protein 25 isoform
  misc_feature (1)..(149): Homolog of NCBI NO: 29378329 NR Description: synaptosomal-associated 25 protein isoform A
  misc_feature (1)..(147): Homolog of NCBI NO: 40555928 NR Description: synaptosomal-associated protein 25 [Lateolabrax
  misc_feature (1)..(147): Homolog of NCBI NO: 17737875 NR Description: Synapse protein 24 CG9474-PA [Drosophila

SEQ ID NO: 95629 - DNA, 705 bp, Arabidopsis thaliana; identical to SEQ ID NO: 91873
  misc_feature (1)..(705): Ceres Seq. ID no. 12729850
  misc_feature: MA Experiment ID: 20000286 Result: Down-regulated in Transcription
  misc_feature: MA Experiment 20000286 PARAMETER Experiment Name: At_Open_Flower_P Parameter: Age (day) Value: 21
  misc_feature: MA Experiment 20000286 PARAMETER Experiment Name: At_Open_Flower_P Parameter: Plant Line Value: WS
  misc_feature: MA Experiment 20000286 PARAMETER Experiment Name: At_Open_Flower_P Parameter: Tissue Value: Half Open vs. Whole Plant
  misc_feature: MA Experiment ID: 20000794 Result: Down-regulated in Transcription
  misc_feature: MA Experiment 20000794 PARAMETER Experiment Name: At_Petals_P Parameter: Age (day) Value: 23-25 days
  misc_feature: MA Experiment 20000794 PARAMETER Experiment Name: At_Petals_P Parameter: Plant Line Value: WS
  misc_feature: MA Experiment 20000794 PARAMETER Experiment Name: At_Petals_P Parameter: Tissue Value: Petals vs. Whole plant
  misc_feature: MA Experiment ID: 20001451 Result: Up-regulated in Transcription
  misc_feature: MA Experiment 20001451 PARAMETER Experiment Name: At_Far-red-induction_P Parameter: Age (day) Value: 7
  misc_feature: MA Experiment 20001451 PARAMETER Experiment Name: At_Far-red-induction_P Parameter: Light Value: Far-red vs. White
  misc_feature: MA Experiment 20001451 PARAMETER Experiment Name: At_Far-red-induction_P Parameter: Organism Value: A. thaliana
  misc_feature: MA Experiment 20001451 PARAMETER Experiment Name: At_Far-red-induction_P Parameter: Plant Line Value: Columbia
  misc_feature: MA Experiment 20001451 PARAMETER Experiment Name: At_Far-red-induction_P Parameter: Timepoint (hr) Value: 24
  misc_feature: MA Experiment 20001451 PARAMETER Experiment Name: At_Far-red-induction_P Parameter: Tissue Value: Whole Plant
  misc_feature: MA Experiment ID: 20001905 Result: Down-regulated in Transcription
  misc_feature: MA Experiment 20001905 PARAMETER Experiment Name: At_Drought_Reproduction_P Parameter: Age (day) Value: 40
  misc_feature: MA Experiment 20001905 PARAMETER Experiment Name: At_Drought_Reproduction_P Parameter: Organism Value: A. thaliana
  misc_feature: MA Experiment 20001905 PARAMETER Experiment Name: At_Drought_Reproduction_P Parameter: Plant Line Value: WS
  misc_feature: MA Experiment 20001905 PARAMETER Experiment Name: At_Drought_Reproduction_P Parameter: Timepoint (day) Value: 10
  misc_feature: MA Experiment 20001905 PARAMETER Experiment Name: At_Drought_Reproduction_P Parameter: Tissue Value: Rosettes
  misc_feature: MA Experiment 20001905 PARAMETER Experiment Name: At_Drought_Reproduction_P Parameter: Treatment Value: Drought vs. No Drought

SEQ ID NO: 95630 - protein, 176 aa, Arabidopsis thaliana; identical to SEQ ID NO: 91874
  peptide (1)..(176): Ceres Seq. ID no. 12729851
  misc_feature (102)..(171): Pfam Name: Eukaryotic initiation factor 5A hypusine, Pfam Description: Eukaryotic initiation factor 5A hypusine,
  misc_feature (19)..(176): Homolog of NCBI NO: 15223002 NR Description: initiation factor 5A-4; protein id: At1g13950.1, by cDNA: gi_12407784, supported by cDNA: gi_17380799 [Arabidopsis
  misc_feature (59)..(176): Homolog of NCBI NO: 8778393 NR Description: F16A14.17 [Arabidopsis thaliana]
  misc_feature (19)..(59): Homolog of NCBI NO: 8778393 NR Description: F16A14.17 [Arabidopsis thaliana]
  misc_feature (19)..(176): Homolog of NCBI NO: 20138664 NR Description: Eukaryotic translation initiation factor 5A-2
  misc_feature (19)..(176): Homolog of NCBI NO: 3024021 NR Description: Eukaryotic translation initiation factor 5A-4
  misc_feature (19)..(176): Homolog of NCBI NO: 20138706 NR Description: Eukaryotic translation initiation factor 5A-3
  misc_feature (19)..(176): Homolog of NCBI NO: 33325117 NR Description: eukaryotic translation initiation factor 5A
  misc_feature (19)..(176): Homolog of NCBI NO: 3024022 NR Description: Eukaryotic translation initiation factor 5A-5
  misc_feature (19)..(176): Homolog of NCBI NO: 20138705 NR Description: Eukaryotic translation initiation factor 5A-4
  misc_feature (19)..(176): Homolog of NCBI NO: 15222317 NR Description: Eukaryotic initiation factor 5A , putative; id: At1g69410.1, supported by cDNA: 30884., supported by cDNA: supported by cDNA: gi_16974502 [Arabidopsis thaliana] putative

SEQ ID NO: 95631 - protein, 158 aa, Arabidopsis thaliana; identical to SEQ ID NO: 91875
  peptide (1)..(158): Ceres Seq. ID no. 12729852
  misc_feature (84)..(153): Pfam Name: Eukaryotic initiation factor 5A hypusine, Pfam Description: Eukaryotic initiation factor 5A hypusine,
  misc_feature (1)..(158): Homolog of NCBI NO: 15223002 NR Description: initiation factor 5A-4; protein id: At1g13950.1, by cDNA: gi_12407784, supported by cDNA: gi_17380799 [Arabidopsis
  misc_feature (41)..(158): Homolog of NCBI NO: 8778393 NR Description: F16A14.17 [Arabidopsis thaliana]
  misc_feature (1)..(41): Homolog of NCBI NO: 8778393 NR Description: F16A14.17 [Arabidopsis thaliana]
  misc_feature (1)..(158): Homolog of NCBI NO: 20138664 NR Description: Eukaryotic translation initiation factor 5A-2
  misc_feature (1)..(158): Homolog of NCBI NO: 3024021 NR Description: Eukaryotic translation initiation factor 5A-4
  misc_feature (1)..(158): Homolog of NCBI NO: 20138706 NR Description: Eukaryotic translation initiation factor 5A-3
  misc_feature (1)..(158): Homolog of NCBI NO: 33325117 NR Description: eukaryotic translation initiation factor 5A
  misc_feature (1)..(158): Homolog of NCBI NO: 3024022 NR Description: Eukaryotic translation initiation factor 5A-5
  misc_feature (1)..(158): Homolog of NCBI NO: 20138705 NR Description: Eukaryotic translation initiation factor 5A-4
  misc_feature (1)..(158): Homolog of NCBI NO: 15222317 NR Description: Eukaryotic initiation factor 5A , putative; id: At1g69410.1, supported by cDNA: 30884., supported by cDNA: supported by cDNA: gi_16974502 [Arabidopsis thaliana] putative

SEQ ID NO: 95632 - DNA, 1467 bp, Arabidopsis thaliana; identical to SEQ ID NO: 91876
  misc_feature (1)..(1467): Ceres Seq. ID no. 12729861
  misc_feature: MA Experiment ID: 20000173 Result: Down-regulated in Transcription
  misc_feature: MA Experiment 20000173 PARAMETER Experiment Name: At_42deg_Heat_P Parameter: Age (day) Value: 14
  misc_feature: MA Experiment 20000173 PARAMETER Experiment Name: At_42deg_Heat_P Parameter: Organism Value: A. thaliana
  misc_feature: MA Experiment 20000173 PARAMETER Experiment Name: At_42deg_Heat_P Parameter: Plant Line Value: WS
  misc_feature: MA Experiment 20000173 PARAMETER Experiment Name: At_42deg_Heat_P Parameter: Temperature (deg C) Value: 42 vs. 22
  misc_feature: MA Experiment 20000173 PARAMETER Experiment Name: At_42deg_Heat_P Parameter: Timepoint (hr) Value: 6
  misc_feature: MA Experiment 20000173 PARAMETER Experiment Name: At_42deg_Heat_P Parameter: Tissue Value: Aerial
  misc_feature: MA Experiment ID: 20000180 Result: Up-regulated in Transcription
  misc_feature: MA Experiment 20000180 PARAMETER Experiment Name: At_Germinating_Seeds_P Parameter: Age (hr) Value: 24 vs. 0
  misc_feature: MA Experiment 20000180 PARAMETER Experiment Name: At_Germinating_Seeds_P Parameter: Tissue Value: Germinating Seeds
  misc_feature: MA Experiment ID: 20000182 Result: Up-regulated in Transcription
  misc_feature: MA Experiment 20000182 PARAMETER Experiment Name: At_2mM_SA_P Parameter: Age (day) Value: 14
  misc_feature: MA Experiment 20000182 PARAMETER Experiment Name: At_2mM_SA_P Parameter: Organism Value: A. thaliana
  misc_feature: MA Experiment 20000182 PARAMETER Experiment Name: At_2mM_SA_P Parameter: Plant Line Value: WS
  misc_feature: MA Experiment 20000182 PARAMETER Experiment Name: At_2mM_SA_P Parameter: Timepoint (hr) Value: 6
  misc_feature: MA Experiment 20000182 PARAMETER Experiment Name: At_2mM_SA_P Parameter: Tissue Value: Aerial
  misc_feature: MA Experiment 20000182 PARAMETER Experiment Name: At_2mM_SA_P Parameter: Treatment Value: 2mM SA vs. No Treatment
  misc_feature: MA Experiment ID: 20000184 Result: Down-regulated in Transcription
  misc_feature: MA Experiment 20000184 PARAMETER Experiment Name: At_Shoots__P Parameter: Age (day) Value: 7
  misc_feature: MA Experiment 20000184 PARAMETER Experiment Name: At_Shoots__P Parameter: Tissue Value: Shoots vs. Whole Plant
  misc_feature: MA Experiment ID: 20000185 Result: Up-regulated in Transcription
  misc_feature: MA Experiment 20000185 PARAMETER Experiment Name: At_Roots__P Parameter: Age (day) Value: 7 vs. 21
  misc_feature: MA Experiment 20000185 PARAMETER Experiment Name: At_Roots__P Parameter: Organism Value: A. thaliana
  misc_feature: MA Experiment 20000185 PARAMETER Experiment Name: At_Roots__P Parameter: Tissue Value: Roots vs. Whole Plant
  misc_feature: MA Experiment ID: 20000438 Result: Down-regulated in Transcription
  misc_feature: MA Experiment 20000438 PARAMETER Experiment Name: At_Shoots__P Parameter: Age (day) Value: 14
  misc_feature: MA Experiment 20000438 PARAMETER Experiment Name: At_Shoots__P Parameter: Tissue Value: Shoots vs. Whole Plant
  misc_feature: MA Experiment ID: 20000439 Result: Up-regulated in Transcription
  misc_feature: MA Experiment 20000439 PARAMETER Experiment Name: At_Roots__P Parameter: Age (day) Value: 14 vs. 21
  misc_feature: MA Experiment 20000439 PARAMETER Experiment Name: At_Roots__P Parameter: Organism Value: A. thaliana
  misc_feature: MA Experiment 20000439 PARAMETER Experiment Name: At_Roots__P Parameter: Tissue Value: Roots vs. Whole Plant
  misc_feature: MA Experiment ID: 20000453 Result: Up-regulated in Transcription
  misc_feature: MA Experiment 20000453 PARAMETER Experiment Name: At_100uM_ABA_P Parameter: Age (day) Value: 15
  misc_feature: MA Experiment 20000453 PARAMETER Experiment Name: At_100uM_ABA_P Parameter: Organism Value: A. thaliana
  misc_feature: MA Experiment 20000453 PARAMETER Experiment Name: At_100uM_ABA_P Parameter: Plant Line Value: WS
  misc_feature: MA Experiment 20000453 PARAMETER Experiment Name: At_100uM_ABA_P Parameter: Timepoint (hr) Value: 24
  misc_feature: MA Experiment 20000453 PARAMETER Experiment Name: At_100uM_ABA_P Parameter: Tissue Value: Aerial
  misc_feature: MA Experiment 20000453 PARAMETER Experiment Name: At_100uM_ABA_P Parameter: Treatment Value: 100uM ABA vs. No Treatment
  misc_feature: MA Experiment ID: 20000527 Result: Down-regulated in Transcription
  misc_feature: MA Experiment 20000527 PARAMETER Experiment Name: At_10percent_PEG_P Parameter: Age (day) Value: 20
  misc_feature: MA Experiment 20000527 PARAMETER Experiment Name: At_10percent_PEG_P Parameter: Organism Value: A. thaliana
  misc_feature: MA Experiment 20000527 PARAMETER Experiment Name: At_10percent_PEG_P Parameter: Plant Line Value: WS
  misc_feature: MA Experiment 20000527 PARAMETER Experiment Name: At_10percent_PEG_P Parameter: Timepoint (day) Value: 20
  misc_feature: MA Experiment 20000527 PARAMETER Experiment Name: At_10percent_PEG_P Parameter: Tissue Value: Whole Plant
  misc_feature: MA Experiment 20000527 PARAMETER Experiment Name: At_10percent_PEG_P Parameter: Treatment Value: 10percent PEG vs. No Treatment
  misc_feature: MA Experiment ID: 20000574 Result: Up-regulated in Transcription
  misc_feature: MA Experiment 20000574 PARAMETER Experiment Name: At_100uM_ABA_Mutants__P Parameter: Organism Value: A. thaliana
  misc_feature: MA Experiment 20000574 PARAMETER Experiment Name: At_100uM_ABA_Mutants__P Parameter: Plant Line Value: CS23 vs. Ler wt
  misc_feature: MA Experiment 20000574 PARAMETER Experiment Name: At_100uM_ABA_Mutants__P Parameter: Timepoint (hr) Value: N/A
  misc_feature: MA Experiment 20000574 PARAMETER Experiment Name: At_100uM_ABA_Mutants__P Parameter: Tissue Value: Whole Plant
  misc_feature: MA Experiment 20000574 PARAMETER Experiment Name: At_100uM_ABA_Mutants__P Parameter: Treatment Value: None
  misc_feature: MA Experiment ID: 20001248 Result: Down-regulated in Transcription
  misc_feature: MA Experiment 20001248 PARAMETER Experiment Name: At_Far-red-induction_P Parameter: Age (day) Value: 7
  misc_feature: MA Experiment 20001248 PARAMETER Experiment Name: At_Far-red-induction_P Parameter: Light Value: Far-red vs. White
  misc_feature: MA Experiment 20001248 PARAMETER Experiment Name: At_Far-red-induction_P Parameter: Organism Value: A. thaliana
  misc_feature: MA Experiment 20001248 PARAMETER Experiment Name: At_Far-red-induction_P Parameter: Plant Line Value: Columbia
  misc_feature: MA Experiment 20001248 PARAMETER Experiment Name: At_Far-red-induction_P Parameter: Timepoint (hr) Value: 4
  misc_feature: MA Experiment 20001248 PARAMETER Experiment Name: At_Far-red-induction_P Parameter: Tissue Value: Whole Plant
  misc_feature: MA Experiment ID: 20001450 Result: Down-regulated in Transcription
  misc_feature: MA Experiment 20001450 PARAMETER Experiment Name: At_Far-red-induction_P Parameter: Age (day) Value: 7
  misc_feature: MA Experiment 20001450 PARAMETER Experiment Name: At_Far-red-induction_P Parameter: Light Value: Far-red vs. White
  misc_feature: MA Experiment 20001450 PARAMETER Experiment Name: At_Far-red-induction_P Parameter: Organism Value: A. thaliana
  misc_feature: MA Experiment 20001450 PARAMETER Experiment Name: At_Far-red-induction_P Parameter: Plant Line Value: Columbia
  misc_feature: MA Experiment 20001450 PARAMETER Experiment Name: At_Far-red-induction_P Parameter: Timepoint (hr) Value: 8
  misc_feature: MA Experiment 20001450 PARAMETER Experiment Name: At_Far-red-induction_P Parameter: Tissue Value: Whole Plant
  misc_feature: MA Experiment ID: 20001451 Result: Down-regulated in Transcription
  misc_feature: MA Experiment 20001451 PARAMETER Experiment Name: At_Far-red-induction_P Parameter: Age (day) Value: 7
  misc_feature: MA Experiment 20001451 PARAMETER Experiment Name: At_Far-red-induction_P Parameter: Light Value: Far-red vs. White
  misc_feature: MA Experiment 20001451 PARAMETER Experiment Name: At_Far-red-induction_P Parameter: Organism Value: A. thaliana
  misc_feature: MA Experiment 20001451 PARAMETER Experiment Name: At_Far-red-induction_P Parameter: Plant Line Value: Columbia
  misc_feature: MA Experiment 20001451 PARAMETER Experiment Name: At_Far-red-induction_P Parameter: Timepoint (hr) Value: 24
  misc_feature: MA Experiment 20001451 PARAMETER Experiment Name: At_Far-red-induction_P Parameter: Tissue Value: Whole Plant
  misc_feature: MA Experiment ID: 20001554 Result: Up-regulated in Transcription
  misc_feature: MA Experiment 20001554 PARAMETER Experiment Name: At_Drought_Soil_Dry_P Parameter: Age (day) Value: 21
  misc_feature: MA Experiment 20001554 PARAMETER Experiment Name: At_Drought_Soil_Dry_P Parameter: Organism Value: A. thaliana
  misc_feature: MA Experiment 20001554 PARAMETER Experiment Name: At_Drought_Soil_Dry_P Parameter: Plant Line Value: WS
  misc_feature: MA Experiment 20001554 PARAMETER Experiment Name: At_Drought_Soil_Dry_P Parameter: Post Timepoint (hr) Value: None
  misc_feature: MA Experiment 20001554 PARAMETER Experiment Name: At_Drought_Soil_Dry_P Parameter: Post-Treatment Value: None
  misc_feature: MA Experiment 20001554 PARAMETER Experiment Name: At_Drought_Soil_Dry_P Parameter: Timepoint (day) Value: 7
  misc_feature: MA Experiment 20001554 PARAMETER Experiment Name: At_Drought_Soil_Dry_P Parameter: Treatment Value: Drought vs. No Drought
  misc_feature: MA Experiment ID: 20001558 Result: Down-regulated in Transcription
  misc_feature: MA Experiment 20001558 PARAMETER Experiment Name: At_Drought_Soil_Dry_P Parameter: Age (day) Value: 27
  misc_feature: MA Experiment 20001558 PARAMETER Experiment Name: At_Drought_Soil_Dry_P Parameter: Organism Value: A. thaliana
  misc_feature: MA Experiment 20001558 PARAMETER Experiment Name: At_Drought_Soil_Dry_P Parameter: Plant Line Value: WS
  misc_feature: MA Experiment 20001558 PARAMETER Experiment Name: At_Drought_Soil_Dry_P Parameter: Post Timepoint (hr) Value: 6
  misc_feature: MA Experiment 20001558 PARAMETER Experiment Name: At_Drought_Soil_Dry_P Parameter: Post-Treatment Value: Re-Water vs. No Drought
  misc_feature: MA Experiment 20001558 PARAMETER Experiment Name: At_Drought_Soil_Dry_P Parameter: Timepoint (day) Value: 13
  misc_feature: MA Experiment 20001558 PARAMETER Experiment Name: At_Drought_Soil_Dry_P Parameter: Treatment Value: Drought vs. No Drought

SEQ ID NO: 95633 - protein, 488 aa, Arabidopsis thaliana; identical to SEQ ID NO: 91877
  peptide (1)..(488): Ceres Seq. ID no. 12729862
  misc_feature (1)..(413): Pfam Name: AMP-binding enzyme Pfam Description: AMP-binding enzyme
  misc_feature (1)..(488): Homolog of NCBI NO: 9280225 NR Description: 4-coumarate:CoA ligase [Arabidopsis thaliana]
  misc_feature (1)..(488): Homolog of NCBI NO: 22331239 NR Description: putative 4-coumarate:CoA ligase 2; protein id: supported by cDNA: gi_20465257 [Arabidopsis thaliana]
  misc_feature (1)..(488): Homolog of NCBI NO: 29888158 NR Description: 4-coumarate-CoA ligase-like protein [Arabidopsis
  misc_feature (2)..(482): Homolog of NCBI NO: 15218002 NR Description: 4-coumarate:CoA ligase 1; protein id: supported by cDNA: gi_20466561, supported by cDNA: gi_609339
  misc_feature (2)..(482): Homolog of NCBI NO: 15232507 NR Description: putative 4-coumarate:CoA ligase 2; protein id: supported by cDNA: gi_20466457, supported by cDNA: gi_5702187
  misc_feature (2)..(482): Homolog of NCBI NO: 12229665 NR Description: 4-coumarate--CoA ligase 2 (4CL 2)
  misc_feature (2)..(482): Homolog of NCBI NO: 12229632 NR Description: 4-coumarate--CoA ligase 2 (4CL 2)
  misc_feature (2)..(482): Homolog of NCBI NO: 9651915 NR Description: 4-coumarate:coA ligase 2 [Rubus idaeus]
  misc_feature (2)..(482): Homolog of NCBI NO: 12229631 NR Description: 4-coumarate--CoA ligase 1 (4CL 1)
  misc_feature (2)..(482): Homolog of NCBI NO: 18032806 NR Description: 4-coumarate:CoA ligase [Populus tomentosa]

SEQ ID NO: 95634 - protein, 469 aa, Arabidopsis thaliana; identical to SEQ ID NO: 91878
  peptide (1)..(469): Ceres Seq. ID no. 12729863
  misc_feature (1)..(394): Pfam Name: AMP-binding enzyme Pfam Description: AMP-binding enzyme
  misc_feature (1)..(469): Homolog of NCBI NO: 9280225 NR Description: 4-coumarate:CoA ligase [Arabidopsis thaliana]
  misc_feature (1)..(469): Homolog of NCBI NO: 22331239 NR Description: putative 4-coumarate:CoA ligase 2; protein id: supported by cDNA: gi_20465257 [Arabidopsis thaliana]
  misc_feature (1)..(469): Homolog of NCBI NO: 29888158 NR Description: 4-coumarate-CoA ligase-like protein [Arabidopsis
  misc_feature (1)..(463): Homolog of NCBI NO: 15218002 NR Description: 4-coumarate:CoA ligase 1; protein id: supported by cDNA: gi_20466561, supported by cDNA: gi_609339
  misc_feature (1)..(463): Homolog of NCBI NO: 15232507 NR Description: putative 4-coumarate:CoA ligase 2; protein id: supported by cDNA: gi_20466457, supported by cDNA: gi_5702187
  misc_feature (1)..(463): Homolog of NCBI NO: 12229665 NR Description: 4-coumarate--CoA ligase 2 (4CL 2)
  misc_feature (1)..(463): Homolog of NCBI NO: 12229632 NR Description: 4-coumarate--CoA ligase 2 (4CL 2)
  misc_feature (1)..(463): Homolog of NCBI NO: 9651915 NR Description: 4-coumarate:coA ligase 2 [Rubus idaeus]
  misc_feature (1)..(463): Homolog of NCBI NO: 12229631 NR Description: 4-coumarate--CoA ligase 1 (4CL 1)
  misc_feature (1)..(463): Homolog of NCBI NO: 18032806 NR Description: 4-coumarate:CoA ligase [Populus tomentosa]

SEQ ID NO: 95635 - protein, 423 aa, Arabidopsis thaliana; identical to SEQ ID NO: 91879
  peptide (1)..(423): Ceres Seq. ID no. 12729864
  misc_feature (1)..(348): Pfam Name: AMP-binding enzyme Pfam Description: AMP-binding enzyme
  misc_feature (1)..(423): Homolog of NCBI NO: 9280225 NR Description: 4-coumarate:CoA ligase [Arabidopsis thaliana]
  misc_feature (1)..(423): Homolog of NCBI NO: 22331239 NR Description: putative 4-coumarate:CoA ligase 2; protein id: supported by cDNA: gi_20465257 [Arabidopsis thaliana]
  misc_feature (1)..(423): Homolog of NCBI NO: 29888158 NR Description: 4-coumarate-CoA ligase-like protein [Arabidopsis
  misc_feature (1)..(417): Homolog of NCBI NO: 15218002 NR Description: 4-coumarate:CoA ligase 1; protein id: supported by cDNA: gi_20466561, supported by cDNA: gi_609339
  misc_feature (1)..(417): Homolog of NCBI NO: 15232507 NR Description: putative 4-coumarate:CoA ligase 2; protein id: supported by cDNA: gi_20466457, supported by cDNA: gi_5702187
  misc_feature (1)..(417): Homolog of NCBI NO: 12229665 NR Description: 4-coumarate--CoA ligase 2 (4CL 2)
  misc_feature (1)..(417): Homolog of NCBI NO: 12229632 NR Description: 4-coumarate--CoA ligase 2 (4CL 2)
  misc_feature (1)..(417): Homolog of NCBI NO: 9651915 NR Description: 4-coumarate:coA ligase 2 [Rubus idaeus]
  misc_feature (1)..(417): Homolog of NCBI NO: 12229631 NR Description: 4-coumarate--CoA ligase 1 (4CL 1)
  misc_feature (1)..(417): Homolog of NCBI NO: 18032806 NR Description: 4-coumarate:CoA ligase [Populus tomentosa]

SEQ ID NO: 95636 - DNA, 1943 bp, Arabidopsis thaliana; identical to SEQ ID NO: 91880
  misc_feature (1)..(1943): Ceres Seq. ID no. 12729865
  misc_feature: MA Experiment ID: 20000185 Result: Up-regulated in Transcription
  misc_feature: MA Experiment 20000185 PARAMETER Experiment Name: At_Roots__P Parameter: Age (day) Value: 7 vs. 21
  misc_feature: MA Experiment 20000185 PARAMETER Experiment Name: At_Roots__P Parameter: Organism Value: A. thaliana
  misc_feature: MA Experiment 20000185 PARAMETER Experiment Name: At_Roots__P Parameter: Tissue Value: Roots vs. Whole Plant
  misc_feature: MA Experiment ID: 20000439 Result: Up-regulated in Transcription
  misc_feature: MA Experiment 20000439 PARAMETER Experiment Name: At_Roots__P Parameter: Age (day) Value: 14 vs. 21
  misc_feature: MA Experiment 20000439 PARAMETER Experiment Name: At_Roots__P Parameter: Organism Value: A. thaliana
  misc_feature: MA Experiment 20000439 PARAMETER Experiment Name: At_Roots__P Parameter: Tissue Value: Roots vs. Whole Plant
  misc_feature: MA Experiment ID: 20001248 Result: Down-regulated in Transcription
  misc_feature: MA Experiment 20001248 PARAMETER Experiment Name: At_Far-red-induction_P Parameter: Age (day) Value: 7
  misc_feature: MA Experiment 20001248 PARAMETER Experiment Name: At_Far-red-induction_P Parameter: Light Value: Far-red vs. White
  misc_feature: MA Experiment 20001248 PARAMETER Experiment Name: At_Far-red-induction_P Parameter: Organism Value: A. thaliana
  misc_feature: MA Experiment 20001248 PARAMETER Experiment Name: At_Far-red-induction_P Parameter: Plant Line Value: Columbia
  misc_feature: MA Experiment 20001248 PARAMETER Experiment Name: At_Far-red-induction_P Parameter: Timepoint (hr) Value: 4
  misc_feature: MA Experiment 20001248 PARAMETER Experiment Name: At_Far-red-induction_P Parameter: Tissue Value: Whole Plant

SEQ ID NO: 95637 - protein, 556 aa, Arabidopsis thaliana; identical to SEQ ID NO: 91881
  peptide (1)..(556): Ceres Seq. ID no. 12729866
  misc_feature (65)..(481): Pfam Name: AMP-binding enzyme Pfam Description: AMP-binding enzyme
  misc_feature (1)..(556): Homolog of NCBI NO: 15232507 NR Description: putative 4-coumarate:CoA ligase 2; protein id: supported by cDNA: gi_20466457, supported by cDNA: gi_5702187
  misc_feature (1)..(556): Homolog of NCBI NO: 12229665 NR Description: 4-coumarate--CoA ligase 2 (4CL 2)
  misc_feature (1)..(554): Homolog of NCBI NO: 15218002 NR Description: 4-coumarate:CoA ligase 1; protein id: supported by cDNA: gi_20466561, supported by cDNA: gi_609339
  misc_feature (11)..(556): Homolog of NCBI NO: 12229632 NR Description: 4-coumarate--CoA ligase 2 (4CL 2)
  misc_feature (13)..(556): Homolog of NCBI NO: 9651915 NR Description: 4-coumarate:coA ligase 2 [Rubus idaeus]
  misc_feature (11)..(553): Homolog of NCBI NO: 7437854 NR Description: 4-coumarate-CoA ligase (EC 6.2.1.12) 1
  misc_feature (13)..(556): Homolog of NCBI NO: 12229631 NR Description: 4-coumarate--CoA ligase 1 (4CL 1)
  misc_feature (13)..(556): Homolog of NCBI NO: 398963 NR Description: 4-coumarate--CoA ligase 1 (4CL 1)
  misc_feature (13)..(556): Homolog of NCBI NO: 398965 NR Description: 4-coumarate--CoA ligase 2 (4CL 2)
  misc_feature (11)..(556): Homolog of NCBI NO: 7428495 NR Description: 4-coumarate-CoA ligase (EC 6.2.1.12) - common

SEQ ID NO: 95638 - protein, 465 aa, Arabidopsis thaliana; identical to SEQ ID NO: 91882
  peptide (1)..(465): Ceres Seq. ID no. 12729867
  misc_feature (1)..(390): Pfam Name: AMP-binding enzyme Pfam Description: AMP-binding enzyme
  misc_feature (1)..(465): Homolog of NCBI NO: 15232507 NR Description: putative 4-coumarate:CoA ligase 2; protein id: supported by cDNA: gi_20466457, supported by cDNA: gi_5702187
  misc_feature (1)..(465): Homolog of NCBI NO: 12229665 NR Description: 4-coumarate--CoA ligase 2 (4CL 2)
  misc_feature (1)..(463): Homolog of NCBI NO: 15218002 NR Description: 4-coumarate:CoA ligase 1; protein id: supported by cDNA: gi_20466561, supported by cDNA: gi_609339
  misc_feature (1)..(465): Homolog of NCBI NO: 12229632 NR Description: 4-coumarate--CoA ligase 2 (4CL 2)
  misc_feature (1)..(465): Homolog of NCBI NO: 9651915 NR Description: 4-coumarate:coA ligase 2 [Rubus idaeus]
  misc_feature (1)..(462): Homolog of NCBI NO: 7437854 NR Description: 4-coumarate-CoA ligase (EC 6.2.1.12) 1
  misc_feature (1)..(465): Homolog of NCBI NO: 12229631 NR Description: 4-coumarate--CoA ligase 1 (4CL 1)
  misc_feature (1)..(465): Homolog of NCBI NO: 398963 NR Description: 4-coumarate--CoA ligase 1 (4CL 1)
  misc_feature (1)..(465): Homolog of NCBI NO: 398965 NR Description: 4-coumarate--CoA ligase 2 (4CL 2)
  misc_feature (1)..(465): Homolog of NCBI NO: 7428495 NR Description: 4-coumarate-CoA ligase (EC 6.2.1.12) - common

SEQ ID NO: 95639 - protein, 343 aa, Arabidopsis thaliana; identical to SEQ ID NO: 91883
  peptide (1)..(343): Ceres Seq. ID no. 12729868
  misc_feature (1)..(268): Pfam Name: AMP-binding enzyme Pfam Description: AMP-binding enzyme
  misc_feature (1)..(343): Homolog of NCBI NO: 15232507 NR Description: putative 4-coumarate:CoA ligase 2; protein id: supported by cDNA: gi_20466457, supported by cDNA: gi_5702187
  misc_feature (1)..(343): Homolog of NCBI NO: 12229665 NR Description: 4-coumarate--CoA ligase 2 (4CL 2)
  misc_feature (1)..(341): Homolog of NCBI NO: 15218002 NR Description: 4-coumarate:CoA ligase 1; protein id: supported by cDNA: gi_20466561, supported by cDNA: gi_609339
  misc_feature (1)..(343): Homolog of NCBI NO: 12229632 NR Description: 4-coumarate--CoA ligase 2 (4CL 2)
  misc_feature (1)..(343): Homolog of NCBI NO: 9651915 NR Description: 4-coumarate:coA ligase 2 [Rubus idaeus]
  misc_feature (1)..(340): Homolog of NCBI NO: 7437854 NR Description: 4-coumarate-CoA ligase (EC 6.2.1.12) 1
  misc_feature (1)..(343): Homolog of NCBI NO: 12229631 NR Description: 4-coumarate--CoA ligase 1 (4CL 1)
  misc_feature (1)..(343): Homolog of NCBI NO: 398963 NR Description: 4-coumarate--CoA ligase 1 (4CL 1)
  misc_feature (1)..(343): Homolog of NCBI NO: 398965 NR Description: 4-coumarate--CoA ligase 2 (4CL 2)
  misc_feature (1)..(343): Homolog of NCBI NO: 7428495 NR Description: 4-coumarate-CoA ligase (EC 6.2.1.12) - common

SEQ ID NO: 95640 - DNA, 1889 bp, Arabidopsis thaliana; identical to SEQ ID NO: 91884
  misc_feature (1)..(1889): Ceres Seq. ID no. 12729881
  misc_feature: MA Experiment ID: 20000179 Result: Down-regulated in Transcription
  misc_feature: MA Experiment 20000179 PARAMETER Experiment Name: At_Germinating_Seeds_P Parameter: Age (hr) Value: 6 vs. 0
  misc_feature: MA Experiment 20000179 PARAMETER Experiment Name: At_Germinating_Seeds_P Parameter: Tissue Value: Germinating Seeds
  misc_feature: MA Experiment ID: 20000180 Result: Down-regulated in Transcription
  misc_feature: MA Experiment 20000180 PARAMETER Experiment Name: At_Germinating_Seeds_P Parameter: Age (hr) Value: 24 vs. 0
  misc_feature: MA Experiment 20000180 PARAMETER Experiment Name: At_Germinating_Seeds_P Parameter: Tissue Value: Germinating Seeds
  misc_feature: MA Experiment ID: 20000437 Result: Up-regulated in Transcription
  misc_feature: MA Experiment 20000437 PARAMETER Experiment Name: At_Drought_P Parameter: Age (day) Value: 8
  misc_feature: MA Experiment 20000437 PARAMETER Experiment Name: At_Drought_P Parameter: Organism Value: A. thaliana
  misc_feature: MA Experiment 20000437 PARAMETER Experiment Name: At_Drought_P Parameter: Plant Line Value: WS
  misc_feature: MA Experiment 20000437 PARAMETER Experiment Name: At_Drought_P Parameter: Timepoint (hr) Value: 24
  misc_feature: MA Experiment 20000437 PARAMETER Experiment Name: At_Drought_P Parameter: Tissue Value: Whole Plant
  misc_feature: MA Experiment 20000437 PARAMETER Experiment Name: At_Drought_P Parameter: Treatment Value: Drought vs. No Drought

SEQ ID NO: 95641 - protein, 527 aa, Arabidopsis thaliana; identical to SEQ ID NO: 91885
  peptide (1)..(527): Ceres Seq. ID no. 12729882
  misc_feature (1)..(527): Homolog of NCBI NO: 22331243 NR Description: glycosyl hydrolase family 1; protein id: supported by cDNA: gi_16604492, supported by cDNA: gi_17381179,
  misc_feature (1)..(527): Homolog of NCBI NO: 16604493 NR Description: AT3g21370/MHC9_5 [Arabidopsis thaliana]
  misc_feature (1)..(504): Homolog of NCBI NO: 1076442 NR Description: beta-glucosidase (EC 3.2.1.21) - rape
  misc_feature (5)..(527): Homolog of NCBI NO: 12043529 NR Description: beta-glucosidase 1 [Arabidopsis thaliana]
  misc_feature (5)..(527): Homolog of NCBI NO: 15218992 NR Description: glycosyl hydrolase family 1, beta-glucosidase protein id: At1g52400.1, supported by cDNA: gi_14532461,
  misc_feature (5)..(527): Homolog of NCBI NO: 12229686 NR Description: Beta-glucosidase homolog precursor
  misc_feature (5)..(527): Homolog of NCBI NO: 23397037 NR Description: putative beta-glucosidase [Arabidopsis thaliana]
  misc_feature (2)..(516): Homolog of NCBI NO: 25289457 NR Description: probable beta-glucosidase (EC 3.2.1.21) ATA27 - Arabidopsis thaliana >gi|2746341|gb|AAC39504.1| ATA27
  misc_feature (2)..(516): Homolog of NCBI NO: 15222905 NR Description: glycosyl hydrolase family 1, protein id: At1g75940.1, supported by cDNA: gi_2746340
  misc_feature (2)..(516): Homolog of NCBI NO: 25404995 NR Description: protein T4O12.15 [imported] - Arabidopsis >gi|8778810|gb|AAF26759.2|AC007396_8 T4O12.15 [Arabidopsis

SEQ ID NO: 95642 - protein, 485 aa, Arabidopsis thaliana; identical to SEQ ID NO: 91886
  peptide (1)..(485): Ceres Seq. ID no. 12729883
  misc_feature (1)..(485): Homolog of NCBI NO: 22331243 NR Description: glycosyl hydrolase family 1; protein id: supported by cDNA: gi_16604492, supported by cDNA: gi_17381179,
  misc_feature (1)..(485): Homolog of NCBI NO: 16604493 NR Description: AT3g21370/MHC9_5 [Arabidopsis thaliana]
  misc_feature (1)..(462): Homolog of NCBI NO: 1076442 NR Description: beta-glucosidase (EC 3.2.1.21) - rape
  misc_feature (1)..(485): Homolog of NCBI NO: 12043529 NR Description: beta-glucosidase 1 [Arabidopsis thaliana]
  misc_feature (1)..(485): Homolog of NCBI NO: 15218992 NR Description: glycosyl hydrolase family 1, beta-glucosidase protein id: At1g52400.1, supported by cDNA: gi_14532461,
  misc_feature (1)..(485): Homolog of NCBI NO: 12229686 NR Description: Beta-glucosidase homolog precursor
  misc_feature (1)..(485): Homolog of NCBI NO: 23397037 NR Description: putative beta-glucosidase [Arabidopsis thaliana]
  misc_feature (1)..(474): Homolog of NCBI NO: 25289457 NR Description: probable beta-glucosidase (EC 3.2.1.21) ATA27 - Arabidopsis thaliana >gi|2746341|gb|AAC39504.1| ATA27
  misc_feature (1)..(474): Homolog of NCBI NO: 15222905 NR Description: glycosyl hydrolase family 1, protein id: At1g75940.1, supported by cDNA: gi_2746340
  misc_feature (1)..(474): Homolog of NCBI NO: 25404995 NR Description: protein T4O12.15 [imported] - Arabidopsis >gi|8778810|gb|AAF26759.2|AC007396_8 T4O12.15 [Arabidopsis

SEQ ID NO: 95643 - protein, 428 aa, Arabidopsis thaliana; identical to SEQ ID NO: 91887
  peptide (1)..(428): Ceres Seq. ID no. 12729884
  misc_feature (1)..(428): Homolog of NCBI NO: 22331243 NR Description: glycosyl hydrolase family 1; protein id: supported by cDNA: gi_16604492, supported by cDNA: gi_17381179,
  misc_feature (1)..(428): Homolog of NCBI NO: 16604493 NR Description: AT3g21370/MHC9_5 [Arabidopsis thaliana]
  misc_feature (1)..(405): Homolog of NCBI NO: 1076442 NR Description: beta-glucosidase (EC 3.2.1.21) - rape
  misc_feature (1)..(428): Homolog of NCBI NO: 12043529 NR Description: beta-glucosidase 1 [Arabidopsis thaliana]
  misc_feature (1)..(428): Homolog of NCBI NO: 15218992 NR Description: glycosyl hydrolase family 1, beta-glucosidase protein id: At1g52400.1, supported by cDNA: gi_14532461,
  misc_feature (1)..(428): Homolog of NCBI NO: 12229686 NR Description: Beta-glucosidase homolog precursor
  misc_feature (1)..(428): Homolog of NCBI NO: 23397037 NR Description: putative beta-glucosidase [Arabidopsis thaliana]
  misc_feature (1)..(417): Homolog of NCBI NO: 25289457 NR Description: probable beta-glucosidase (EC 3.2.1.21) ATA27 - Arabidopsis thaliana >gi|2746341|gb|AAC39504.1| ATA27
  misc_feature (1)..(417): Homolog of NCBI NO: 15222905 NR Description: glycosyl hydrolase family 1, protein id: At1g75940.1, supported by cDNA: gi_2746340
  misc_feature (1)..(417): Homolog of NCBI NO: 25404995 NR Description: protein T4O12.15 [imported] - Arabidopsis >gi|8778810|gb|AAF26759.2|AC007396_8 T4O12.15 [Arabidopsis

SEQ ID NO: 95644 - DNA, 2271 bp, Arabidopsis thaliana; identical to SEQ ID NO: 91888
  misc_feature (1)..(2271): Ceres Seq. ID no. 12729920
  misc_feature: MA Experiment ID: 20000171 Result: Up-regulated in Transcription
  misc_feature: MA Experiment 20000171 PARAMETER Experiment Name: At_42deg_Heat_P Parameter: Age (day) Value: 14
  misc_feature: MA Experiment 20000171 PARAMETER Experiment Name: At_42deg_Heat_P Parameter: Organism Value: A. thaliana
  misc_feature: MA Experiment 20000171 PARAMETER Experiment Name: At_42deg_Heat_P Parameter: Plant Line Value: WS
  misc_feature: MA Experiment 20000171 PARAMETER Experiment Name: At_42deg_Heat_P Parameter: Temperature (deg C) Value: 42 vs. 22
  misc_feature: MA Experiment 20000171 PARAMETER Experiment Name: At_42deg_Heat_P Parameter: Timepoint (hr) Value: 1
  misc_feature: MA Experiment 20000171 PARAMETER Experiment Name: At_42deg_Heat_P Parameter: Tissue Value: Aerial
  misc_feature: MA Experiment ID: 20000173 Result: Up-regulated in Transcription
  misc_feature: MA Experiment 20000173 PARAMETER Experiment Name: At_42deg_Heat_P Parameter: Age (day) Value: 14
  misc_feature: MA Experiment 20000173 PARAMETER Experiment Name: At_42deg_Heat_P Parameter: Organism Value: A. thaliana
  misc_feature: MA Experiment 20000173 PARAMETER Experiment Name: At_42deg_Heat_P Parameter: Plant Line Value: WS
  misc_feature: MA Experiment 20000173 PARAMETER Experiment Name: At_42deg_Heat_P Parameter: Temperature (deg C) Value: 42 vs. 22
  misc_feature: MA Experiment 20000173 PARAMETER Experiment Name: At_42deg_Heat_P Parameter: Timepoint (hr) Value: 6
  misc_feature: MA Experiment 20000173 PARAMETER Experiment Name: At_42deg_Heat_P Parameter: Tissue Value: Aerial
  misc_feature: MA Experiment ID: 20000185 Result: Up-regulated in Transcription
  misc_feature: MA Experiment 20000185 PARAMETER Experiment Name: At_Roots__P Parameter: Age (day) Value: 7 vs. 21
  misc_feature: MA Experiment 20000185 PARAMETER Experiment Name: At_Roots__P Parameter: Organism Value: A. thaliana
  misc_feature: MA Experiment 20000185 PARAMETER Experiment Name: At_Roots__P Parameter: Tissue Value: Roots vs. Whole Plant
  misc_feature: MA Experiment ID: 20000439 Result: Up-regulated in Transcription
  misc_feature: MA Experiment 20000439 PARAMETER Experiment Name: At_Roots__P Parameter: Age (day) Value: 14 vs. 21
  misc_feature: MA Experiment 20000439 PARAMETER Experiment Name: At_Roots__P Parameter: Organism Value: A. thaliana
  misc_feature: MA Experiment 20000439 PARAMETER Experiment Name: At_Roots__P Parameter: Tissue Value: Roots vs. Whole Plant

SEQ ID NO: 95645 - protein, 756 aa, Arabidopsis thaliana; identical to SEQ ID NO: 91889
  peptide (1)..(756): Ceres Seq. ID no. 12729921
  misc_feature (302)..(733): Pfam Name: Domain of unknown function DUF221 Pfam Description: Domain of unknown function DUF221
  misc_feature (1)..(746): Homolog of NCBI NO: 15233476 NR Description: unknown protein; protein id: At4g04340.1, by cDNA: gi_15810532, supported by cDNA: gi_20260619 [Arabidopsis >gi|25407261|pir||H85054 hypothetical protein AT4g04340
  misc_feature (1)..(746): Homolog of NCBI NO: 15810533 NR Description: unknown protein [Arabidopsis thaliana]
  misc_feature (1)..(752): Homolog of NCBI NO: 25404887 NR Description: protein F24O1.4 [imported] - Arabidopsis thaliana
  misc_feature (1)..(752): Homolog of NCBI NO: 15220762 NR Description: hypothetical protein; protein id: At1g62320.1
  misc_feature (1)..(756): Homolog of NCBI NO: 15236212 NR Description: hypothetical protein; protein id: At4g02900.1
  misc_feature (1)..(718): Homolog of NCBI NO: 25402694 NR Description: hypothetical protein [imported] - Arabidopsis >gi|3157932|gb|AAC17615.1| Similar to hypothetical protein HYP1
  misc_feature (203)..(746): Homolog of NCBI NO: 15234725 NR Description: putative protein; protein id: At4g22120.1
  misc_feature (1)..(201): Homolog of NCBI NO: 15234725 NR Description: putative protein; protein id: At4g22120.1
  misc_feature (301)..(727): Homolog of NCBI NO: 7485199 NR Description: hypothetical protein - Arabidopsis thaliana hypothetical protein [Arabidopsis thaliana]
  misc_feature (1)..(159): Homolog of NCBI NO: 7485199 NR Description: hypothetical protein - Arabidopsis thaliana hypothetical protein [Arabidopsis thaliana]

SEQ ID NO: 95646 - protein, 681 aa, Arabidopsis thaliana; identical to SEQ ID NO: 91890
  peptide (1)..(681): Ceres Seq. ID no. 12729922
  misc_feature (227)..(658): Pfam Name: Domain of unknown function DUF221 Pfam Description: Domain of unknown function DUF221
  misc_feature (1)..(671): Homolog of NCBI NO: 15233476 NR Description: unknown protein; protein id: At4g04340.1, by cDNA: gi_15810532, supported by cDNA: gi_20260619 [Arabidopsis >gi|25407261|pir||H85054 hypothetical protein AT4g04340
  misc_feature (1)..(671): Homolog of NCBI NO: 15810533 NR Description: unknown protein [Arabidopsis thaliana]
  misc_feature (1)..(677): Homolog of NCBI NO: 25404887 NR Description: protein F24O1.4 [imported] - Arabidopsis thaliana
  misc_feature (1)..(677): Homolog of NCBI NO: 15220762 NR Description: hypothetical protein; protein id: At1g62320.1
  misc_feature (1)..(681): Homolog of NCBI NO: 15236212 NR Description: hypothetical protein; protein id: At4g02900.1
  misc_feature (1)..(643): Homolog of NCBI NO: 25402694 NR Description: hypothetical protein [imported] - Arabidopsis >gi|3157932|gb|AAC17615.1| Similar to hypothetical protein HYP1
  misc_feature (128)..(671): Homolog of NCBI NO: 15234725 NR Description: putative protein; protein id: At4g22120.1
  misc_feature (1)..(126): Homolog of NCBI NO: 15234725 NR Description: putative protein; protein id: At4g22120.1
  misc_feature (226)..(652): Homolog of NCBI NO: 7485199 NR Description: hypothetical protein - Arabidopsis thaliana hypothetical protein [Arabidopsis thaliana]
  misc_feature (1)..(84): Homolog of NCBI NO: 7485199 NR Description: hypothetical protein - Arabidopsis thaliana hypothetical protein [Arabidopsis thaliana]

SEQ ID NO: 95647 - protein, 675 aa, Arabidopsis thaliana; identical to SEQ ID NO: 91891
  peptide (1)..(675): Ceres Seq. ID no. 12729923
  misc_feature (221)..(652): Pfam Name: Domain of unknown function DUF221 Pfam Description: Domain of unknown function DUF221
  misc_feature (1)..(665): Homolog of NCBI NO: 15233476 NR Description: unknown protein; protein id: At4g04340.1, by cDNA: gi_15810532, supported by cDNA: gi_20260619 [Arabidopsis >gi|25407261|pir||H85054 hypothetical protein AT4g04340
  misc_feature (1)..(665): Homolog of NCBI NO: 15810533 NR Description: unknown protein [Arabidopsis thaliana]
  misc_feature (1)..(671): Homolog of NCBI NO: 25404887 NR Description: protein F24O1.4 [imported] - Arabidopsis thaliana
  misc_feature (1)..(671): Homolog of NCBI NO: 15220762 NR Description: hypothetical protein; protein id: At1g62320.1
  misc_feature (1)..(675): Homolog of NCBI NO: 15236212 NR Description: hypothetical protein; protein id: At4g02900.1
  misc_feature (1)..(637): Homolog of NCBI NO: 25402694 NR Description: hypothetical protein [imported] - Arabidopsis >gi|3157932|gb|AAC17615.1| Similar to hypothetical protein HYP1
  misc_feature (122)..(665): Homolog of NCBI NO: 15234725 NR Description: putative protein; protein id: At4g22120.1
  misc_feature (1)..(120): Homolog of NCBI NO: 15234725 NR Description: putative protein; protein id: At4g22120.1
  misc_feature (220)..(646): Homolog of NCBI NO: 7485199 NR Description: hypothetical protein - Arabidopsis thaliana hypothetical protein [Arabidopsis thaliana]
  misc_feature (1)..(78): Homolog of NCBI NO: 7485199 NR Description: hypothetical protein - Arabidopsis thaliana hypothetical protein [Arabidopsis thaliana]

SEQ ID NO: 95648 - DNA, 1614 bp, Arabidopsis thaliana; identical to SEQ ID NO: 91892
  misc_feature (1)..(1614): Ceres Seq. ID no. 12729924
  misc_feature: MA Experiment ID: 108434 Result: Down-regulated in Transcription
  misc_feature: MA Experiment 108434 PARAMETER Experiment Name: At_Root_Tips_cDNA_P Parameter: Tissue Value: Root Tips
  misc_feature: MA Experiment ID: 108585 Result: Up-regulated in Transcription
  misc_feature: MA Experiment 108585 PARAMETER Experiment Name: At_5mM_NaNP_cDNA_P Parameter: Timepoint (hr) Value: 6
  misc_feature: MA Experiment 108585 PARAMETER Experiment Name: At_5mM_NaNP_cDNA_P Parameter: Tissue Value: Aerial
  misc_feature: MA Experiment 108585 PARAMETER Experiment Name: At_5mM_NaNP_cDNA_P Parameter: Treatment Value: null
  misc_feature: MA Experiment ID: 108668 Result: Up-regulated in Transcription
  misc_feature: MA Experiment 108668 PARAMETER Experiment Name: At_2mM_SA_cDNA_P Parameter: Plant Line Value: WS
  misc_feature: MA Experiment 108668 PARAMETER Experiment Name: At_2mM_SA_cDNA_P Parameter: Timepoint (hr) Value: 6
  misc_feature: MA Experiment 108668 PARAMETER Experiment Name: At_2mM_SA_cDNA_P Parameter: Treatment Value: 2mM SA vs. No Treatment

SEQ ID NO: 95649 - protein, 537 aa, Arabidopsis thaliana; identical to SEQ ID NO: 38774
  peptide (1)..(537): Ceres Seq. ID no. 12729925
  misc_feature (1)..(537): Homolog of NCBI NO: 30686316 NR Description: protein kinase family [Arabidopsis thaliana]
  misc_feature (1)..(537): Homolog of NCBI NO: 11994399 NR Description: contains similarity to receptor protein
  misc_feature (4)..(537): Homolog of NCBI NO: 37651058 NR Description: Nod-factor receptor 1a [Lotus corniculatus var.
  misc_feature (4)..(537): Homolog of NCBI NO: 37651060 NR Description: Nod-factor receptor 1b [Lotus corniculatus var.
  misc_feature (3)..(537): Homolog of NCBI NO: 34485516 NR Description: LysM domain-containing receptor-like kinase 3
  misc_feature (214)..(537): Homolog of NCBI NO: 38175551 NR Description: receptor protein kinase PERK1-like protein [Oryza
  misc_feature (1)..(144): Homolog of NCBI NO: 38175551 NR Description: receptor protein kinase PERK1-like protein [Oryza
  misc_feature (222)..(516): Homolog of NCBI NO: 34485514 NR Description: LysM domain-containing receptor-like kinase 1
  misc_feature (3)..(186): Homolog of NCBI NO: 34485514 NR Description: LysM domain-containing receptor-like kinase 1
  misc_feature (50)..(516): Homolog of NCBI NO: 34485526 NR Description: LysM domain-containing receptor-like kinase 4

SEQ ID NO: 95650 - protein, 491 aa, Arabidopsis thaliana; identical to SEQ ID NO: 38775
  peptide (1)..(491): Ceres Seq. ID no. 12729926
  misc_feature (1)..(491): Homolog of NCBI NO: 30686316 NR Description: protein kinase family [Arabidopsis thaliana]
  misc_feature (1)..(491): Homolog of NCBI NO: 11994399 NR Description: contains similarity to receptor protein
  misc_feature (1)..(491): Homolog of NCBI NO: 37651058 NR Description: Nod-factor receptor 1a [Lotus corniculatus var.
  misc_feature (1)..(491): Homolog of NCBI NO: 37651060 NR Description: Nod-factor receptor 1b [Lotus corniculatus var.
  misc_feature (1)..(491): Homolog of NCBI NO: 34485516 NR Description: LysM domain-containing receptor-like kinase 3
  misc_feature (168)..(491): Homolog of NCBI NO: 38175551 NR Description: receptor protein kinase PERK1-like protein [Oryza
  misc_feature (1)..(98): Homolog of NCBI NO: 38175551 NR Description: receptor protein kinase PERK1-like protein [Oryza
  misc_feature (176)..(470): Homolog of NCBI NO: 34485514 NR Description: LysM domain-containing receptor-like kinase 1
  misc_feature (1)..(140): Homolog of NCBI NO: 34485514 NR Description: LysM domain-containing receptor-like kinase 1
  misc_feature (4)..(470): Homolog of NCBI NO: 34485526 NR Description: LysM domain-containing receptor-like kinase 4

SEQ ID NO: 95651 - DNA, 1641 bp, Arabidopsis thaliana; identical to SEQ ID NO: 91895
  misc_feature (1)..(1641): Ceres Seq. ID no. 12729927
  misc_feature: MA Experiment ID: 20000437 Result: Up-regulated in Transcription
  misc_feature: MA Experiment 20000437 PARAMETER Experiment Name: At_Drought_P Parameter: Age (day) Value: 8
  misc_feature: MA Experiment 20000437 PARAMETER Experiment Name: At_Drought_P Parameter: Organism Value: A. thaliana
  misc_feature: MA Experiment 20000437 PARAMETER Experiment Name: At_Drought_P Parameter: Plant Line Value: WS
  misc_feature: MA Experiment 20000437 PARAMETER Experiment Name: At_Drought_P Parameter: Timepoint (hr) Value: 24
  misc_feature: MA Experiment 20000437 PARAMETER Experiment Name: At_Drought_P Parameter: Tissue Value: Whole Plant
  misc_feature: MA Experiment 20000437 PARAMETER Experiment Name: At_Drought_P Parameter: Treatment Value: Drought vs. No Drought

SEQ ID NO: 95652 - protein, 546 aa, Arabidopsis thaliana; identical to SEQ ID NO: 91896
  peptide (1)..(546): Ceres Seq. ID no. 12729928
  misc_feature (102)..(515): Pfam Name: Protein phosphatase 2A regulatory B subunit (B56 Pfam Description: Protein phosphatase 2A regulatory B subunit
  misc_feature (1)..(546): Homolog of NCBI NO: 15233119 NR Description: B regulatory subunit of PP2A, putative; protein
  misc_feature (42)..(546): Homolog of NCBI NO: 11994401 NR Description: protein phosphatase 2A B' regulatory subunit
  misc_feature (1)..(68): Homolog of NCBI NO: 11994401 NR Description: protein phosphatase 2A B' regulatory subunit
  misc_feature (43)..(544): Homolog of NCBI NO: 7485149 NR Description: hypothetical protein - Arabidopsis thaliana phosphatase like protein [Arabidopsis thaliana]
  misc_feature (1)..(56): Homolog of NCBI NO: 7485149 NR Description: hypothetical protein - Arabidopsis thaliana phosphatase like protein [Arabidopsis thaliana]
  misc_feature (43)..(544): Homolog of NCBI NO: 18414444 NR Description: Expressed protein; protein id: At4g15415.1, by cDNA: gi_20147342, supported by cDNA: gi_2160693 [Arabidopsis >gi|2160694|gb|AAB58902.1| B' regulatory subunit of PP2A
  misc_feature (43)..(544): Homolog of NCBI NO: 20147343 NR Description: AT4g15410/dl3750w [Arabidopsis thaliana]
  misc_feature (1)..(525): Homolog of NCBI NO: 21530786 NR Description: putative protein phosphatase 2A B'teta subunit
  misc_feature (1)..(517): Homolog of NCBI NO: 15230961 NR Description: putative B regulatory subunit of protein by cDNA: gi_16323339 [Arabidopsis thaliana]
  misc_feature (43)..(529): Homolog of NCBI NO: 21530784 NR Description: putative protein phosphatase 2A B'zeta subunit

SEQ ID NO: 95653 - protein, 478 aa, Arabidopsis thaliana; identical to SEQ ID NO: 91897
  peptide (1)..(478): Ceres Seq. ID no. 12729929
  misc_feature (34)..(447): Pfam Name: Protein phosphatase 2A regulatory B subunit (B56 Pfam Description: Protein phosphatase 2A regulatory B subunit
  misc_feature (1)..(478): Homolog of NCBI NO: 15233119 NR Description: B regulatory subunit of PP2A, putative; protein
  misc_feature (1)..(478): Homolog of NCBI NO: 11994401 NR Description: protein phosphatase 2A B' regulatory subunit
  misc_feature (1)..(476): Homolog of NCBI NO: 7485149 NR Description: hypothetical protein - Arabidopsis thaliana phosphatase like protein [Arabidopsis thaliana]
  misc_feature (1)..(476): Homolog of NCBI NO: 18414444 NR Description: Expressed protein; protein id: At4g15415.1, by cDNA: gi_20147342, supported by cDNA: gi_2160693 [Arabidopsis >gi|2160694|gb|AAB58902.1| B' regulatory subunit of PP2A
  misc_feature (1)..(476): Homolog of NCBI NO: 20147343 NR Description: AT4g15410/dl3750w [Arabidopsis thaliana]
  misc_feature (1)..(457): Homolog of NCBI NO: 21530786 NR Description: putative protein phosphatase 2A B'teta subunit
  misc_feature (1)..(449): Homolog of NCBI NO: 15230961 NR Description: putative B regulatory subunit of protein by cDNA: gi_16323339 [Arabidopsis thaliana]
  misc_feature (1)..(461): Homolog of NCBI NO: 21530784 NR Description: putative protein phosphatase 2A B'zeta subunit
  misc_feature (1)..(449): Homolog of NCBI NO: 15222851 NR Description: B regulatory subunit of protein phosphatase 2A, protein id: At1g13460.1, supported by cDNA: 126195. [Arabidopsis
  misc_feature (1)..(459): Homolog of NCBI NO: 34394129 NR Description: putative protein phosphatase PP2A0 B' subunit

SEQ ID NO: 95654 - protein, 423 aa, Arabidopsis thaliana; identical to SEQ ID NO: 91898
  peptide (1)..(423): Ceres Seq. ID no. 12729930
  misc_feature (1)..(392): Pfam Name: Protein phosphatase 2A regulatory B subunit (B56 Pfam Description: Protein phosphatase 2A regulatory B subunit
  misc_feature (1)..(423): Homolog of NCBI NO: 15233119 NR Description: B regulatory subunit of PP2A, putative; protein
  misc_feature (1)..(423): Homolog of NCBI NO: 11994401 NR Description: protein phosphatase 2A B' regulatory subunit
  misc_feature (1)..(421): Homolog of NCBI NO: 7485149 NR Description: hypothetical protein - Arabidopsis thaliana phosphatase like protein [Arabidopsis thaliana]
  misc_feature (1)..(421): Homolog of NCBI NO: 18414444 NR Description: Expressed protein; protein id: At4g15415.1, by cDNA: gi_20147342, supported by cDNA: gi_2160693 [Arabidopsis >gi|2160694|gb|AAB58902.1| B' regulatory subunit of PP2A
  misc_feature (1)..(421): Homolog of NCBI NO: 20147343 NR Description: AT4g15410/dl3750w [Arabidopsis thaliana]
  misc_feature (1)..(402): Homolog of NCBI NO: 21530786 NR Description: putative protein phosphatase 2A B'teta subunit
  misc_feature (1)..(394): Homolog of NCBI NO: 15230961 NR Description: putative B regulatory subunit of protein by cDNA: gi_16323339 [Arabidopsis thaliana]
  misc_feature (1)..(406): Homolog of NCBI NO: 21530784 NR Description: putative protein phosphatase 2A B'zeta subunit
  misc_feature (1)..(394): Homolog of NCBI NO: 15222851 NR Description: B regulatory subunit of protein phosphatase 2A, protein id: At1g13460.1, supported by cDNA: 126195. [Arabidopsis
  misc_feature (1)..(404): Homolog of NCBI NO: 34394129 NR Description: putative protein phosphatase PP2A0 B' subunit

SEQ ID NO: 95655 - DNA, 633 bp, Arabidopsis thaliana; identical to SEQ ID NO: 91899
  misc_feature (1)..(633): Ceres Seq. ID no. 12729960
  misc_feature: MA Experiment ID: 20000437 Result: Down-regulated in Transcription
  misc_feature: MA Experiment 20000437 PARAMETER Experiment Name: At_Drought_P Parameter: Age (day) Value: 8
  misc_feature: MA Experiment 20000437 PARAMETER Experiment Name: At_Drought_P Parameter: Organism Value: A. thaliana
  misc_feature: MA Experiment 20000437 PARAMETER Experiment Name: At_Drought_P Parameter: Plant Line Value: WS
  misc_feature: MA Experiment 20000437 PARAMETER Experiment Name: At_Drought_P Parameter: Timepoint (hr) Value: 24
  misc_feature: MA Experiment 20000437 PARAMETER Experiment Name: At_Drought_P Parameter: Tissue Value: Whole Plant
  misc_feature: MA Experiment 20000437 PARAMETER Experiment Name: At_Drought_P Parameter: Treatment Value: Drought vs. No Drought
  misc_feature: MA Experiment ID: 20000438 Result: Up-regulated in Transcription
  misc_feature: MA Experiment 20000438 PARAMETER Experiment Name: At_Shoots__P Parameter: Age (day) Value: 14
  misc_feature: MA Experiment 20000438 PARAMETER Experiment Name: At_Shoots__P Parameter: Tissue Value: Shoots vs. Whole Plant
  misc_feature: MA Experiment ID: 20001247 Result: Up-regulated in Transcription
  misc_feature: MA Experiment 20001247 PARAMETER Experiment Name: At_Far-red-induction_P Parameter: Age (day) Value: 7
  misc_feature: MA Experiment 20001247 PARAMETER Experiment Name: At_Far-red-induction_P Parameter: Light Value: Far-red vs. White
  misc_feature: MA Experiment 20001247 PARAMETER Experiment Name: At_Far-red-induction_P Parameter: Organism Value: A. thaliana
  misc_feature: MA Experiment 20001247 PARAMETER Experiment Name: At_Far-red-induction_P Parameter: Plant Line Value: Columbia
  misc_feature: MA Experiment 20001247 PARAMETER Experiment Name: At_Far-red-induction_P Parameter: Timepoint (hr) Value: 1
  misc_feature: MA Experiment 20001247 PARAMETER Experiment Name: At_Far-red-induction_P Parameter: Tissue Value: Whole Plant
  misc_feature: MA Experiment ID: 20001450 Result: Up-regulated in Transcription
  misc_feature: MA Experiment 20001450 PARAMETER Experiment Name: At_Far-red-induction_P Parameter: Age (day) Value: 7
  misc_feature: MA Experiment 20001450 PARAMETER Experiment Name: At_Far-red-induction_P Parameter: Light Value: Far-red vs. White
  misc_feature: MA Experiment 20001450 PARAMETER Experiment Name: At_Far-red-induction_P Parameter: Organism Value: A. thaliana
  misc_feature: MA Experiment 20001450 PARAMETER Experiment Name: At_Far-red-induction_P Parameter: Plant Line Value: Columbia
  misc_feature: MA Experiment 20001450 PARAMETER Experiment Name: At_Far-red-induction_P Parameter: Timepoint (hr) Value: 8
  misc_feature: MA Experiment 20001450 PARAMETER Experiment Name: At_Far-red-induction_P Parameter: Tissue Value: Whole Plant
  misc_feature: MA Experiment ID: 20001451 Result: Up-regulated in Transcription
  misc_feature: MA Experiment 20001451 PARAMETER Experiment Name: At_Far-red-induction_P Parameter: Age (day) Value: 7
  misc_feature: MA Experiment 20001451 PARAMETER Experiment Name: At_Far-red-induction_P Parameter: Light Value: Far-red vs. White
  misc_feature: MA Experiment 20001451 PARAMETER Experiment Name: At_Far-red-induction_P Parameter: Organism Value: A. thaliana
  misc_feature: MA Experiment 20001451 PARAMETER Experiment Name: At_Far-red-induction_P Parameter: Plant Line Value: Columbia
  misc_feature: MA Experiment 20001451 PARAMETER Experiment Name: At_Far-red-induction_P Parameter: Timepoint (hr) Value: 24
  misc_feature: MA Experiment 20001451 PARAMETER Experiment Name: At_Far-red-induction_P Parameter: Tissue Value: Whole Plant
  misc_feature: MA Experiment ID: 20001557 Result: Down-regulated in Transcription
  misc_feature: MA Experiment 20001557 PARAMETER Experiment Name: At_Drought_Soil_Dry_P Parameter: Age (day) Value: 27
  misc_feature: MA Experiment 20001557 PARAMETER Experiment Name: At_Drought_Soil_Dry_P Parameter: Organism Value: A. thaliana
  misc_feature: MA Experiment 20001557 PARAMETER Experiment Name: At_Drought_Soil_Dry_P Parameter: Plant Line Value: WS
  misc_feature: MA Experiment 20001557 PARAMETER Experiment Name: At_Drought_Soil_Dry_P Parameter: Post Timepoint (hr) Value: 3
  misc_feature: MA Experiment 20001557 PARAMETER Experiment Name: At_Drought_Soil_Dry_P Parameter: Post-Treatment Value: Re-Water vs. No Drought
  misc_feature: MA Experiment 20001557 PARAMETER Experiment Name: At_Drought_Soil_Dry_P Parameter: Timepoint (day) Value: 13
  misc_feature: MA Experiment 20001557 PARAMETER Experiment Name: At_Drought_Soil_Dry_P Parameter: Treatment Value: Drought vs. No Drought

SEQ ID NO: 95656 - protein, 210 aa, Arabidopsis thaliana; identical to SEQ ID NO: 91900
  peptide (1)..(210): Ceres Seq. ID no. 12729961
  misc_feature (26)..(163): Pfam Name: Cyclin, N-terminal domain Pfam Description: Cyclin, N-terminal domain
  misc_feature (1)..(210): Homolog of NCBI NO: 15233185 NR Description: PREG-like protein, putative; protein id:
  misc_feature (15)..(180): Homolog of NCBI NO: 25493992 NR Description: PREG-like protein [imported] - Picea mariana
  misc_feature (17)..(179): Homolog of NCBI NO: 39546240 NR Description: OSJNBa0089N06.10 [Oryza sativa (japonica
  misc_feature (26)..(199): Homolog of NCBI NO: 15224950 NR Description: putative PREG1-like negative regulator; protein
  misc_feature (25)..(197): Homolog of NCBI NO: 15225402 NR Description: putative PREG1-like negative regulator; protein At2g45080.1, supported by cDNA: gi_18491282 [Arabidopsis
  misc_feature (24)..(197): Homolog of NCBI NO: 15232360 NR Description: regulatory protein - like; protein id: At3g60550.1
  misc_feature (25)..(205): Homolog of NCBI NO: 15240306 NR Description: PREG-like - like protein; protein id: At5g61650.1
  misc_feature (25)..(209): Homolog of NCBI NO: 15240794 NR Description: putative protein; protein id: At5g07450.1
  misc_feature (25)..(179): Homolog of NCBI NO: 15229382 NR Description: putative protein; protein id: At3g63120.1, by cDNA: 35075. [Arabidopsis thaliana] >gi|11358166|pir||T48101
  misc_feature (25)..(179): Homolog of NCBI NO: 21593009 NR Description: unknown [Arabidopsis thaliana]

SEQ ID NO: 95657 - protein, 176 aa, Arabidopsis thaliana; identical to SEQ ID NO: 91901
  peptide (1)..(176): Ceres Seq. ID no. 12729962
  misc_feature (1)..(129): Pfam Name: Cyclin, N-terminal domain Pfam Description: Cyclin, N-terminal domain
  misc_feature (1)..(176): Homolog of NCBI NO: 15233185 NR Description: PREG-like protein, putative; protein id:
  misc_feature (1)..(146): Homolog of NCBI NO: 25493992 NR Description: PREG-like protein [imported] - Picea mariana
  misc_feature (1)..(145): Homolog of NCBI NO: 39546240 NR Description: OSJNBa0089N06.10 [Oryza sativa (japonica
  misc_feature (1)..(165): Homolog of NCBI NO: 15224950 NR Description: putative PREG1-like negative regulator; protein
  misc_feature (1)..(163): Homolog of NCBI NO: 15225402 NR Description: putative PREG1-like negative regulator; protein At2g45080.1, supported by cDNA: gi_18491282 [Arabidopsis
  misc_feature (1)..(163): Homolog of NCBI NO: 15232360 NR Description: regulatory protein - like; protein id: At3g60550.1
  misc_feature (1)..(171): Homolog of NCBI NO: 15240306 NR Description: PREG-like - like protein; protein id: At5g61650.1
  misc_feature (1)..(175): Homolog of NCBI NO: 15240794 NR Description: putative protein; protein id: At5g07450.1
  misc_feature (1)..(145): Homolog of NCBI NO: 15229382 NR Description: putative protein; protein id: At3g63120.1, by cDNA: 35075. [Arabidopsis thaliana] >gi|11358166|pir||T48101
  misc_feature (1)..(145): Homolog of NCBI NO: 21593009 NR Description: unknown [Arabidopsis thaliana]

SEQ ID NO: 95658 - DNA, 837 bp, Arabidopsis thaliana; identical to SEQ ID NO: 91902
  misc_feature (1)..(837): Ceres Seq. ID no. 12729971
  misc_feature: MA Experiment ID: 20000440 Result: Up-regulated in Transcription
  misc_feature: MA Experiment 20000440 PARAMETER Experiment Name: At_Closed-Flower__Sub_P Parameter: Tissue Value: Closed Flower vs. Whole Plant

SEQ ID NO: 95659 - protein, 278 aa, Arabidopsis thaliana; identical to SEQ ID NO: 91903
  peptide (1)..(278): Ceres Seq. ID no. 12729972
  misc_feature (212)..(267): Pfam Name: Domain of unknown function DUF26 Pfam Description: Domain of unknown function DUF26
  misc_feature (1)..(278): Homolog of NCBI NO: 15233201 NR Description: hypothetical protein; protein id: At3g21910.1 thaliana] >gi|9279742|dbj|BAB01368.1| contains similarity to
  misc_feature (1)..(272): Homolog of NCBI NO: 15233204 NR Description: pollen coat receptor kinase, putative; protein At3g21920.1 [Arabidopsis thaliana] >gi|9279743|dbj|BAB01369.1| similarity to receptor protein kinase~gene_id:MZN24.4
  misc_feature (1)..(276): Homolog of NCBI NO: 9279744 NR Description: contains similarity to receptor protein
  misc_feature (1)..(276): Homolog of NCBI NO: 15233207 NR Description: receptor kinase, putative; protein id:
  misc_feature (87)..(277): Homolog of NCBI NO: 11994709 NR Description: contains similarity to receptor protein
  misc_feature (7)..(85): Homolog of NCBI NO: 11994709 NR Description: contains similarity to receptor protein
  misc_feature (1)..(266): Homolog of NCBI NO: 15233368 NR Description: putative protein; protein id: At4g20680.1
  misc_feature (1)..(266): Homolog of NCBI NO: 15233236 NR Description: hypothetical protein; protein id: At3g22000.1 thaliana] >gi|9279757|dbj|BAB01383.1| contains similarity to
  misc_feature (14)..(266): Homolog of NCBI NO: 15233235 NR Description: receptor kinase common family, putative; protein At3g21990.1 [Arabidopsis thaliana] >gi|9279756|dbj|BAB01382.1| similarity to receptor kinase~gene_id:MZN24.17 [Arabidopsis
  misc_feature (14)..(266): Homolog of NCBI NO: 15233366 NR Description: pollen coat receptor kinase, putative; protein At4g20670.1 [Arabidopsis thaliana] >gi|7485931|pir||T10609

SEQ ID NO: 95660 - protein, 244 aa, Arabidopsis thaliana; identical to SEQ ID NO: 91904
  peptide (1)..(244): Ceres Seq. ID no. 12729973
  misc_feature (178)..(233): Pfam Name: Domain of unknown function DUF26 Pfam Description: Domain of unknown function DUF26
  misc_feature (1)..(244): Homolog of NCBI NO: 15233201 NR Description: hypothetical protein; protein id: At3g21910.1 thaliana] >gi|9279742|dbj|BAB01368.1| contains similarity to
  misc_feature (1)..(238): Homolog of NCBI NO: 15233204 NR Description: pollen coat receptor kinase, putative; protein At3g21920.1 [Arabidopsis thaliana] >gi|9279743|dbj|BAB01369.1| similarity to receptor protein kinase~gene_id:MZN24.4
  misc_feature (1)..(242): Homolog of NCBI NO: 9279744 NR Description: contains similarity to receptor protein
  misc_feature (1)..(242): Homolog of NCBI NO: 15233207 NR Description: receptor kinase, putative; protein id:
  misc_feature (53)..(243): Homolog of NCBI NO: 11994709 NR Description: contains similarity to receptor protein
  misc_feature (1)..(51): Homolog of NCBI NO: 11994709 NR Description: contains similarity to receptor protein
  misc_feature (1)..(232): Homolog of NCBI NO: 15233368 NR Description: putative protein; protein id: At4g20680.1
  misc_feature (1)..(232): Homolog of NCBI NO: 15233236 NR Description: hypothetical protein; protein id: At3g22000.1 thaliana] >gi|9279757|dbj|BAB01383.1| contains similarity to
  misc_feature (1)..(232): Homolog of NCBI NO: 15233235 NR Description: receptor kinase common family, putative; protein At3g21990.1 [Arabidopsis thaliana] >gi|9279756|dbj|BAB01382.1| similarity to receptor kinase~gene_id:MZN24.17 [Arabidopsis
  misc_feature (1)..(232): Homolog of NCBI NO: 15233366 NR Description: pollen coat receptor kinase, putative; protein At4g20670.1 [Arabidopsis thaliana] >gi|7485931|pir||T10609

SEQ ID NO: 95661 - protein, 199 aa, Arabidopsis thaliana; identical to SEQ ID NO: 91905
  peptide (1)..(199): Ceres Seq. ID no. 12729974
  misc_feature (133)..(188): Pfam Name: Domain of unknown function DUF26 Pfam Description: Domain of unknown function DUF26
  misc_feature (1)..(199): Homolog of NCBI NO: 15233201 NR Description: hypothetical protein; protein id: At3g21910.1 thaliana] >gi|9279742|dbj|BAB01368.1| contains similarity to
  misc_feature (1)..(193): Homolog of NCBI NO: 15233204 NR Description: pollen coat receptor kinase, putative; protein At3g21920.1 [Arabidopsis thaliana] >gi|9279743|dbj|BAB01369.1| similarity to receptor protein kinase~gene_id:MZN24.4
  misc_feature (1)..(197): Homolog of NCBI NO: 9279744 NR Description: contains similarity to receptor protein
  misc_feature (1)..(197): Homolog of NCBI NO: 15233207 NR Description: receptor kinase, putative; protein id:
  misc_feature (8)..(198): Homolog of NCBI NO: 11994709 NR Description: contains similarity to receptor protein
  misc_feature (1)..(187): Homolog of NCBI NO: 15233368 NR Description: putative protein; protein id: At4g20680.1
  misc_feature (1)..(187): Homolog of NCBI NO: 15233236 NR Description: hypothetical protein; protein id: At3g22000.1 thaliana] >gi|9279757|dbj|BAB01383.1| contains similarity to
  misc_feature (1)..(187): Homolog of NCBI NO: 15233235 NR Description: receptor kinase common family, putative; protein At3g21990.1 [Arabidopsis thaliana] >gi|9279756|dbj|BAB01382.1| similarity to receptor kinase~gene_id:MZN24.17 [Arabidopsis
  misc_feature (1)..(187): Homolog of NCBI NO: 15233366 NR Description: pollen coat receptor kinase, putative; protein At4g20670.1 [Arabidopsis thaliana] >gi|7485931|pir||T10609
  misc_feature (1)..(187): Homolog of NCBI NO: 15233238 NR Description: hypothetical protein; protein id: At3g22010.1 thaliana] >gi|9279758|dbj|BAB01384.1| contains similarity to

SEQ ID NO: 95662 - DNA, 789 bp, Arabidopsis thaliana; identical to SEQ ID NO: 91906
  misc_feature (1)..(789): Ceres Seq. ID no. 12729983
  misc_feature: MA Experiment ID: 20000327 Result: Up-regulated in Transcription
  misc_feature: MA Experiment 20000327 PARAMETER Experiment Name: At_42deg_Heat_Sub_P Parameter: Age (day) Value: 14
  misc_feature: MA Experiment 20000327 PARAMETER Experiment Name: At_42deg_Heat_Sub_P Parameter: Organism Value: A. thaliana
  misc_feature: MA Experiment 20000327 PARAMETER Experiment Name: At_42deg_Heat_Sub_P Parameter: Plant Line Value: WS
  misc_feature: MA Experiment 20000327 PARAMETER Experiment Name: At_42deg_Heat_Sub_P Parameter: Temperature (deg C) Value: 42 vs. 22
  misc_feature: MA Experiment 20000327 PARAMETER Experiment Name: At_42deg_Heat_Sub_P Parameter: Timepoint (hr) Value: 1
  misc_feature: MA Experiment 20000327 PARAMETER Experiment Name: At_42deg_Heat_Sub_P Parameter: Tissue Value: Aerial

SEQ ID NO: 95663 - protein, 262 aa, Arabidopsis thaliana; identical to SEQ ID NO: 91907
  peptide (1)..(262): Ceres Seq. ID no. 12729984
  misc_feature (207)..(261): Pfam Name: Domain of unknown function DUF26 Pfam Description: Domain of unknown function DUF26
  misc_feature (1)..(262): Homolog of NCBI NO: 15233214 NR Description: hypothetical protein; protein id: At3g21960.1 thaliana] >gi|9279750|dbj|BAB01376.1| contains similarity to
  misc_feature (12)..(261): Homolog of NCBI NO: 15225108 NR Description: receptor kinase, putative; protein id: [Arabidopsis thaliana] >gi|25408171|pir||A84723 hypothetical
  misc_feature (29)..(260): Homolog of NCBI NO: 9279746 NR Description: contains similarity to receptor protein
  misc_feature (4)..(261): Homolog of NCBI NO: 15233211 NR Description: hypothetical protein; protein id: At3g21940.1 thaliana] >gi|9279747|dbj|BAB01373.1| contains similarity to
  misc_feature (151)..(261): Homolog of NCBI NO: 9279752 NR Description: gb|AAD24839.1~gene_id:MZN24.13~similar to unknown
  misc_feature (4)..(114): Homolog of NCBI NO: 9279752 NR Description: gb|AAD24839.1~gene_id:MZN24.13~similar to unknown
  misc_feature (4)..(261): Homolog of NCBI NO: 9279748 NR Description: gb|AAD24839.1~gene_id:MZN24.9~similar to unknown
  misc_feature (13)..(262): Homolog of NCBI NO: 15233235 NR Description: receptor kinase common family, putative; protein At3g21990.1 [Arabidopsis thaliana] >gi|9279756|dbj|BAB01382.1| similarity to receptor kinase~gene_id:MZN24.17 [Arabidopsis
  misc_feature (13)..(262): Homolog of NCBI NO: 15233366 NR Description: pollen coat receptor kinase, putative; protein At4g20670.1 [Arabidopsis thaliana] >gi|7485931|pir||T10609
  misc_feature (1)..(260): Homolog of NCBI NO: 15233238 NR Description: hypothetical protein; protein id: At3g22010.1 thaliana] >gi|9279758|dbj|BAB01384.1| contains similarity to

SEQ ID NO: 95664 - protein, 241 aa, Arabidopsis thaliana; identical to SEQ ID NO: 91908
  peptide (1)..(241): Ceres Seq. ID no. 12729985
  misc_feature (186)..(240): Pfam Name: Domain of unknown function DUF26 Pfam Description: Domain of unknown function DUF26
  misc_feature (1)..(241): Homolog of NCBI NO: 15233214 NR Description: hypothetical protein; protein id: At3g21960.1 thaliana] >gi|9279750|dbj|BAB01376.1| contains similarity to
  misc_feature (1)..(240): Homolog of NCBI NO: 15225108 NR Description: receptor kinase, putative; protein id: [Arabidopsis thaliana] >gi|25408171|pir||A84723 hypothetical
  misc_feature (8)..(239): Homolog of NCBI NO: 9279746 NR Description: contains similarity to receptor protein
  misc_feature (1)..(240): Homolog of NCBI NO: 15233211 NR Description: hypothetical protein; protein id: At3g21940.1 thaliana] >gi|9279747|dbj|BAB01373.1| contains similarity to
  misc_feature (130)..(240): Homolog of NCBI NO: 9279752 NR Description: gb|AAD24839.1~gene_id:MZN24.13~similar to unknown
  misc_feature (1)..(93): Homolog of NCBI NO: 9279752 NR Description: gb|AAD24839.1~gene_id:MZN24.13~similar to unknown
  misc_feature (1)..(240): Homolog of NCBI NO: 9279748 NR Description: gb|AAD24839.1~gene_id:MZN24.9~similar to unknown
  misc_feature (1)..(241): Homolog of NCBI NO: 15233235 NR Description: receptor kinase common family, putative; protein At3g21990.1 [Arabidopsis thaliana] >gi|9279756|dbj|BAB01382.1| similarity to receptor kinase~gene_id:MZN24.17 [Arabidopsis
  misc_feature (1)..(241): Homolog of NCBI NO: 15233366 NR Description: pollen coat receptor kinase, putative; protein At4g20670.1 [Arabidopsis thaliana] >gi|7485931|pir||T10609
  misc_feature (1)..(239): Homolog of NCBI NO: 15233238 NR Description: hypothetical protein; protein id: At3g22010.1 thaliana] >gi|9279758|dbj|BAB01384.1| contains similarity to

SEQ ID NO: 95665 - DNA, 795 bp, Arabidopsis thaliana; identical to SEQ ID NO: 91909
  misc_feature (1)..(795): Ceres Seq. ID no. 12729986
  misc_feature: MA Experiment ID: 20000440 Result: Up-regulated in Transcription
  misc_feature: MA Experiment 20000440 PARAMETER Experiment Name: At_Closed-Flower__Sub_P Parameter: Tissue Value: Closed Flower vs. Whole Plant

SEQ ID NO: 95666 - protein, 264 aa, Arabidopsis thaliana; identical to SEQ ID NO: 91910
  peptide (1)..(264): Ceres Seq. ID no. 12729987
  misc_feature (90)..(144): Pfam Name: Domain of unknown function DUF26 Pfam Description: Domain of unknown function DUF26
  misc_feature (1)..(264): Homolog of NCBI NO: 15233228 NR Description: hypothetical protein; protein id: At3g21970.1
  misc_feature (1)..(248): Homolog of NCBI NO: 9279753 NR Description: emb|CAB45833.1~gene_id:MZN24.14~similar to
  misc_feature (11)..(264): Homolog of NCBI NO: 11994708 NR Description: contains similarity to serine/threonine
  misc_feature (14)..(264): Homolog of NCBI NO: 15228583 NR Description: receptor kinase, putative; protein id:
  misc_feature (3)..(263): Homolog of NCBI NO: 15233366 NR Description: pollen coat receptor kinase, putative; protein At4g20670.1 [Arabidopsis thaliana] >gi|7485931|pir||T10609
  misc_feature (3)..(263): Homolog of NCBI NO: 15233235 NR Description: receptor kinase common family, putative; protein At3g21990.1 [Arabidopsis thaliana] >gi|9279756|dbj|BAB01382.1| similarity to receptor kinase~gene_id:MZN24.17 [Arabidopsis
  misc_feature (21)..(262): Homolog of NCBI NO: 9279746 NR Description: contains similarity to receptor protein
  misc_feature (9)..(264): Homolog of NCBI NO: 9279762 NR Description: emb|CAB45834.1~gene_id:MZN24.23~similar to
  misc_feature (146)..(263): Homolog of NCBI NO: 15233231 NR Description: hypothetical protein; protein id: At3g21980.1
  misc_feature (6)..(116): Homolog of NCBI NO: 15233231 NR Description: hypothetical protein; protein id: At3g21980.1

SEQ ID NO: 95667 - DNA, 771 bp, Arabidopsis thaliana; identical to SEQ ID NO: 91911
  misc_feature (1)..(771): Ceres Seq. ID no. 12729988
  misc_feature: MA Experiment ID: 20000306 Result: Down-regulated in Transcription
  misc_feature: MA Experiment 20000306 PARAMETER Experiment Name: At_Germinating_Seeds_Sub_P Parameter: Age (hr) Value: 6 vs. 0
  misc_feature: MA Experiment 20000306 PARAMETER Experiment Name: At_Germinating_Seeds_Sub_P Parameter: Organism Value: A. thaliana
  misc_feature: MA Experiment 20000306 PARAMETER Experiment Name: At_Germinating_Seeds_Sub_P Parameter: Plant Line Value: WS
  misc_feature: MA Experiment 20000306 PARAMETER Experiment Name: At_Germinating_Seeds_Sub_P Parameter: Tissue Value: Germinating Seeds
  misc_feature: MA Experiment ID: 20000307 Result: Down-regulated in Transcription
  misc_feature: MA Experiment 20000307 PARAMETER Experiment Name: At_Germinating_Seeds_Sub_P Parameter: Age (hr) Value: 24 vs. 0
  misc_feature: MA Experiment 20000307 PARAMETER Experiment Name: At_Germinating_Seeds_Sub_P Parameter: Organism Value: A. thaliana
  misc_feature: MA Experiment 20000307 PARAMETER Experiment Name: At_Germinating_Seeds_Sub_P Parameter: Plant Line Value: WS
  misc_feature: MA Experiment 20000307 PARAMETER Experiment Name: At_Germinating_Seeds_Sub_P Parameter: Tissue Value: Germinating Seeds
  misc_feature: MA Experiment ID: 20000314 Result: Down-regulated in Transcription
  misc_feature: MA Experiment 20000314 PARAMETER Experiment Name: At_14day_Shoots-Roots_Sub_P Parameter: Age (day) Value: 14
  misc_feature: MA Experiment 20000314 PARAMETER Experiment Name: At_14day_Shoots-Roots_Sub_P Parameter: Organism Value: A. thaliana
  misc_feature: MA Experiment 20000314 PARAMETER Experiment Name: At_14day_Shoots-Roots_Sub_P Parameter: Plant Line Value: WS
  misc_feature: MA Experiment 20000314 PARAMETER Experiment Name: At_14day_Shoots-Roots_Sub_P Parameter: Tissue Value: Roots vs. Whole Plant
  misc_feature: MA Experiment ID: 20000355 Result: Down-regulated in Transcription
  misc_feature: MA Experiment 20000355 PARAMETER Experiment Name: At_Siliques_Sub_P Parameter: Age (day) Value: 21
  misc_feature: MA Experiment 20000355 PARAMETER Experiment Name: At_Siliques_Sub_P Parameter: Organism Value: A. thaliana
  misc_feature: MA Experiment 20000355 PARAMETER Experiment Name: At_Siliques_Sub_P Parameter: Plant Line Value: WS
  misc_feature: MA Experiment 20000355 PARAMETER Experiment Name: At_Siliques_Sub_P Parameter: Tissue Value: Less Than 5mm Siliques vs. Whole Plant
  misc_feature: MA Experiment ID: 20000440 Result: Up-regulated in Transcription
  misc_feature: MA Experiment 20000440 PARAMETER Experiment Name: At_Closed-Flower__Sub_P Parameter: Tissue Value: Closed Flower vs. Whole Plant

SEQ ID NO: 95668 - protein, 256 aa, Arabidopsis thaliana; identical to SEQ ID NO: 72354
  peptide (1)..(256): Ceres Seq. ID no. 12729989
  misc_feature (84)..(138): Pfam Name: Domain of unknown function DUF26 Pfam Description: Domain of unknown function DUF26
  misc_feature (1)..(256): Homolog of NCBI NO: 15233235 NR Description: receptor kinase common family, putative; protein At3g21990.1 [Arabidopsis thaliana] >gi|9279756|dbj|BAB01382.1| similarity to receptor kinase~gene_id:MZN24.17 [Arabidopsis
  misc_feature (1)..(256): Homolog of NCBI NO: 15233366 NR Description: pollen coat receptor kinase, putative; protein At4g20670.1 [Arabidopsis thaliana] >gi|7485931|pir||T10609
  misc_feature (1)..(247): Homolog of NCBI NO: 15233364 NR Description: receptor kinase common family, 3' partial, protein id: At4g20650.1 [Arabidopsis thaliana]
  misc_feature (1)..(247): Homolog of NCBI NO: 18415518 NR Description: putative protein; protein id: At4g20530.1 thaliana] >gi|18415520|ref|NP_567604.1| putative protein; protein At4g20540.1 [Arabidopsis thaliana] >gi|18415522|ref|NP_567605.1|
  misc_feature (135)..(256): Homolog of NCBI NO: 15233231 NR Description: hypothetical protein; protein id: At3g21980.1
  misc_feature (1)..(110): Homolog of NCBI NO: 15233231 NR Description: hypothetical protein; protein id: At3g21980.1
  misc_feature (1)..(240): Homolog of NCBI NO: 9279755 NR Description: emb|CAB45833.1~gene_id:MZN24.16~similar to
  misc_feature (11)..(255): Homolog of NCBI NO: 15233368 NR Description: putative protein; protein id: At4g20680.1
  misc_feature (11)..(255): Homolog of NCBI NO: 15233236 NR Description: hypothetical protein; protein id: At3g22000.1 thaliana] >gi|9279757|dbj|BAB01383.1| contains similarity to
  misc_feature (145)..(256): Homolog of NCBI NO: 9279754 NR Description: emb|CAB45833.1~gene_id:MZN24.15~similar to

SEQ ID NO: 95669 - protein, 244 aa, Arabidopsis thaliana; identical to SEQ ID NO: 72355
  peptide (1)..(244): Ceres Seq. ID no. 12729990
  misc_feature (72)..(126): Pfam Name: Domain of unknown function DUF26 Pfam Description: Domain of unknown function DUF26
  misc_feature (1)..(244): Homolog of NCBI NO: 15233235 NR Description: receptor kinase common family, putative; protein At3g21990.1 [Arabidopsis thaliana] >gi|9279756|dbj|BAB01382.1| similarity to receptor kinase~gene_id:MZN24.17 [Arabidopsis
  misc_feature (1)..(244): Homolog of NCBI NO: 15233366 NR Description: pollen coat receptor kinase, putative; protein At4g20670.1 [Arabidopsis thaliana] >gi|7485931|pir||T10609
  misc_feature (1)..(235): Homolog of NCBI NO: 15233364 NR Description: receptor kinase common family, 3' partial, protein id: At4g20650.1 [Arabidopsis thaliana]
  misc_feature (1)..(235): Homolog of NCBI NO: 18415518 NR Description: putative protein; protein id: At4g20530.1 thaliana] >gi|18415520|ref|NP_567604.1| putative protein; protein At4g20540.1 [Arabidopsis thaliana] >gi|18415522|ref|NP_567605.1|
  misc_feature (123)..(244): Homolog of NCBI NO: 15233231 NR Description: hypothetical protein; protein id: At3g21980.1
  misc_feature (1)..(98): Homolog of NCBI NO: 15233231 NR Description: hypothetical protein; protein id: At3g21980.1
  misc_feature (1)..(228): Homolog of NCBI NO: 9279755 NR Description: emb|CAB45833.1~gene_id:MZN24.16~similar to
  misc_feature (1)..(243): Homolog of NCBI NO: 15233368 NR Description: putative protein; protein id: At4g20680.1
  misc_feature (1)..(243): Homolog of NCBI NO: 15233236 NR Description: hypothetical protein; protein id: At3g22000.1 thaliana] >gi|9279757|dbj|BAB01383.1| contains similarity to
  misc_feature (133)..(244): Homolog of NCBI NO: 9279754 NR Description: emb|CAB45833.1~gene_id:MZN24.15~similar to

SEQ ID NO: 95670 - protein, 170 aa, Arabidopsis thaliana; identical to SEQ ID NO: 72356
  peptide (1)..(170): Ceres Seq. ID no. 12729991
  misc_feature (1)..(52): Pfam Name: Domain of unknown function DUF26 Pfam Description: Domain of unknown function DUF26
  misc_feature (1)..(170): Homolog of NCBI NO: 15233235 NR Description: receptor kinase common family, putative; protein At3g21990.1 [Arabidopsis thaliana] >gi|9279756|dbj|BAB01382.1| similarity to receptor kinase~gene_id:MZN24.17 [Arabidopsis
  misc_feature (1)..(170): Homolog of NCBI NO: 15233366 NR Description: pollen coat receptor kinase, putative; protein At4g20670.1 [Arabidopsis thaliana] >gi|7485931|pir||T10609
  misc_feature (1)..(161): Homolog of NCBI NO: 15233364 NR Description: receptor kinase common family, 3' partial, protein id: At4g20650.1 [Arabidopsis thaliana]
  misc_feature (1)..(161): Homolog of NCBI NO: 18415518 NR Description: putative protein; protein id: At4g20530.1 thaliana] >gi|18415520|ref|NP_567604.1| putative protein; protein At4g20540.1 [Arabidopsis thaliana] >gi|18415522|ref|NP_567605.1|
  misc_feature (49)..(170): Homolog of NCBI NO: 15233231 NR Description: hypothetical protein; protein id: At3g21980.1
  misc_feature (1)..(24): Homolog of NCBI NO: 15233231 NR Description: hypothetical protein; protein id: At3g21980.1
  misc_feature (1)..(154): Homolog of NCBI NO: 9279755 NR Description: emb|CAB45833.1~gene_id:MZN24.16~similar to
  misc_feature (1)..(169): Homolog of NCBI NO: 15233368 NR Description: putative protein; protein id: At4g20680.1
  misc_feature (1)..(169): Homolog of NCBI NO: 15233236 NR Description: hypothetical protein; protein id: At3g22000.1 thaliana] >gi|9279757|dbj|BAB01383.1| contains similarity to
  misc_feature (59)..(170): Homolog of NCBI NO: 9279754 NR Description: emb|CAB45833.1~gene_id:MZN24.15~similar to

SEQ ID NO: 95671 - DNA, 822 bp, Arabidopsis thaliana; identical to SEQ ID NO: 91915
  misc_feature (1)..(822): Ceres Seq. ID no. 12729992
  misc_feature: MA Experiment ID: 20000327 Result: Up-regulated in Transcription
  misc_feature: MA Experiment 20000327 PARAMETER Experiment Name: At_42deg_Heat_Sub_P Parameter: Age (day) Value: 14
  misc_feature: MA Experiment 20000327 PARAMETER Experiment Name: At_42deg_Heat_Sub_P Parameter: Organism Value: A. thaliana
  misc_feature: MA Experiment 20000327 PARAMETER Experiment Name: At_42deg_Heat_Sub_P Parameter: Plant Line Value: WS
  misc_feature: MA Experiment 20000327 PARAMETER Experiment Name: At_42deg_Heat_Sub_P Parameter: Temperature (deg C) Value: 42 vs. 22
  misc_feature: MA Experiment 20000327 PARAMETER Experiment Name: At_42deg_Heat_Sub_P Parameter: Timepoint (hr) Value: 1
  misc_feature: MA Experiment 20000327 PARAMETER Experiment Name: At_42deg_Heat_Sub_P Parameter: Tissue Value: Aerial
  misc_feature: MA Experiment ID: 20000328 Result: Up-regulated in Transcription
  misc_feature: MA Experiment 20000328 PARAMETER Experiment Name: At_42deg_Heat_Sub_P Parameter: Age (day) Value: 14
  misc_feature: MA Experiment 20000328 PARAMETER Experiment Name: At_42deg_Heat_Sub_P Parameter: Organism Value: A. thaliana
  misc_feature: MA Experiment 20000328 PARAMETER Experiment Name: At_42deg_Heat_Sub_P Parameter: Plant Line Value: WS
  misc_feature: MA Experiment 20000328 PARAMETER Experiment Name: At_42deg_Heat_Sub_P Parameter: Temperature (deg C) Value: 42 vs. 22
  misc_feature: MA Experiment 20000328 PARAMETER Experiment Name: At_42deg_Heat_Sub_P Parameter: Timepoint (hr) Value: 6
  misc_feature: MA Experiment 20000328 PARAMETER Experiment Name: At_42deg_Heat_Sub_P Parameter: Tissue Value: Aerial

SEQ ID NO: 95672 - protein, 273 aa, Arabidopsis thaliana; identical to SEQ ID NO: 91916
  peptide (1)..(273): Ceres Seq. ID no. 12729993
  misc_feature (211)..(266): Pfam Name: Domain of unknown function DUF26 Pfam Description: Domain of unknown function DUF26
  misc_feature (1)..(273): Homolog of NCBI NO: 15233236 NR Description: hypothetical protein; protein id: At3g22000.1 thaliana] >gi|9279757|dbj|BAB01383.1| contains similarity to
  misc_feature (1)..(273): Homolog of NCBI NO: 15233368 NR Description: putative protein; protein id: At4g20680.1
  misc_feature (1)..(267): Homolog of NCBI NO: 15233238 NR Description: hypothetical protein; protein id: At3g22010.1 thaliana] >gi|9279758|dbj|BAB01384.1| contains similarity to
  misc_feature (17)..(273): Homolog of NCBI NO: 15233366 NR Description: pollen coat receptor kinase, putative; protein At4g20670.1 [Arabidopsis thaliana] >gi|7485931|pir||T10609
  misc_feature (17)..(266): Homolog of NCBI NO: 15233235 NR Description: receptor kinase common family, putative; protein At3g21990.1 [Arabidopsis thaliana] >gi|9279756|dbj|BAB01382.1| similarity to receptor kinase~gene_id:MZN24.17 [Arabidopsis
  misc_feature (1)..(267): Homolog of NCBI NO: 15233241 NR Description: hypothetical protein; protein id: At3g22040.1 thaliana] >gi|9279761|dbj|BAB01387.1|
  misc_feature (1)..(266): Homolog of NCBI NO: 9279762 NR Description: emb|CAB45834.1~gene_id:MZN24.23~similar to
  misc_feature (1)..(265): Homolog of NCBI NO: 15233201 NR Description: hypothetical protein; protein id: At3g21910.1 thaliana] >gi|9279742|dbj|BAB01368.1| contains similarity to
  misc_feature (15)..(265): Homolog of NCBI NO: 9279746 NR Description: contains similarity to receptor protein
  misc_feature (140)..(266): Homolog of NCBI NO: 15233231 NR Description: hypothetical protein; protein id: At3g21980.1

SEQ ID NO: 95673 - protein, 196 aa, Arabidopsis thaliana; identical to SEQ ID NO: 91917
  peptide (1)..(196): Ceres Seq. ID no. 12729994
  misc_feature (134)..(189): Pfam Name: Domain of unknown function DUF26 Pfam Description: Domain of unknown function DUF26
  misc_feature (1)..(196): Homolog of NCBI NO: 15233236 NR Description: hypothetical protein; protein id: At3g22000.1 thaliana] >gi|9279757|dbj|BAB01383.1| contains similarity to
  misc_feature (1)..(196): Homolog of NCBI NO: 15233368 NR Description: putative protein; protein id: At4g20680.1
  misc_feature (1)..(190): Homolog of NCBI NO: 15233238 NR Description: hypothetical protein; protein id: At3g22010.1 thaliana] >gi|9279758|dbj|BAB01384.1| contains similarity to
  misc_feature (1)..(196): Homolog of NCBI NO: 15233366 NR Description: pollen coat receptor kinase, putative; protein At4g20670.1 [Arabidopsis thaliana] >gi|7485931|pir||T10609
  misc_feature (1)..(189): Homolog of NCBI NO: 15233235 NR Description: receptor kinase common family, putative; protein At3g21990.1 [Arabidopsis thaliana] >gi|9279756|dbj|BAB01382.1| similarity to receptor kinase~gene_id:MZN24.17 [Arabidopsis
  misc_feature (1)..(190): Homolog of NCBI NO: 15233241 NR Description: hypothetical protein; protein id: At3g22040.1 thaliana] >gi|9279761|dbj|BAB01387.1|
  misc_feature (1)..(189): Homolog of NCBI NO: 9279762 NR Description: emb|CAB45834.1~gene_id:MZN24.23~similar to
  misc_feature (1)..(188): Homolog of NCBI NO: 15233201 NR Description: hypothetical protein; protein id: At3g21910.1 thaliana] >gi|9279742|dbj|BAB01368.1| contains similarity to
  misc_feature (1)..(188): Homolog of NCBI NO: 9279746 NR Description: contains similarity to receptor protein
  misc_feature (63)..(189): Homolog of NCBI NO: 15233231 NR Description: hypothetical protein; protein id: At3g21980.1

SEQ ID NO: 95674 - protein, 194 aa, Arabidopsis thaliana; identical to SEQ ID NO: 91918
  peptide (1)..(194): Ceres Seq. ID no. 12729995
  misc_feature (132)..(187): Pfam Name: Domain of unknown function DUF26 Pfam Description: Domain of unknown function DUF26
  misc_feature (1)..(194): Homolog of NCBI NO: 15233236 NR Description: hypothetical protein; protein id: At3g22000.1 thaliana] >gi|9279757|dbj|BAB01383.1| contains similarity to
  misc_feature (1)..(194): Homolog of NCBI NO: 15233368 NR Description: putative protein; protein id: At4g20680.1
  misc_feature (1)..(188): Homolog of NCBI NO: 15233238 NR Description: hypothetical protein; protein id: At3g22010.1 thaliana] >gi|9279758|dbj|BAB01384.1| contains similarity to
  misc_feature (1)..(194): Homolog of NCBI NO: 15233366 NR Description: pollen coat receptor kinase, putative; protein At4g20670.1 [Arabidopsis thaliana] >gi|7485931|pir||T10609
  misc_feature (1)..(187): Homolog of NCBI NO: 15233235 NR Description: receptor kinase common family, putative; protein At3g21990.1 [Arabidopsis thaliana] >gi|9279756|dbj|BAB01382.1| similarity to receptor kinase~gene_id:MZN24.17 [Arabidopsis
  misc_feature (1)..(188): Homolog of NCBI NO: 15233241 NR Description: hypothetical protein; protein id: At3g22040.1 thaliana] >gi|9279761|dbj|BAB01387.1|
  misc_feature (1)..(187): Homolog of NCBI NO: 9279762 NR Description: emb|CAB45834.1~gene_id:MZN24.23~similar to
  misc_feature (1)..(186): Homolog of NCBI NO: 15233201 NR Description: hypothetical protein; protein id: At3g21910.1 thaliana] >gi|9279742|dbj|BAB01368.1| contains similarity to
  misc_feature (1)..(186): Homolog of NCBI NO: 9279746 NR Description: contains similarity to receptor protein
  misc_feature (61)..(187): Homolog of NCBI NO: 15233231 NR Description: hypothetical protein; protein id: At3g21980.1

SEQ ID NO: 95675 - DNA, 1007 bp, Arabidopsis thaliana; identical to SEQ ID NO: 91919
  misc_feature (1)..(1007): Ceres Seq. ID no. 12729998
  misc_feature: MA Experiment ID: 20000179 Result: Down-regulated in Transcription
  misc_feature: MA Experiment 20000179 PARAMETER Experiment Name: At_Germinating_Seeds_P Parameter: Age (hr) Value: 6 vs. 0
  misc_feature: MA Experiment 20000179 PARAMETER Experiment Name: At_Germinating_Seeds_P Parameter: Tissue Value: Germinating Seeds
  misc_feature: MA Experiment ID: 20000180 Result: Down-regulated in Transcription
  misc_feature: MA Experiment 20000180 PARAMETER Experiment Name: At_Germinating_Seeds_P Parameter: Age (hr) Value: 24 vs. 0
  misc_feature: MA Experiment 20000180 PARAMETER Experiment Name: At_Germinating_Seeds_P Parameter: Tissue Value: Germinating Seeds
  misc_feature: MA Experiment ID: 20000185 Result: Down-regulated in Transcription
  misc_feature: MA Experiment 20000185 PARAMETER Experiment Name: At_Roots__P Parameter: Age (day) Value: 7 vs. 21
  misc_feature: MA Experiment 20000185 PARAMETER Experiment Name: At_Roots__P Parameter: Organism Value: A. thaliana
  misc_feature: MA Experiment 20000185 PARAMETER Experiment Name: At_Roots__P Parameter: Tissue Value: Roots vs. Whole Plant
  misc_feature: MA Experiment ID: 20000234 Result: Down-regulated in Transcription
  misc_feature: MA Experiment 20000234 PARAMETER Experiment Name: At_Siliques_P Parameter: Age (day) Value: 21
  misc_feature: MA Experiment 20000234 PARAMETER Experiment Name: At_Siliques_P Parameter: Organism Value: A. thaliana
  misc_feature: MA Experiment 20000234 PARAMETER Experiment Name: At_Siliques_P Parameter: Plant Line Value: WS
  misc_feature: MA Experiment 20000234 PARAMETER Experiment Name: At_Siliques_P Parameter: Tissue Value: Less Than 5mm Siliques vs. Whole Plant
  misc_feature: MA Experiment ID: 20000235 Result: Down-regulated in Transcription
  misc_feature: MA Experiment 20000235 PARAMETER Experiment Name: At_Siliques_P Parameter: Age (day) Value: 21
  misc_feature: MA Experiment 20000235 PARAMETER Experiment Name: At_Siliques_P Parameter: Organism Value: A. thaliana
  misc_feature: MA Experiment 20000235 PARAMETER Experiment Name: At_Siliques_P Parameter: Plant Line Value: WS
  misc_feature: MA Experiment 20000235 PARAMETER Experiment Name: At_Siliques_P Parameter: Tissue Value: 5-10mm Siliques vs. Whole Plant
  misc_feature: MA Experiment ID: 20000264 Result: Down-regulated in Transcription
  misc_feature: MA Experiment 20000264 PARAMETER Experiment Name: At_Open_Flower_P Parameter: Age (day) Value: 21
  misc_feature: MA Experiment 20000264 PARAMETER Experiment Name: At_Open_Flower_P Parameter: Plant Line Value: WS
  misc_feature: MA Experiment 20000264 PARAMETER Experiment Name: At_Open_Flower_P Parameter: Tissue Value: Open Flower vs. Whole Plant
  misc_feature: MA Experiment ID: 20000265 Result: Down-regulated in Transcription
  misc_feature: MA Experiment 20000265 PARAMETER Experiment Name: At_Open_Flower_P Parameter: Age (day) Value: 21
  misc_feature: MA Experiment 20000265 PARAMETER Experiment Name: At_Open_Flower_P Parameter: Plant Line Value: WS
  misc_feature: MA Experiment 20000265 PARAMETER Experiment Name: At_Open_Flower_P Parameter: Tissue Value: Closed Flower vs. Whole Plant
  misc_feature: MA Experiment ID: 20000286 Result: Down-regulated in Transcription
  misc_feature: MA Experiment 20000286 PARAMETER Experiment Name: At_Open_Flower_P Parameter: Age (day) Value: 21
  misc_feature: MA Experiment 20000286 PARAMETER Experiment Name: At_Open_Flower_P Parameter: Plant Line Value: WS
  misc_feature: MA Experiment 20000286 PARAMETER Experiment Name: At_Open_Flower_P Parameter: Tissue Value: Half Open vs. Whole Plant
  misc_feature: MA Experiment ID: 20000437 Result: Down-regulated in Transcription
  misc_feature: MA Experiment 20000437 PARAMETER Experiment Name: At_Drought_P Parameter: Age (day) Value: 8
  misc_feature: MA Experiment 20000437 PARAMETER Experiment Name: At_Drought_P Parameter: Organism Value: A. thaliana
  misc_feature: MA Experiment 20000437 PARAMETER Experiment Name: At_Drought_P Parameter: Plant Line Value: WS
  misc_feature: MA Experiment 20000437 PARAMETER Experiment Name: At_Drought_P Parameter: Timepoint (hr) Value: 24
  misc_feature: MA Experiment 20000437 PARAMETER Experiment Name: At_Drought_P Parameter: Tissue Value: Whole Plant
  misc_feature: MA Experiment 20000437 PARAMETER Experiment Name: At_Drought_P Parameter: Treatment Value: Drought vs. No Drought
  misc_feature: MA Experiment ID: 20000439 Result: Down-regulated in Transcription
  misc_feature: MA Experiment 20000439 PARAMETER Experiment Name: At_Roots__P Parameter: Age (day) Value: 14 vs. 21
  misc_feature: MA Experiment 20000439 PARAMETER Experiment Name: At_Roots__P Parameter: Organism Value: A. thaliana
  misc_feature: MA Experiment 20000439 PARAMETER Experiment Name: At_Roots__P Parameter: Tissue Value: Roots vs. Whole Plant
  misc_feature: MA Experiment ID: 20000441 Result: Up-regulated in Transcription
  misc_feature: MA Experiment 20000441 PARAMETER Experiment Name: At_1uM_BR-BRZ__P Parameter: Tissue Value: Shoot Apices
  misc_feature: MA Experiment 20000441 PARAMETER Experiment Name: At_1uM_BR-BRZ__P Parameter: Treatment Value: 1uM BR vs. No Treatment
  misc_feature: MA Experiment ID: 20000451 Result: Up-regulated in Transcription
  misc_feature: MA Experiment 20000451 PARAMETER Experiment Name: At_CS6879_Shoots-Roots_P Parameter: Age (day) Value: 14
  misc_feature: MA Experiment 20000451 PARAMETER Experiment Name: At_CS6879_Shoots-Roots_P Parameter: Organism Value: A. thaliana
  misc_feature: MA Experiment 20000451 PARAMETER Experiment Name: At_CS6879_Shoots-Roots_P Parameter: Plant Line Value: CS6879 vs. WS
  misc_feature: MA Experiment 20000451 PARAMETER Experiment Name: At_CS6879_Shoots-Roots_P Parameter: Tissue Value: Roots
  misc_feature: MA Experiment ID: 20000452 Result: Up-regulated in Transcription
  misc_feature: MA Experiment 20000452 PARAMETER Experiment Name: At_CS6879_Shoots-Roots_P Parameter: Age (day) Value: 14
  misc_feature: MA Experiment 20000452 PARAMETER Experiment Name: At_CS6879_Shoots-Roots_P Parameter: Organism Value: A. thaliana
  misc_feature: MA Experiment 20000452 PARAMETER Experiment Name: At_CS6879_Shoots-Roots_P Parameter: Plant Line Value: CS6879 vs. WS
  misc_feature: MA Experiment 20000452 PARAMETER Experiment Name: At_CS6879_Shoots-Roots_P Parameter: Tissue Value: Shoots
  misc_feature: MA Experiment ID: 20000709 Result: Down-regulated in Transcription
  misc_feature: MA Experiment 20000709 PARAMETER Experiment Name: At_15mM_NH4NO3_L-to-H_P Parameter: Age (hr) Value: 14
  misc_feature: MA Experiment 20000709 PARAMETER Experiment Name: At_15mM_NH4NO3_L-to-H_P Parameter: Organism Value: A. thaliana
  misc_feature: MA Experiment 20000709 PARAMETER Experiment Name: At_15mM_NH4NO3_L-to-H_P Parameter: Plant Line Value: WS
  misc_feature: MA Experiment 20000709 PARAMETER Experiment Name: At_15mM_NH4NO3_L-to-H_P Parameter: Timepoint (hr) Value: 4
  misc_feature: MA Experiment 20000709 PARAMETER Experiment Name: At_15mM_NH4NO3_L-to-H_P Parameter: Tissue Value: Aerial
  misc_feature: MA Experiment 20000709 PARAMETER Experiment Name: At_15mM_NH4NO3_L-to-H_P Parameter: Treatment Value: 15mM NH4NO3 vs. 30mM Mannitol
  misc_feature: MA Experiment ID: 20000794 Result: Down-regulated in Transcription
  misc_feature: MA Experiment 20000794 PARAMETER Experiment Name: At_Petals_P Parameter: Age (day) Value: 23-25 days
  misc_feature: MA Experiment 20000794 PARAMETER Experiment Name: At_Petals_P Parameter: Plant Line Value: WS
  misc_feature: MA Experiment 20000794 PARAMETER Experiment Name: At_Petals_P Parameter: Tissue Value: Petals vs. Whole plant
  misc_feature: MA Experiment ID: 20001248 Result: Down-regulated in Transcription
  misc_feature: MA Experiment 20001248 PARAMETER Experiment Name: At_Far-red-induction_P Parameter: Age (day) Value: 7
  misc_feature: MA Experiment 20001248 PARAMETER Experiment Name: At_Far-red-induction_P Parameter: Light Value: Far-red vs. White
  misc_feature: MA Experiment 20001248 PARAMETER Experiment Name: At_Far-red-induction_P Parameter: Organism Value: A. thaliana
  misc_feature: MA Experiment 20001248 PARAMETER Experiment Name: At_Far-red-induction_P Parameter: Plant Line Value: Columbia
  misc_feature: MA Experiment 20001248 PARAMETER Experiment Name: At_Far-red-induction_P Parameter: Timepoint (hr) Value: 4
  misc_feature: MA Experiment 20001248 PARAMETER Experiment Name: At_Far-red-induction_P Parameter: Tissue Value: Whole Plant
  misc_feature: MA Experiment ID: 20001554 Result: Down-regulated in Transcription
  misc_feature: MA Experiment 20001554 PARAMETER Experiment Name: At_Drought_Soil_Dry_P Parameter: Age (day) Value: 21
  misc_feature: MA Experiment 20001554 PARAMETER Experiment Name: At_Drought_Soil_Dry_P Parameter: Organism Value: A. thaliana
  misc_feature: MA Experiment 20001554 PARAMETER Experiment Name: At_Drought_Soil_Dry_P Parameter: Plant Line Value: WS
  misc_feature: MA Experiment 20001554 PARAMETER Experiment Name: At_Drought_Soil_Dry_P Parameter: Post Timepoint (hr) Value: None
  misc_feature: MA Experiment 20001554 PARAMETER Experiment Name: At_Drought_Soil_Dry_P Parameter: Post-Treatment Value: None
  misc_feature: MA Experiment 20001554 PARAMETER Experiment Name: At_Drought_Soil_Dry_P Parameter: Timepoint (day) Value: 7
  misc_feature: MA Experiment 20001554 PARAMETER Experiment Name: At_Drought_Soil_Dry_P Parameter: Treatment Value: Drought vs. No Drought
  misc_feature: MA Experiment ID: 20001555 Result: Down-regulated in Transcription
  misc_feature: MA Experiment 20001555 PARAMETER Experiment Name: At_Drought_Soil_Dry_P Parameter: Age (day) Value: 24
  misc_feature: MA Experiment 20001555 PARAMETER Experiment Name: At_Drought_Soil_Dry_P Parameter: Organism Value: A. thaliana
  misc_feature: MA Experiment 20001555 PARAMETER Experiment Name: At_Drought_Soil_Dry_P Parameter: Plant Line Value: WS
  misc_feature: MA Experiment 20001555 PARAMETER Experiment Name: At_Drought_Soil_Dry_P Parameter: Post Timepoint (hr) Value: None
  misc_feature: MA Experiment 20001555 PARAMETER Experiment Name: At_Drought_Soil_Dry_P Parameter: Post-Treatment Value: None
  misc_feature: MA Experiment 20001555 PARAMETER Experiment Name: At_Drought_Soil_Dry_P Parameter: Timepoint (day) Value: 10
  misc_feature: MA Experiment 20001555 PARAMETER Experiment Name: At_Drought_Soil_Dry_P Parameter: Treatment Value: Drought vs. No Drought
  misc_feature: MA Experiment ID: 20001556 Result: Down-regulated in Transcription
  misc_feature: MA Experiment 20001556 PARAMETER Experiment Name: At_Drought_Soil_Dry_P Parameter: Age (day) Value: 26
  misc_feature: MA Experiment 20001556 PARAMETER Experiment Name: At_Drought_Soil_Dry_P Parameter: Organism Value: A. thaliana
  misc_feature: MA Experiment 20001556 PARAMETER Experiment Name: At_Drought_Soil_Dry_P Parameter: Plant Line Value: WS
  misc_feature: MA Experiment 20001556 PARAMETER Experiment Name: At_Drought_Soil_Dry_P Parameter: Post Timepoint (hr) Value: None
  misc_feature: MA Experiment 20001556 PARAMETER Experiment Name: At_Drought_Soil_Dry_P Parameter: Post-Treatment Value: None
  misc_feature: MA Experiment 20001556 PARAMETER Experiment Name: At_Drought_Soil_Dry_P Parameter: Timepoint (day) Value: 12
  misc_feature: MA Experiment 20001556 PARAMETER Experiment Name: At_Drought_Soil_Dry_P Parameter: Treatment Value: Drought vs. No Drought
  misc_feature: MA Experiment ID: 20001559 Result: Down-regulated in Transcription
  misc_feature: MA Experiment 20001559 PARAMETER Experiment Name: At_Drought_Soil_Dry_P Parameter: Age (day) Value: 28
  misc_feature: MA Experiment 20001559 PARAMETER Experiment Name: At_Drought_Soil_Dry_P Parameter: Organism Value: A. thaliana
  misc_feature: MA Experiment 20001559 PARAMETER Experiment Name: At_Drought_Soil_Dry_P Parameter: Plant Line Value: WS
  misc_feature: MA Experiment 20001559 PARAMETER Experiment Name: At_Drought_Soil_Dry_P Parameter: Post Timepoint (hr) Value: 29
  misc_feature: MA Experiment 20001559 PARAMETER Experiment Name: At_Drought_Soil_Dry_P Parameter: Post-Treatment Value: Re-Water vs. No Drought
  misc_feature: MA Experiment 20001559 PARAMETER Experiment Name: At_Drought_Soil_Dry_P Parameter: Timepoint (day) Value: 14
  misc_feature: MA Experiment 20001559 PARAMETER Experiment Name: At_Drought_Soil_Dry_P Parameter: Treatment Value: Drought vs. No Drought
  misc_feature: MA Experiment ID: 20001773 Result: Down-regulated in Transcription
  misc_feature: MA Experiment 20001773 PARAMETER Experiment Name: At_Far-red-enriched-adult_P Parameter: Age (day) Value: 30
  misc_feature: MA Experiment 20001773 PARAMETER Experiment Name: At_Far-red-enriched-adult_P Parameter: Light Value: Far-red enriched vs. White
  misc_feature: MA Experiment 20001773 PARAMETER Experiment Name: At_Far-red-enriched-adult_P Parameter: Organism Value: A. thaliana
  misc_feature: MA Experiment 20001773 PARAMETER Experiment Name: At_Far-red-enriched-adult_P Parameter: Plant Line Value: Columbia
  misc_feature: MA Experiment 20001773 PARAMETER Experiment Name: At_Far-red-enriched-adult_P Parameter: Timepoint (hr) Value: 48
  misc_feature: MA Experiment 20001773 PARAMETER Experiment Name: At_Far-red-enriched-adult_P Parameter: Tissue Value: Aerial
  misc_feature: MA Experiment ID: 20001904 Result: Down-regulated in Transcription
  misc_feature: MA Experiment 20001904 PARAMETER Experiment Name: At_Drought_Reproduction_P Parameter: Age (day) Value: 37
  misc_feature: MA Experiment 20001904 PARAMETER Experiment Name: At_Drought_Reproduction_P Parameter: Organism Value: A. thaliana
  misc_feature: MA Experiment 20001904 PARAMETER Experiment Name: At_Drought_Reproduction_P Parameter: Plant Line Value: WS
  misc_feature: MA Experiment 20001904 PARAMETER Experiment Name: At_Drought_Reproduction_P Parameter: Timepoint (day) Value: 7
  misc_feature: MA Experiment 20001904 PARAMETER Experiment Name: At_Drought_Reproduction_P Parameter: Tissue Value: Rosettes
  misc_feature: MA Experiment 20001904 PARAMETER Experiment Name: At_Drought_Reproduction_P Parameter: Treatment Value: Drought vs. No Drought

SEQ ID NO: 95676 - protein, 268 aa, Arabidopsis thaliana; identical to SEQ ID NO: 91920
  peptide (1)..(268): Ceres Seq. ID no. 12729999
  misc_feature (212)..(266): Pfam Name: Domain of unknown function DUF26 Pfam Description: Domain of unknown function DUF26
  misc_feature (17)..(268): Homolog of NCBI NO: 18403247 NR Description: receptor kinase common family, putative; protein At3g22060.1, supported by cDNA: gi_14334417 [Arabidopsis >gi|9279765|dbj|BAB01391.1| contains similarity to receptor
  misc_feature (32)..(231): Homolog of NCBI NO: 28188537 NR Description: unknown protein [Arabidopsis thaliana] unknown protein [Arabidopsis thaliana] unknown protein [Arabidopsis thaliana]
  misc_feature (32)..(231): Homolog of NCBI NO: 28188559 NR Description: unknown protein [Arabidopsis thaliana]
  misc_feature (32)..(231): Homolog of NCBI NO: 28188539 NR Description: unknown protein [Arabidopsis thaliana]
  misc_feature (32)..(231): Homolog of NCBI NO: 28188561 NR Description: unknown protein [Arabidopsis lyrata] unknown protein [Arabidopsis lyrata] >gi|28188569|gb|AAN46210.1|
  misc_feature (32)..(231): Homolog of NCBI NO: 28188563 NR Description: unknown protein [Arabidopsis lyrata]
  misc_feature (21)..(267): Homolog of NCBI NO: 15231012 NR Description: putative protein; protein id: At3g58310.1
  misc_feature (28)..(266): Homolog of NCBI NO: 15233235 NR Description: receptor kinase common family, putative; protein At3g21990.1 [Arabidopsis thaliana] >gi|9279756|dbj|BAB01382.1| similarity to receptor kinase~gene_id:MZN24.17 [Arabidopsis
  misc_feature (28)..(266): Homolog of NCBI NO: 15233366 NR Description: pollen coat receptor kinase, putative; protein At4g20670.1 [Arabidopsis thaliana] >gi|7485931|pir||T10609
  misc_feature (41)..(265): Homolog of NCBI NO: 9279746 NR Description: contains similarity to receptor protein

SEQ ID NO: 95677 - protein, 252 aa, Arabidopsis thaliana; identical to SEQ ID NO: 91921
  peptide (1)..(252): Ceres Seq. ID no. 12730000
  misc_feature (196)..(250): Pfam Name: Domain of unknown function DUF26 Pfam Description: Domain of unknown function DUF26
  misc_feature (1)..(252): Homolog of NCBI NO: 18403247 NR Description: receptor kinase common family, putative; protein At3g22060.1, supported by cDNA: gi_14334417 [Arabidopsis >gi|9279765|dbj|BAB01391.1| contains similarity to receptor
  misc_feature (16)..(215): Homolog of NCBI NO: 28188537 NR Description: unknown protein [Arabidopsis thaliana] unknown protein [Arabidopsis thaliana] unknown protein [Arabidopsis thaliana]
  misc_feature (16)..(215): Homolog of NCBI NO: 28188559 NR Description: unknown protein [Arabidopsis thaliana]
  misc_feature (16)..(215): Homolog of NCBI NO: 28188539 NR Description: unknown protein [Arabidopsis thaliana]
  misc_feature (16)..(215): Homolog of NCBI NO: 28188561 NR Description: unknown protein [Arabidopsis lyrata] unknown protein [Arabidopsis lyrata] >gi|28188569|gb|AAN46210.1|
  misc_feature (16)..(215): Homolog of NCBI NO: 28188563 NR Description: unknown protein [Arabidopsis lyrata]
  misc_feature (5)..(251): Homolog of NCBI NO: 15231012 NR Description: putative protein; protein id: At3g58310.1
  misc_feature (12)..(250): Homolog of NCBI NO: 15233235 NR Description: receptor kinase common family, putative; protein At3g21990.1 [Arabidopsis thaliana] >gi|9279756|dbj|BAB01382.1| similarity to receptor kinase~gene_id:MZN24.17 [Arabidopsis
  misc_feature (12)..(250): Homolog of NCBI NO: 15233366 NR Description: pollen coat receptor kinase, putative; protein At4g20670.1 [Arabidopsis thaliana] >gi|7485931|pir||T10609
  misc_feature (25)..(249): Homolog of NCBI NO: 9279746 NR Description: contains similarity to receptor protein

SEQ ID NO: 95678 - DNA, 1329 bp, Arabidopsis thaliana; identical to SEQ ID NO: 91922
  misc_feature (1)..(1329): Ceres Seq. ID no. 12730004
  misc_feature: MA Experiment ID: 108434 Result: Up-regulated in Transcription
  misc_feature: MA Experiment 108434 PARAMETER Experiment Name: At_Root_Tips_cDNA_P Parameter: Tissue Value: Root Tips
  misc_feature: MA Experiment ID: 108463 Result: Down-regulated in Transcription
  misc_feature: MA Experiment 108463 PARAMETER Experiment Name: At_Germinating_Seeds_cDNA_P Parameter: Age (day) Value: 3 vs. 0
  misc_feature: MA Experiment 108463 PARAMETER Experiment Name: At_Germinating_Seeds_cDNA_P Parameter: Tissue Value: Germinating Seeds
  misc_feature: MA Experiment ID: 108561 Result: Down-regulated in Transcription
  misc_feature: MA Experiment 108561 PARAMETER Experiment Name: At_100uM_ABA_cDNA_P Parameter: Timepoint (hr) Value: 6
  misc_feature: MA Experiment 108561 PARAMETER Experiment Name: At_100uM_ABA_cDNA_P Parameter: Tissue Value: Aerial
  misc_feature: MA Experiment 108561 PARAMETER Experiment Name: At_100uM_ABA_cDNA_P Parameter: Treatment Value: 100uM ABA vs. No Treatment
  misc_feature: MA Experiment ID: 108573 Result: Down-regulated in Transcription
  misc_feature: MA Experiment 108573 PARAMETER Experiment Name: At_Drought_cDNA_P Parameter: Timepoint (hr) Value: 6
  misc_feature: MA Experiment 108573 PARAMETER Experiment Name: At_Drought_cDNA_P Parameter: Tissue Value: Aerial
  misc_feature: MA Experiment 108573 PARAMETER Experiment Name: At_Drought_cDNA_P Parameter: Treatment Value: Drought vs. No Drought
  misc_feature: MA Experiment ID: 108576 Result: Down-regulated in Transcription
  misc_feature: MA Experiment 108576 PARAMETER Experiment Name: At_42deg_Heat_cDNA_P Parameter: Temperature (deg C) Value: 42 vs. 22
  misc_feature: MA Experiment 108576 PARAMETER Experiment Name: At_42deg_Heat_cDNA_P Parameter: Timepoint (hr) Value: 1
  misc_feature: MA Experiment 108576 PARAMETER Experiment Name: At_42deg_Heat_cDNA_P Parameter: Tissue Value: Aerial
  misc_feature: MA Experiment ID: 108577 Result: Down-regulated in Transcription
  misc_feature: MA Experiment 108577 PARAMETER Experiment Name: At_42deg_Heat_cDNA_P Parameter: Temperature (deg C) Value: 42 vs. 22
  misc_feature: MA Experiment 108577 PARAMETER Experiment Name: At_42deg_Heat_cDNA_P Parameter: Timepoint (hr) Value: 6
  misc_feature: MA Experiment 108577 PARAMETER Experiment Name: At_42deg_Heat_cDNA_P Parameter: Tissue Value: Aerial
  misc_feature: MA Experiment ID: 108579 Result: Up-regulated in Transcription
  misc_feature: MA Experiment 108579 PARAMETER Experiment Name: At_4deg_Cold_cDNA_P Parameter: Temperature (deg C) Value: 4 vs. 22
  misc_feature: MA Experiment 108579 PARAMETER Experiment Name: At_4deg_Cold_cDNA_P Parameter: Timepoint (hr) Value: 6
  misc_feature: MA Experiment 108579 PARAMETER Experiment Name: At_4deg_Cold_cDNA_P Parameter: Tissue Value: Aerial
  misc_feature: MA Experiment ID: 20000184 Result: Up-regulated in Transcription
  misc_feature: MA Experiment 20000184 PARAMETER Experiment Name: At_Shoots__P Parameter: Age (day) Value: 7
  misc_feature: MA Experiment 20000184 PARAMETER Experiment Name: At_Shoots__P Parameter: Tissue Value: Shoots vs. Whole Plant
  misc_feature: MA Experiment ID: 20000185 Result: Down-regulated in Transcription
  misc_feature: MA Experiment 20000185 PARAMETER Experiment Name: At_Roots__P Parameter: Age (day) Value: 7 vs. 21
  misc_feature: MA Experiment 20000185 PARAMETER Experiment Name: At_Roots__P Parameter: Organism Value: A. thaliana
  misc_feature: MA Experiment 20000185 PARAMETER Experiment Name: At_Roots__P Parameter: Tissue Value: Roots vs. Whole Plant
  misc_feature: MA Experiment ID: 20000214 Result: Up-regulated in Transcription
  misc_feature: MA Experiment 20000214 PARAMETER Experiment Name: At_4deg_Cold_P Parameter: Timepoint (hr) Value: 6
  misc_feature: MA Experiment ID: 20000234 Result: Up-regulated in Transcription
  misc_feature: MA Experiment 20000234 PARAMETER Experiment Name: At_Siliques_P Parameter: Age (day) Value: 21
  misc_feature: MA Experiment 20000234 PARAMETER Experiment Name: At_Siliques_P Parameter: Organism Value: A. thaliana
  misc_feature: MA Experiment 20000234 PARAMETER Experiment Name: At_Siliques_P Parameter: Plant Line Value: WS
  misc_feature: MA Experiment 20000234 PARAMETER Experiment Name: At_Siliques_P Parameter: Tissue Value: Less Than 5mm Siliques vs. Whole Plant
  misc_feature: MA Experiment ID: 20000235 Result: Up-regulated in Transcription
  misc_feature: MA Experiment 20000235 PARAMETER Experiment Name: At_Siliques_P Parameter: Age (day) Value: 21
  misc_feature: MA Experiment 20000235 PARAMETER Experiment Name: At_Siliques_P Parameter: Organism Value: A. thaliana
  misc_feature: MA Experiment 20000235 PARAMETER Experiment Name: At_Siliques_P Parameter: Plant Line Value: WS
  misc_feature: MA Experiment 20000235 PARAMETER Experiment Name: At_Siliques_P Parameter: Tissue Value: 5-10mm Siliques vs. Whole Plant
  misc_feature: MA Experiment ID: 20000264 Result: Up-regulated in Transcription
  misc_feature: MA Experiment 20000264 PARAMETER Experiment Name: At_Open_Flower_P Parameter: Age (day) Value: 21
  misc_feature: MA Experiment 20000264 PARAMETER Experiment Name: At_Open_Flower_P Parameter: Plant Line Value: WS
  misc_feature: MA Experiment 20000264 PARAMETER Experiment Name: At_Open_Flower_P Parameter: Tissue Value: Open Flower vs. Whole Plant
  misc_feature: MA Experiment ID: 20000265 Result: Up-regulated in Transcription
  misc_feature: MA Experiment 20000265 PARAMETER Experiment Name: At_Open_Flower_P Parameter: Age (day) Value: 21
  misc_feature: MA Experiment 20000265 PARAMETER Experiment Name: At_Open_Flower_P Parameter: Plant Line Value: WS
  misc_feature: MA Experiment 20000265 PARAMETER Experiment Name: At_Open_Flower_P Parameter: Tissue Value: Closed Flower vs. Whole Plant
  misc_feature: MA Experiment ID: 20000286 Result: Up-regulated in Transcription
  misc_feature: MA Experiment 20000286 PARAMETER Experiment Name: At_Open_Flower_P Parameter: Age (day) Value: 21
  misc_feature: MA Experiment 20000286 PARAMETER Experiment Name: At_Open_Flower_P Parameter: Plant Line Value: WS
  misc_feature: MA Experiment 20000286 PARAMETER Experiment Name: At_Open_Flower_P Parameter: Tissue Value: Half Open vs. Whole Plant
  misc_feature: MA Experiment ID: 20000438 Result: Up-regulated in Transcription
  misc_feature: MA Experiment 20000438 PARAMETER Experiment Name: At_Shoots__P Parameter: Age (day) Value: 14
  misc_feature: MA Experiment 20000438 PARAMETER Experiment Name: At_Shoots__P Parameter: Tissue Value: Shoots vs. Whole Plant
  misc_feature: MA Experiment ID: 20000439 Result: Down-regulated in Transcription
  misc_feature: MA Experiment 20000439 PARAMETER Experiment Name: At_Roots__P Parameter: Age (day) Value: 14 vs. 21
  misc_feature: MA Experiment 20000439 PARAMETER Experiment Name: At_Roots__P Parameter: Organism Value: A. thaliana
  misc_feature: MA Experiment 20000439 PARAMETER Experiment Name: At_Roots__P Parameter: Tissue Value: Roots vs. Whole Plant
  misc_feature: MA Experiment ID: 20000441 Result: Up-regulated in Transcription
  misc_feature: MA Experiment 20000441 PARAMETER Experiment Name: At_1uM_BR-BRZ__P Parameter: Tissue Value: Shoot Apices
  misc_feature: MA Experiment 20000441 PARAMETER Experiment Name: At_1uM_BR-BRZ__P Parameter: Treatment Value: 1uM BR vs. No Treatment
  misc_feature: MA Experiment ID: 20000451 Result: Up-regulated in Transcription
  misc_feature: MA Experiment 20000451 PARAMETER Experiment Name: At_CS6879_Shoots-Roots_P Parameter: Age (day) Value: 14
  misc_feature: MA Experiment 20000451 PARAMETER Experiment Name: At_CS6879_Shoots-Roots_P Parameter: Organism Value: A. thaliana
  misc_feature: MA Experiment 20000451 PARAMETER Experiment Name: At_CS6879_Shoots-Roots_P Parameter: Plant Line Value: CS6879 vs. WS
  misc_feature: MA Experiment 20000451 PARAMETER Experiment Name: At_CS6879_Shoots-Roots_P Parameter: Tissue Value: Roots
  misc_feature: MA Experiment ID: 20000495 Result: Up-regulated in Transcription
  misc_feature: MA Experiment 20000495 PARAMETER Experiment Name: At_Guard_Cells_P Parameter: Harvest Date Value: 8/2/2002
  misc_feature: MA Experiment 20000495 PARAMETER Experiment Name: At_Guard_Cells_P Parameter: Organism Value: A. thaliana
  misc_feature: MA Experiment 20000495 PARAMETER Experiment Name: At_Guard_Cells_P Parameter: Tissue Value: Guard Cells vs. Leaves
  misc_feature: MA Experiment ID: 20000573 Result: Up-regulated in Transcription
  misc_feature: MA Experiment 20000573 PARAMETER Experiment Name: At_100uM_ABA_Mutants__P Parameter: Organism Value: A. thaliana
  misc_feature: MA Experiment 20000573 PARAMETER Experiment Name: At_100uM_ABA_Mutants__P Parameter: Plant Line Value: CS22 vs. Ler wt
  misc_feature: MA Experiment 20000573 PARAMETER Experiment Name: At_100uM_ABA_Mutants__P Parameter: Timepoint (hr) Value: N/A
  misc_feature: MA Experiment 20000573 PARAMETER Experiment Name: At_100uM_ABA_Mutants__P Parameter: Tissue Value: Whole Plant
  misc_feature: MA Experiment 20000573 PARAMETER Experiment Name: At_100uM_ABA_Mutants__P Parameter: Treatment Value: None
  misc_feature: MA Experiment ID: 20000574 Result: Up-regulated in Transcription
  misc_feature: MA Experiment 20000574 PARAMETER Experiment Name: At_100uM_ABA_Mutants__P Parameter: Organism Value: A. thaliana
  misc_feature: MA Experiment 20000574 PARAMETER Experiment Name: At_100uM_ABA_Mutants__P Parameter: Plant Line Value: CS23 vs. Ler wt
  misc_feature: MA Experiment 20000574 PARAMETER Experiment Name: At_100uM_ABA_Mutants__P Parameter: Timepoint (hr) Value: N/A
  misc_feature: MA Experiment 20000574 PARAMETER Experiment Name: At_100uM_ABA_Mutants__P Parameter: Tissue Value: Whole Plant
  misc_feature: MA Experiment 20000574 PARAMETER Experiment Name: At_100uM_ABA_Mutants__P Parameter: Treatment Value: None
  misc_feature: MA Experiment ID: 20001555 Result: Down-regulated in Transcription
  misc_feature: MA Experiment 20001555 PARAMETER Experiment Name: At_Drought_Soil_Dry_P Parameter: Age (day) Value: 24
  misc_feature: MA Experiment 20001555 PARAMETER Experiment Name: At_Drought_Soil_Dry_P Parameter: Organism Value: A. thaliana
  misc_feature: MA Experiment 20001555 PARAMETER Experiment Name: At_Drought_Soil_Dry_P Parameter: Plant Line Value: WS
  misc_feature: MA Experiment 20001555 PARAMETER Experiment Name: At_Drought_Soil_Dry_P Parameter: Post Timepoint (hr) Value: None
  misc_feature: MA Experiment 20001555 PARAMETER Experiment Name: At_Drought_Soil_Dry_P Parameter: Post-Treatment Value: None
  misc_feature: MA Experiment 20001555 PARAMETER Experiment Name: At_Drought_Soil_Dry_P Parameter: Timepoint (day) Value: 10
  misc_feature: MA Experiment 20001555 PARAMETER Experiment Name: At_Drought_Soil_Dry_P Parameter: Treatment Value: Drought vs. No Drought
  misc_feature: MA Experiment ID: 20001557 Result: Up-regulated in Transcription
  misc_feature: MA Experiment 20001557 PARAMETER Experiment Name: At_Drought_Soil_Dry_P Parameter: Age (day) Value: 27
  misc_feature: MA Experiment 20001557 PARAMETER Experiment Name: At_Drought_Soil_Dry_P Parameter: Organism Value: A. thaliana
  misc_feature: MA Experiment 20001557 PARAMETER Experiment Name: At_Drought_Soil_Dry_P Parameter: Plant Line Value: WS
  misc_feature: MA Experiment 20001557 PARAMETER Experiment Name: At_Drought_Soil_Dry_P Parameter: Post Timepoint (hr) Value: 3
  misc_feature: MA Experiment 20001557 PARAMETER Experiment Name: At_Drought_Soil_Dry_P Parameter: Post-Treatment Value: Re-Water vs. No Drought
  misc_feature: MA Experiment 20001557 PARAMETER Experiment Name: At_Drought_Soil_Dry_P Parameter: Timepoint (day) Value: 13
  misc_feature: MA Experiment 20001557 PARAMETER Experiment Name: At_Drought_Soil_Dry_P Parameter: Treatment Value: Drought vs. No Drought
  misc_feature: MA Experiment ID: 20001558 Result: Up-regulated in Transcription
  misc_feature: MA Experiment 20001558 PARAMETER Experiment Name: At_Drought_Soil_Dry_P Parameter: Age (day) Value: 27
  misc_feature: MA Experiment 20001558 PARAMETER Experiment Name: At_Drought_Soil_Dry_P Parameter: Organism Value: A. thaliana
  misc_feature: MA Experiment 20001558 PARAMETER Experiment Name: At_Drought_Soil_Dry_P Parameter: Plant Line Value: WS
  misc_feature: MA Experiment 20001558 PARAMETER Experiment Name: At_Drought_Soil_Dry_P Parameter: Post Timepoint (hr) Value: 6
  misc_feature: MA Experiment 20001558 PARAMETER Experiment Name: At_Drought_Soil_Dry_P Parameter: Post-Treatment Value: Re-Water vs. No Drought
  misc_feature: MA Experiment 20001558 PARAMETER Experiment Name: At_Drought_Soil_Dry_P Parameter: Timepoint (day) Value: 13
  misc_feature: MA Experiment 20001558 PARAMETER Experiment Name: At_Drought_Soil_Dry_P Parameter: Treatment Value: Drought vs. No Drought
  misc_feature: MA Experiment ID: 20001560 Result: Up-regulated in Transcription
  misc_feature: MA Experiment 20001560 PARAMETER Experiment Name: At_Drought_Soil_Dry_P Parameter: Age (day) Value: 28
  misc_feature: MA Experiment 20001560 PARAMETER Experiment Name: At_Drought_Soil_Dry_P Parameter: Organism Value: A. thaliana
  misc_feature: MA Experiment 20001560 PARAMETER Experiment Name: At_Drought_Soil_Dry_P Parameter: Plant Line Value: WS
  misc_feature: MA Experiment 20001560 PARAMETER Experiment Name: At_Drought_Soil_Dry_P Parameter: Post Timepoint (hr) Value: None
  misc_feature: MA Experiment 20001560 PARAMETER Experiment Name: At_Drought_Soil_Dry_P Parameter: Post-Treatment Value: None
  misc_feature: MA Experiment 20001560 PARAMETER Experiment Name: At_Drought_Soil_Dry_P Parameter: Timepoint (day) Value: 14
  misc_feature: MA Experiment 20001560 PARAMETER Experiment Name: At_Drought_Soil_Dry_P Parameter: Treatment Value: Drought vs. No Drought
  misc_feature: MA Experiment ID: 20001904 Result: Down-regulated in Transcription
  misc_feature: MA Experiment 20001904 PARAMETER Experiment Name: At_Drought_Reproduction_P Parameter: Age (day) Value: 37
  misc_feature: MA Experiment 20001904 PARAMETER Experiment Name: At_Drought_Reproduction_P Parameter: Organism Value: A. thaliana
  misc_feature: MA Experiment 20001904 PARAMETER Experiment Name: At_Drought_Reproduction_P Parameter: Plant Line Value: WS
  misc_feature: MA Experiment 20001904 PARAMETER Experiment Name: At_Drought_Reproduction_P Parameter: Timepoint (day) Value: 7
  misc_feature: MA Experiment 20001904 PARAMETER Experiment Name: At_Drought_Reproduction_P Parameter: Tissue Value: Rosettes
  misc_feature: MA Experiment 20001904 PARAMETER Experiment Name: At_Drought_Reproduction_P Parameter: Treatment Value: Drought vs. No Drought
  misc_feature: MA Experiment ID: 20001905 Result: Down-regulated in Transcription
  misc_feature: MA Experiment 20001905 PARAMETER Experiment Name: At_Drought_Reproduction_P Parameter: Age (day) Value: 40
  misc_feature: MA Experiment 20001905 PARAMETER Experiment Name: At_Drought_Reproduction_P Parameter: Organism Value: A. thaliana
  misc_feature: MA Experiment 20001905 PARAMETER Experiment Name: At_Drought_Reproduction_P Parameter: Plant Line Value: WS
  misc_feature: MA Experiment 20001905 PARAMETER Experiment Name: At_Drought_Reproduction_P Parameter: Timepoint (day) Value: 10
  misc_feature: MA Experiment 20001905 PARAMETER Experiment Name: At_Drought_Reproduction_P Parameter: Tissue Value: Rosettes
  misc_feature: MA Experiment 20001905 PARAMETER Experiment Name: At_Drought_Reproduction_P Parameter: Treatment Value: Drought vs. No Drought
  misc_feature: MA Experiment ID: 20001906 Result: Down-regulated in Transcription
  misc_feature: MA Experiment 20001906 PARAMETER Experiment Name: At_Drought_Reproduction_P Parameter: Age (day) Value: 35
  misc_feature: MA Experiment 20001906 PARAMETER Experiment Name: At_Drought_Reproduction_P Parameter: Organism Value: A. thaliana
  misc_feature: MA Experiment 20001906 PARAMETER Experiment Name: At_Drought_Reproduction_P Parameter: Plant Line Value: WS
  misc_feature: MA Experiment 20001906 PARAMETER Experiment Name: At_Drought_Reproduction_P Parameter: Timepoint (day) Value: 5
  misc_feature: MA Experiment 20001906 PARAMETER Experiment Name: At_Drought_Reproduction_P Parameter: Tissue Value: Siliques
  misc_feature: MA Experiment 20001906 PARAMETER Experiment Name: At_Drought_Reproduction_P Parameter: Treatment Value: Drought vs. No Drought

SEQ ID NO: 95679 - protein, 351 aa, Arabidopsis thaliana; identical to SEQ ID NO: 91923
  peptide (1)..(351): Ceres Seq. ID no. 12730005
  misc_feature (267)..(349): Pfam Name: Protease inhibitor/seed storage/LTP family Pfam Description: Protease inhibitor/seed storage/LTP family
  misc_feature (1)..(351): Homolog of NCBI NO: 15233282 NR Description: unknown protein; protein id: At3g22120.1
  misc_feature (18)..(351): Homolog of NCBI NO: 11994732 NR Description: contains similarity to cell wall-plasma membrane
  misc_feature (71)..(351): Homolog of NCBI NO: 25453525 NR Description: cell wall-plasma membrane linker protein homolog
  misc_feature (46)..(351): Homolog of NCBI NO: 7446482 NR Description: probable cell wall-plasma membrane linker protein
  misc_feature (18)..(264): Homolog of NCBI NO: 7446482 NR Description: probable cell wall-plasma membrane linker protein
  misc_feature (18)..(323): Homolog of NCBI NO: 25453525 NR Description: cell wall-plasma membrane linker protein homolog
  misc_feature (46)..(351): Homolog of NCBI NO: 1709767 NR Description: 36.4 KD PROLINE-RICH PROTEIN
  misc_feature (53)..(351): Homolog of NCBI NO: 19521 NR Description: proline rich protein [Lycopersicon esculentum]
  misc_feature (47)..(351): Homolog of NCBI NO: 1076501 NR Description: cell wall protein - alfalfa
  misc_feature (45)..(351): Homolog of NCBI NO: 15022163 NR Description: putative proline-rich protein [Solanum brevidens]

SEQ ID NO: 95680 - protein, 334 aa, Arabidopsis thaliana; identical to SEQ ID NO: 91924
  peptide (1)..(334): Ceres Seq. ID no. 12730006
  misc_feature (250)..(332): Pfam Name: Protease inhibitor/seed storage/LTP family Pfam Description: Protease inhibitor/seed storage/LTP family
  misc_feature (1)..(334): Homolog of NCBI NO: 15233282 NR Description: unknown protein; protein id: At3g22120.1
  misc_feature (1)..(334): Homolog of NCBI NO: 11994732 NR Description: contains similarity to cell wall-plasma membrane
  misc_feature (54)..(334): Homolog of NCBI NO: 25453525 NR Description: cell wall-plasma membrane linker protein homolog
  misc_feature (29)..(334): Homolog of NCBI NO: 7446482 NR Description: probable cell wall-plasma membrane linker protein
  misc_feature (1)..(247): Homolog of NCBI NO: 7446482 NR Description: probable cell wall-plasma membrane linker protein
  misc_feature (1)..(306): Homolog of NCBI NO: 25453525 NR Description: cell wall-plasma membrane linker protein homolog
  misc_feature (29)..(334): Homolog of NCBI NO: 1709767 NR Description: 36.4 KD PROLINE-RICH PROTEIN
  misc_feature (36)..(334): Homolog of NCBI NO: 19521 NR Description: proline rich protein [Lycopersicon esculentum]
  misc_feature (30)..(334): Homolog of NCBI NO: 1076501 NR Description: cell wall protein - alfalfa
  misc_feature (28)..(334): Homolog of NCBI NO: 15022163 NR Description: putative proline-rich protein [Solanum brevidens]

SEQ ID NO: 95681 - DNA, 2463 bp, Arabidopsis thaliana
  misc_feature (1)..(2463): Ceres Seq. ID no. 12730007
  misc_feature: MA Experiment ID: 20000171 Result: Down-regulated in Transcription
  misc_feature: MA Experiment 20000171 PARAMETER Experiment Name: At_42deg_Heat_P Parameter: Age (day) Value: 14
  misc_feature: MA Experiment 20000171 PARAMETER Experiment Name: At_42deg_Heat_P Parameter: Organism Value: A. thaliana
  misc_feature: MA Experiment 20000171 PARAMETER Experiment Name: At_42deg_Heat_P Parameter: Plant Line Value: WS
  misc_feature: MA Experiment 20000171 PARAMETER Experiment Name: At_42deg_Heat_P Parameter: Temperature (deg C) Value: 42 vs. 22
  misc_feature: MA Experiment 20000171 PARAMETER Experiment Name: At_42deg_Heat_P Parameter: Timepoint (hr) Value: 1
  misc_feature: MA Experiment 20000171 PARAMETER Experiment Name: At_42deg_Heat_P Parameter: Tissue Value: Aerial
  misc_feature: MA Experiment ID: 20000180 Result: Up-regulated in Transcription
  misc_feature: MA Experiment 20000180 PARAMETER Experiment Name: At_Germinating_Seeds_P Parameter: Age (hr) Value: 24 vs. 0
  misc_feature: MA Experiment 20000180 PARAMETER Experiment Name: At_Germinating_Seeds_P Parameter: Tissue Value: Germinating Seeds
  misc_feature: MA Experiment ID: 20000182 Result: Down-regulated in Transcription
  misc_feature: MA Experiment 20000182 PARAMETER Experiment Name: At_2mM_SA_P Parameter: Age (day) Value: 14
  misc_feature: MA Experiment 20000182 PARAMETER Experiment Name: At_2mM_SA_P Parameter: Organism Value: A. thaliana
  misc_feature: MA Experiment 20000182 PARAMETER Experiment Name: At_2mM_SA_P Parameter: Plant Line Value: WS
  misc_feature: MA Experiment 20000182 PARAMETER Experiment Name: At_2mM_SA_P Parameter: Timepoint (hr) Value: 6
  misc_feature: MA Experiment 20000182 PARAMETER Experiment Name: At_2mM_SA_P Parameter: Tissue Value: Aerial
  misc_feature: MA Experiment 20000182 PARAMETER Experiment Name: At_2mM_SA_P Parameter: Treatment Value: 2mM SA vs. No Treatment
  misc_feature: MA Experiment ID: 20000185 Result: Down-regulated in Transcription
  misc_feature: MA Experiment 20000185 PARAMETER Experiment Name: At_Roots__P Parameter: Age (day) Value: 7 vs. 21
  misc_feature: MA Experiment 20000185 PARAMETER Experiment Name: At_Roots__P Parameter: Organism Value: A. thaliana
  misc_feature: MA Experiment 20000185 PARAMETER Experiment Name: At_Roots__P Parameter: Tissue Value: Roots vs. Whole Plant
  misc_feature: MA Experiment ID: 20000437 Result: Down-regulated in Transcription
  misc_feature: MA Experiment 20000437 PARAMETER Experiment Name: At_Drought_P Parameter: Age (day) Value: 8
  misc_feature: MA Experiment 20000437 PARAMETER Experiment Name: At_Drought_P Parameter: Organism Value: A. thaliana
  misc_feature: MA Experiment 20000437 PARAMETER Experiment Name: At_Drought_P Parameter: Plant Line Value: WS
  misc_feature: MA Experiment 20000437 PARAMETER Experiment Name: At_Drought_P Parameter: Timepoint (hr) Value: 24
  misc_feature: MA Experiment 20000437 PARAMETER Experiment Name: At_Drought_P Parameter: Tissue Value: Whole Plant
  misc_feature: MA Experiment 20000437 PARAMETER Experiment Name: At_Drought_P Parameter: Treatment Value: Drought vs. No Drought
  misc_feature: MA Experiment ID: 20000438 Result: Up-regulated in Transcription
  misc_feature: MA Experiment 20000438 PARAMETER Experiment Name: At_Shoots__P Parameter: Age (day) Value: 14
  misc_feature: MA Experiment 20000438 PARAMETER Experiment Name: At_Shoots__P Parameter: Tissue Value: Shoots vs. Whole Plant
  misc_feature: MA Experiment ID: 20000439 Result: Down-regulated in Transcription
  misc_feature: MA Experiment 20000439 PARAMETER Experiment Name: At_Roots__P Parameter: Age (day) Value: 14 vs. 21
  misc_feature: MA Experiment 20000439 PARAMETER Experiment Name: At_Roots__P Parameter: Organism Value: A. thaliana
  misc_feature: MA Experiment 20000439 PARAMETER Experiment Name: At_Roots__P Parameter: Tissue Value: Roots vs. Whole Plant
  misc_feature: MA Experiment ID: 20001248 Result: Down-regulated in Transcription
  misc_feature: MA Experiment 20001248 PARAMETER Experiment Name: At_Far-red-induction_P Parameter: Age (day) Value: 7
  misc_feature: MA Experiment 20001248 PARAMETER Experiment Name: At_Far-red-induction_P Parameter: Light Value: Far-red vs. White
  misc_feature: MA Experiment 20001248 PARAMETER Experiment Name: At_Far-red-induction_P Parameter: Organism Value: A. thaliana
  misc_feature: MA Experiment 20001248 PARAMETER Experiment Name: At_Far-red-induction_P Parameter: Plant Line Value: Columbia
  misc_feature: MA Experiment 20001248 PARAMETER Experiment Name: At_Far-red-induction_P Parameter: Timepoint (hr) Value: 4
  misc_feature: MA Experiment 20001248 PARAMETER Experiment Name: At_Far-red-induction_P Parameter: Tissue Value: Whole Plant
  misc_feature: MA Experiment ID: 20001450 Result: Down-regulated in Transcription
  misc_feature: MA Experiment 20001450 PARAMETER Experiment Name: At_Far-red-induction_P Parameter: Age (day) Value: 7
  misc_feature: MA Experiment 20001450 PARAMETER Experiment Name: At_Far-red-induction_P Parameter: Light Value: Far-red vs. White
  misc_feature: MA Experiment 20001450 PARAMETER Experiment Name: At_Far-red-induction_P Parameter: Organism Value: A. thaliana
  misc_feature: MA Experiment 20001450 PARAMETER Experiment Name: At_Far-red-induction_P Parameter: Plant Line Value: Columbia
  misc_feature: MA Experiment 20001450 PARAMETER Experiment Name: At_Far-red-induction_P Parameter: Timepoint (hr) Value: 8
  misc_feature: MA Experiment 20001450 PARAMETER Experiment Name: At_Far-red-induction_P Parameter: Tissue Value: Whole Plant
  misc_feature: MA Experiment ID: 20001451 Result: Down-regulated in Transcription
  misc_feature: MA Experiment 20001451 PARAMETER Experiment Name: At_Far-red-induction_P Parameter: Age (day) Value: 7
  misc_feature: MA Experiment 20001451 PARAMETER Experiment Name: At_Far-red-induction_P Parameter: Light Value: Far-red vs. White
  misc_feature: MA Experiment 20001451 PARAMETER Experiment Name: At_Far-red-induction_P Parameter: Organism Value: A. thaliana
  misc_feature: MA Experiment 20001451 PARAMETER Experiment Name: At_Far-red-induction_P Parameter: Plant Line Value: Columbia
  misc_feature: MA Experiment 20001451 PARAMETER Experiment Name: At_Far-red-induction_P Parameter: Timepoint (hr) Value: 24
  misc_feature: MA Experiment 20001451 PARAMETER Experiment Name: At_Far-red-induction_P Parameter: Tissue Value: Whole Plant
atggctggatcagctctacctctaccacctcctccaccactatcattacaatctccgtcacaaaatcaaacccgtcattcttctaccttttctccaccaacccttactcctcaaacaccttctatccgttcccgtcttagcaaaatctgtcaagatggaaacccacaacttgcacgccaattgttcgacgcaattcctaaaccaactactgttctttggaacactatcatcatcgggtttatttgtaataatctaccacacgaagctcttcttttctattcccggatgaaaaagacggcaccttttactaattgtgatgcttatacttactcttctacactcaaggcgtgtgctgagactaagaatttgaaagctggtaaagctgtgcattgtcatttgatccgttgtttacagaattcaagcagagttgtgcataattctttgatgaatatgtatgtttcttgtttgaatgctcctgattgttttgagtatgatgttgtgcgtaaagttttcgataatatgcgtaggaagaatgttgtcgcttggaatactttgatttcttggtatgtgaaaacagggagaaatgctgaagcttgtaggcaatttgggataatgatgagaatggaggtaaaaccgagcccggttagctttgttaatgtttttcctgcggtgtcgatttcgagaagcattaagaaagctaacgttttttatggtttgatgcttaaattgggagatgaatatgtgaaggacttgtttgtggttagttcggctatttctatgtatgctgagcttggtgatattgagtcatcaaggagagtgtttgattcttgtgttgagagaaacatcgaggtttggaatacaatgataggtgtttatgttcagaatgattgtctggttgaaagtattgagctttttcttgaagcgataggatcgaaagagattgtgtctgatgaagtaacgtacctcttggcagcgagtgctgtttcagcgttgcagcaagtagaactaggcaggcagtttcatggttttgtgagcaagaactttcgagagctaccgattgtgattgttaactcgttgatggtgatgtactcaaggtgtggttctgtgcacaagtcatttggagtctttctttccatgcgagagagagatgttgtatcgtggaacactatgatctctgcatttgtccaaaatggcttagatgatgaaggattgatgctggtttacgagatgcagaagcaagggtttaagattgattacataactgtgacagctttgctttcggctgcatcaaatcttagaaacaaggagatcgggaagcagactcacgctttccttatcaggcaagggattcagttcgagggaatgaacagttaccttatcgacatgtattctaagtcaggtctaattaggatatcacagaagctttttgaaggaagtggttatgctgaaagagatcaggctacttggaattctatgatttccgggtacacgcagaatggacacacagagaaaacgtttctagtgttcaggaagatgttagaacagaatatacgacccaatgcggtaactgtggcatcaattctccctgcttgtagccaaataggtagtgttgacttgggtaaacagctccatggtttctctatcaggcaatacttggatcagaacgtatttgtggcttctgcgttagtagatatgtattcaaaggcaggagcaataaagtatgcagaagacatgttttctcaaacgaaagagagaaattctgtgacatacaccacgatgatactggggtatggccaacatggaatgggcgagagagctatctcgctgtttctctcaatgcaagagtcgggaatcaaacccgatgctataacctttgttgcagtgttatcagcttgcagctattcaggtctaatagatgaaggtctcaaaatattcgaggaaatgagagaagtttataacattcagccttcaagtgagcactattgctgcattacagatatgttggggagagttgggcgggtgaatgaagcctacgagtttgttaaaggacttggtgaagaagggaacatagctgagctatggggttcactactcgggtcttgtaaactacacggtgagcttgagcttgctgaaactgtttcggagaggttggctaaatttgataaagggaagaacttttccgggtatgaggttttgctctcgaatatgtatgctgaggaacaaaaatggaagagcgttgataaggtgaggagaggaatgagagaaaaaggtttaaagaaagaagttggtcgtagtgggattgaaattgcaggttacgtcaactgttttgtgtctagagatcaagagcatcctcattctagtgagatttatgatgtaatcgacggtttggctaaagatatgagaggcgattcgtttctgacaacattgccaactgttactccaagtttggaattggatgagtga

SEQ ID NO: 95682 - protein, 820 aa, Arabidopsis thaliana
  peptide (1)..(820): Ceres Seq. ID no. 12730008
  misc_feature (71)..(105): Pfam Name: PPR repeat Pfam Description: PPR repeat
  misc_feature (37)..(795): Homolog of NCBI NO: 38344148 NR Description: OSJNBa0041A02.15 [Oryza sativa (japonica
  misc_feature (73)..(820): Homolog of NCBI NO: 30694644 NR Description: pentatricopeptide (PPR) repeat-containing protein
  misc_feature (73)..(820): Homolog of NCBI NO: 30794008 NR Description: unknown protein [Arabidopsis thaliana]
  misc_feature (106)..(820): Homolog of NCBI NO: 11281371 NR Description: hypothetical protein T8H10.30 - Arabidopsis >gi|6706414|emb|CAB66100.1| putative protein [Arabidopsis
  misc_feature (73)..(806): Homolog of NCBI NO: 15233590 NR Description: putative protein; protein id: At4g21300.1
  misc_feature (48)..(800): Homolog of NCBI NO: 15229419 NR Description: putative protein; protein id: At3g63370.1
  misc_feature (60)..(801): Homolog of NCBI NO: 34903762 NR Description: unnamed protein product [Oryza sativa (japonica group)] >gi|7340873|dbj|BAA92963.1| unnamed protein product
  misc_feature (61)..(801): Homolog of NCBI NO: 34897084 NR Description: hypothetical protein [Oryza sativa (japonica group)] >gi|12957718|gb|AAK09236.1| hypothetical protein [Oryza
  misc_feature (106)..(789): Homolog of NCBI NO: 15234006 NR Description: putative protein; protein id: At4g18750.1
  misc_feature (58)..(801): Homolog of NCBI NO: 38606535 NR Description: OSJNBa0016O02.23 [Oryza sativa (japonica
MAGSALPLPPPPPLSLQSPSQNQTRHSSTFSPPTLTPQTPSIRSRLSKICQDGNPQLARQLFDAIPKPTTVLWNTIIIGFICNNLPHEALLFYSRMKKTAPFTNCDAYTYSSTLKACAETKNLKAGKAVHCHLIRCLQNSSRVVHNSLMNMYVSCLNAPDCFEYDVVRKVFDNMRRKNVVAWNTLISWYVKTGRNAEACRQFGIMMRMEVKPSPVSFVNVFPAVSISRSIKKANVFYGLMLKLGDEYVKDLFVVSSAISMYAELGDIESSRRVFDSCVERNIEVWNTMIGVYVQNDCLVESIELFLEAIGSKEIVSDEVTYLLAASAVSALQQVELGRQFHGFVSKNFRELPIVIVNSLMVMYSRCGSVHKSFGVFLSMRERDVVSWNTMISAFVQNGLDDEGLMLVYEMQKQGFKIDYITVTALLSAASNLRNKEIGKQTHAFLIRQGIQFEGMNSYLIDMYSKSGLIRISQKLFEGSGYAERDQATWNSMISGYTQNGHTEKTFLVFRKMLEQNIRPNAVTVASILPACSQIGSVDLGKQLHGFSIRQYLDQNVFVASALVDMYSKAGAIKYAEDMFSQTKERNSVTYTTMILGYGQHGMGERAISLFLSMQESGIKPDAITFVAVLSACSYSGLIDEGLKIFEEMREVYNIQPSSEHYCCITDMLGRVGRVNEAYEFVKGLGEEGNIAELWGSLLGSCKLHGELELAETVSERLAKFDKGKNFSGYEVLLSNMYAEEQKWKSVDKVRRGMREKGLKKEVGRSGIEIAGYVNCFVSRDQEHPHSSEIYDVIDGLAKDMRGDSFLTTLPTVTPSLELDE

SEQ ID NO: 95683 - protein, 725 aa, Arabidopsis thaliana
  peptide (1)..(725): Ceres Seq. ID no. 12730009
  misc_feature (1)..(700): Homolog of NCBI NO: 38344148 NR Description: OSJNBa0041A02.15 [Oryza sativa (japonica
  misc_feature (1)..(725): Homolog of NCBI NO: 30694644 NR Description: pentatricopeptide (PPR) repeat-containing protein
  misc_feature (1)..(725): Homolog of NCBI NO: 30794008 NR Description: unknown protein [Arabidopsis thaliana]
  misc_feature (11)..(725): Homolog of NCBI NO: 11281371 NR Description: hypothetical protein T8H10.30 - Arabidopsis >gi|6706414|emb|CAB66100.1| putative protein [Arabidopsis
  misc_feature (1)..(711): Homolog of NCBI NO: 15233590 NR Description: putative protein; protein id: At4g21300.1
  misc_feature (1)..(705): Homolog of NCBI NO: 15229419 NR Description: putative protein; protein id: At3g63370.1
  misc_feature (1)..(706): Homolog of NCBI NO: 34903762 NR Description: unnamed protein product [Oryza sativa (japonica group)] >gi|7340873|dbj|BAA92963.1| unnamed protein product
  misc_feature (1)..(706): Homolog of NCBI NO: 34897084 NR Description: hypothetical protein [Oryza sativa (japonica group)] >gi|12957718|gb|AAK09236.1| hypothetical protein [Oryza
  misc_feature (11)..(694): Homolog of NCBI NO: 15234006 NR Description: putative protein; protein id: At4g18750.1
  misc_feature (1)..(706): Homolog of NCBI NO: 38606535 NR Description: OSJNBa0016O02.23 [Oryza sativa (japonica
MKKTAPFTNCDAYTYSSTLKACAETKNLKAGKAVHCHLIRCLQNSSRVVHNSLMNMYVSCLNAPDCFEYDVVRKVFDNMRRKNVVAWNTLISWYVKTGRNAEACRQFGIMMRMEVKPSPVSFVNVFPAVSISRSIKKANVFYGLMLKLGDEYVKDLFVVSSAISMYAELGDIESSRRVFDSCVERNIEVWNTMIGVYVQNDCLVESIELFLEAIGSKEIVSDEVTYLLAASAVSALQQVELGRQFHGFVSKNFRELPIVIVNSLMVMYSRCGSVHKSFGVFLSMRERDVVSWNTMISAFVQNGLDDEGLMLVYEMQKQGFKIDYITVTALLSAASNLRNKEIGKQTHAFLIRQGIQFEGMNSYLIDMYSKSGLIRISQKLFEGSGYAERDQATWNSMISGYTQNGHTEKTFLVFRKMLEQNIRPNAVTVASILPACSQIGSVDLGKQLHGFSIRQYLDQNVFVASALVDMYSKAGAIKYAEDMFSQTKERNSVTYTTMILGYGQHGMGERAISLFLSMQESGIKPDAITFVAVLSACSYSGLIDEGLKIFEEMREVYNIQPSSEHYCCITDMLGRVGRVNEAYEFVKGLGEEGNIAELWGSLLGSCKLHGELELAETVSERLAKFDKGKNFSGYEVLLSNMYAEEQKWKSVDKVRRGMREKGLKKEVGRSGIEIAGYVNCFVSRDQEHPHSSEIYDVIDGLAKDMRGDSFLTTLPTVTPSLELDE

SEQ ID NO: 95684 - protein, 672 aa, Arabidopsis thaliana
  peptide (1)..(672): Ceres Seq. ID no. 12730010
  misc_feature (1)..(647): Homolog of NCBI NO: 38344148 NR Description: OSJNBa0041A02.15 [Oryza sativa (japonica
  misc_feature (1)..(672): Homolog of NCBI NO: 30694644 NR Description: pentatricopeptide (PPR) repeat-containing protein
  misc_feature (1)..(672): Homolog of NCBI NO: 30794008 NR Description: unknown protein [Arabidopsis thaliana]
  misc_feature (1)..(672): Homolog of NCBI NO: 11281371 NR Description: hypothetical protein T8H10.30 - Arabidopsis >gi|6706414|emb|CAB66100.1| putative protein [Arabidopsis
  misc_feature (1)..(658): Homolog of NCBI NO: 15233590 NR Description: putative protein; protein id: At4g21300.1
  misc_feature (1)..(652): Homolog of NCBI NO: 15229419 NR Description: putative protein; protein id: At3g63370.1
  misc_feature (1)..(653): Homolog of NCBI NO: 34903762 NR Description: unnamed protein product [Oryza sativa (japonica group)] >gi|7340873|dbj|BAA92963.1| unnamed protein product
  misc_feature (1)..(653): Homolog of NCBI NO: 34897084 NR Description: hypothetical protein [Oryza sativa (japonica group)] >gi|12957718|gb|AAK09236.1| hypothetical protein [Oryza
  misc_feature (1)..(641): Homolog of NCBI NO: 15234006 NR Description: putative protein; protein id: At4g18750.1
  misc_feature (1)..(653): Homolog of NCBI NO: 38606535 NR Description: OSJNBa0016O02.23 [Oryza sativa (japonica
MNMYVSCLNAPDCFEYDVVRKVFDNMRRKNVVAWNTLISWYVKTGRNAEACRQFGIMMRMEVKPSPVSFVNVFPAVSISRSIKKANVFYGLMLKLGDEYVKDLFVVSSAISMYAELGDIESSRRVFDSCVERNIEVWNTMIGVYVQNDCLVESIELFLEAIGSKEIVSDEVTYLLAASAVSALQQVELGRQFHGFVSKNFRELPIVIVNSLMVMYSRCGSVHKSFGVFLSMRERDVVSWNTMISAFVQNGLDDEGLMLVYEMQKQGFKIDYITVTALLSAASNLRNKEIGKQTHAFLIRQGIQFEGMNSYLIDMYSKSGLIRISQKLFEGSGYAERDQATWNSMISGYTQNGHTEKTFLVFRKMLEQNIRPNAVTVASILPACSQIGSVDLGKQLHGFSIRQYLDQNVFVASALVDMYSKAGAIKYAEDMFSQTKERNSVTYTTMILGYGQHGMGERAISLFLSMQESGIKPDAITFVAVLSACSYSGLIDEGLKIFEEMREVYNIQPSSEHYCCITDMLGRVGRVNEAYEFVKGLGEEGNIAELWGSLLGSCKLHGELELAETVSERLAKFDKGKNFSGYEVLLSNMYAEEQKWKSVDKVRRGMREKGLKKEVGRSGIEIAGYVNCFVSRDQEHPHSSEIYDVIDGLAKDMRGDSFLTTLPTVTPSLELDE

SEQ ID NO: 95685 - DNA, 1386 bp, Arabidopsis thaliana
  misc_feature (1)..(1386): Ceres Seq. ID no. 12730024
  misc_feature: MA Experiment ID: 20000171 Result: Up-regulated in Transcription
  misc_feature: MA Experiment 20000171 PARAMETER Experiment Name: At_42deg_Heat_P Parameter: Age (day) Value: 14
  misc_feature: MA Experiment 20000171 PARAMETER Experiment Name: At_42deg_Heat_P Parameter: Organism Value: A. thaliana
  misc_feature: MA Experiment 20000171 PARAMETER Experiment Name: At_42deg_Heat_P Parameter: Plant Line Value: WS
  misc_feature: MA Experiment 20000171 PARAMETER Experiment Name: At_42deg_Heat_P Parameter: Temperature (deg C) Value: 42 vs. 22
  misc_feature: MA Experiment 20000171 PARAMETER Experiment Name: At_42deg_Heat_P Parameter: Timepoint (hr) Value: 1
  misc_feature: MA Experiment 20000171 PARAMETER Experiment Name: At_42deg_Heat_P Parameter: Tissue Value: Aerial
  misc_feature: MA Experiment ID: 20000173 Result: Up-regulated in Transcription
  misc_feature: MA Experiment 20000173 PARAMETER Experiment Name: At_42deg_Heat_P Parameter: Age (day) Value: 14
  misc_feature: MA Experiment 20000173 PARAMETER Experiment Name: At_42deg_Heat_P Parameter: Organism Value: A. thaliana
  misc_feature: MA Experiment 20000173 PARAMETER Experiment Name: At_42deg_Heat_P Parameter: Plant Line Value: WS
  misc_feature: MA Experiment 20000173 PARAMETER Experiment Name: At_42deg_Heat_P Parameter: Temperature (deg C) Value: 42 vs. 22
  misc_feature: MA Experiment 20000173 PARAMETER Experiment Name: At_42deg_Heat_P Parameter: Timepoint (hr) Value: 6
  misc_feature: MA Experiment 20000173 PARAMETER Experiment Name: At_42deg_Heat_P Parameter: Tissue Value: Aerial
  misc_feature: MA Experiment ID: 20000451 Result: Down-regulated in Transcription
  misc_feature: MA Experiment 20000451 PARAMETER Experiment Name: At_CS6879_Shoots-Roots_P Parameter: Age (day) Value: 14
  misc_feature: MA Experiment 20000451 PARAMETER Experiment Name: At_CS6879_Shoots-Roots_P Parameter: Organism Value: A. thaliana
  misc_feature: MA Experiment 20000451 PARAMETER Experiment Name: At_CS6879_Shoots-Roots_P Parameter: Plant Line Value: CS6879 vs. WS
  misc_feature: MA Experiment 20000451 PARAMETER Experiment Name: At_CS6879_Shoots-Roots_P Parameter: Tissue Value: Roots
atgaaagtaacacaaaagccaaagataatattcatcccttatccggcgcaaggccacgtcactccgatgcttcaccttgcatcggctttcctcagccgtggattctcccctgtcgttatgactcccgagtctatccaccgtaggatctcggctactaacgaggatcttgggatcacgttcttggccttatctgacggtcaagatcgtccggacgcacctccctcggacttcttctcgatagagaactcaatggagaacatcatgccaccacagctcgaacggctcctactagaagaagacttggatgtggcttgtgttgtggttgatttgctggcttcgtgggctataggagtggctgatcggtgtggagttccggtcgccggattctggccggtgatgttcgctgcttaccgtttgatccaagcaataccggagctagtccgaacaggcttagtttcccaaaaaggttgtcctcgtcaactagaaaaaacaatagtccagccagagcaaccgctcctatccgcagaagatctaccgtggctgatcggaactcccaaagctcagaaaaaacgattcaagttctggcaaagaactctagaacgaacaaaaagtctccgttggatcttgacaagctcctttaaagatgaatatgaagatgtcgacaaccacaaagcatcctacaaaaaatctaacgatttaaacaaagaaaacaatggtcaaaaccctcaaatccttcatttaggtccattgcataaccaagaagcaacaaataatataactataaccaagactagtttttgggaagaagacatgtcttgtctaggttggcttcaagaacaaaacccgaactcagtcatttatatctcatttggaagttgggtttctcctataggagaatcaaatattcaaacgttggcattggcgttggaagcgtcagggagacctttcctttgggcgttaaaccgagtgtggcaagagggactaccaccaggttttgtgcatagagtcacaattaccaaaaaccaaggaaggatcgtctcatgggctccgcaacttgaagttcttagaaacgattctgtgggatgttacgtgactcattgtggctggaactcgactatggaggcagtggcaagttcccggaggctactatgttatccggtggccggagaccagtttgttaactgtaaatacatcgtggacgtttggaagattggagtgagattgagcgggtttggagagaaggaggttgaagatggactaaggaaagtaatggaggatcaagatatgggtgagagattgaggaagttaagagacagagcaatggggaatgaagctcgtttgagttcggaaatgaattttacatttttaaaaaacgagcttaattag

SEQ ID NO: 95686 - protein, 461 aa, Arabidopsis thaliana
  peptide (1)..(461): Ceres Seq. ID no. 12730025
  misc_feature (7)..(457): Pfam Name: UDP-glucoronosyl and UDP-glucosyl transferase Pfam Description: UDP-glucoronosyl and UDP-glucosyl transferase
  misc_feature (1)..(461): Homolog of NCBI NO: 15233322 NR Description: hypothetical protein; protein id: At3g22250.1
  misc_feature (64)..(250): Homolog of NCBI NO: 38344431 NR Description: OSJNBa0038O10.3 [Oryza sativa (japonica
  misc_feature (265)..(460): Homolog of NCBI NO: 38344431 NR Description: OSJNBa0038O10.3 [Oryza sativa (japonica
  misc_feature (3)..(50): Homolog of NCBI NO: 38344431 NR Description: OSJNBa0038O10.3 [Oryza sativa (japonica
  misc_feature (58)..(436): Homolog of NCBI NO: 37532896 NR Description: putative glucosyltransferase [Oryza sativa
  misc_feature (6)..(51): Homolog of NCBI NO: 37532896 NR Description: putative glucosyltransferase [Oryza sativa
  misc_feature (7)..(215): Homolog of NCBI NO: 21326124 NR Description: putative glucosyl transferase [Sorghum bicolor]
  misc_feature (242)..(453): Homolog of NCBI NO: 21326124 NR Description: putative glucosyl transferase [Sorghum bicolor]
  misc_feature (6)..(215): Homolog of NCBI NO: 13236653 NR Description: putative glucosyltransferase [Oryza sativa]
  misc_feature (242)..(440): Homolog of NCBI NO: 13236653 NR Description: putative glucosyltransferase [Oryza sativa]
MKVTQKPKIIFIPYPAQGHVTPMLHLASAFLSRGFSPVVMTPESIHRRISATNEDLGITFLALSDGQDRPDAPPSDFFSIENSMENIMPPQLERLLLEEDLDVACVVVDLLASWAIGVADRCGVPVAGFWPVMFAAYRLIQAIPELVRTGLVSQKGCPRQLEKTIVQPEQPLLSAEDLPWLIGTPKAQKKRFKFWQRTLERTKSLRWILTSSFKDEYEDVDNHKASYKKSNDLNKENNGQNPQILHLGPLHNQEATNNITITKTSFWEEDMSCLGWLQEQNPNSVIYISFGSWVSPIGESNIQTLALALEASGRPFLWALNRVWQEGLPPGFVHRVTITKNQGRIVSWAPQLEVLRNDSVGCYVTHCGWNSTMEAVASSRRLLCYPVAGDQFVNCKYIVDVWKIGVRLSGFGEKEVEDGLRKVMEDQDMGERLRKLRDRAMGNEARLSSEMNFTFLKNELN

SEQ ID NO: 95687 - protein, 439 aa, Arabidopsis thaliana
  peptide (1)..(439): Ceres Seq. ID no. 12730026
  misc_feature (1)..(435): Pfam Name: UDP-glucoronosyl and UDP-glucosyl transferase Pfam Description: UDP-glucoronosyl and UDP-glucosyl transferase
  misc_feature (1)..(439): Homolog of NCBI NO: 15233322 NR Description: hypothetical protein; protein id: At3g22250.1
  misc_feature (42)..(228): Homolog of NCBI NO: 38344431 NR Description: OSJNBa0038O10.3 [Oryza sativa (japonica
  misc_feature (243)..(438): Homolog of NCBI NO: 38344431 NR Description: OSJNBa0038O10.3 [Oryza sativa (japonica
  misc_feature (1)..(28): Homolog of NCBI NO: 38344431 NR Description: OSJNBa0038O10.3 [Oryza sativa (japonica
  misc_feature (36)..(414): Homolog of NCBI NO: 37532896 NR Description: putative glucosyltransferase [Oryza sativa
  misc_feature (1)..(29): Homolog of NCBI NO: 37532896 NR Description: putative glucosyltransferase [Oryza sativa
  misc_feature (1)..(193): Homolog of NCBI NO: 21326124 NR Description: putative glucosyl transferase [Sorghum bicolor]
  misc_feature (220)..(431): Homolog of NCBI NO: 21326124 NR Description: putative glucosyl transferase [Sorghum bicolor]
  misc_feature (1)..(193): Homolog of NCBI NO: 13236653 NR Description: putative glucosyltransferase [Oryza sativa]
  misc_feature (220)..(418): Homolog of NCBI NO: 13236653 NR Description: putative glucosyltransferase [Oryza sativa]
MLHLASAFLSRGFSPVVMTPESIHRRISATNEDLGITFLALSDGQDRPDAPPSDFFSIENSMENIMPPQLERLLLEEDLDVACVVVDLLASWAIGVADRCGVPVAGFWPVMFAAYRLIQAIPELVRTGLVSQKGCPRQLEKTIVQPEQPLLSAEDLPWLIGTPKAQKKRFKFWQRTLERTKSLRWILTSSFKDEYEDVDNHKASYKKSNDLNKENNGQNPQILHLGPLHNQEATNNITITKTSFWEEDMSCLGWLQEQNPNSVIYISFGSWVSPIGESNIQTLALALEASGRPFLWALNRVWQEGLPPGFVHRVTITKNQGRIVSWAPQLEVLRNDSVGCYVTHCGWNSTMEAVASSRRLLCYPVAGDQFVNCKYIVDVWKIGVRLSGFGEKEVEDGLRKVMEDQDMGERLRKLRDRAMGNEARLSSEMNFTFLKNELN

SEQ ID NO: 95688 - protein, 422 aa, Arabidopsis thaliana
  peptide (1)..(422): Ceres Seq. ID no. 12730027
  misc_feature (1)..(418): Pfam Name: UDP-glucoronosyl and UDP-glucosyl transferase Pfam Description: UDP-glucoronosyl and UDP-glucosyl transferase
  misc_feature (1)..(422): Homolog of NCBI NO: 15233322 NR Description: hypothetical protein; protein id: At3g22250.1
  misc_feature (25)..(211): Homolog of NCBI NO: 38344431 NR Description: OSJNBa0038O10.3 [Oryza sativa (japonica
  misc_feature (226)..(421): Homolog of NCBI NO: 38344431 NR Description: OSJNBa0038O10.3 [Oryza sativa (japonica
  misc_feature (1)..(11): Homolog of NCBI NO: 38344431 NR Description: OSJNBa0038O10.3 [Oryza sativa (japonica
  misc_feature (19)..(397): Homolog of NCBI NO: 37532896 NR Description: putative glucosyltransferase [Oryza sativa
  misc_feature (1)..(12): Homolog of NCBI NO: 37532896 NR Description: putative glucosyltransferase [Oryza sativa
  misc_feature (1)..(176): Homolog of NCBI NO: 21326124 NR Description: putative glucosyl transferase [Sorghum bicolor]
  misc_feature (203)..(414): Homolog of NCBI NO: 21326124 NR Description: putative glucosyl transferase [Sorghum bicolor]
  misc_feature (1)..(176): Homolog of NCBI NO: 13236653 NR Description: putative glucosyltransferase [Oryza sativa]
  misc_feature (203)..(401): Homolog of NCBI NO: 13236653 NR Description: putative glucosyltransferase [Oryza sativa]
MTPESIHRRISATNEDLGITFLALSDGQDRPDAPPSDFFSIENSMENIMPPQLERLLLEEDLDVACVVVDLLASWAIGVADRCGVPVAGFWPVMFAAYRLIQAIPELVRTGLVSQKGCPRQLEKTIVQPEQPLLSAEDLPWLIGTPKAQKKRFKFWQRTLERTKSLRWILTSSFKDEYEDVDNHKASYKKSNDLNKENNGQNPQILHLGPLHNQEATNNITITKTSFWEEDMSCLGWLQEQNPNSVIYISFGSWVSPIGESNIQTLALALEASGRPFLWALNRVWQEGLPPGFVHRVTITKNQGRIVSWAPQLEVLRNDSVGCYVTHCGWNSTMEAVASSRRLLCYPVAGDQFVNCKYIVDVWKIGVRLSGFGEKEVEDGLRKVMEDQDMGERLRKLRDRAMGNEARLSSEMNFTFLKNELN

SEQ ID NO: 95689 - DNA, 2140 bp, Arabidopsis thaliana
  misc_feature (1)..(2140): Ceres Seq. ID no. 12730035
  misc_feature: MA Experiment ID: 20000180 Result: Down-regulated in Transcription
  misc_feature: MA Experiment 20000180 PARAMETER Experiment Name: At_Germinating_Seeds_P Parameter: Age (hr) Value: 24 vs. 0
  misc_feature: MA Experiment 20000180 PARAMETER Experiment Name: At_Germinating_Seeds_P Parameter: Tissue Value: Germinating Seeds
  misc_feature: MA Experiment ID: 20000227 Result: Up-regulated in Transcription
  misc_feature: MA Experiment 20000227 PARAMETER Experiment Name: At_Root-Tips-vs-Tops_P Parameter: Tissue Value: Root Tips vs. Root Tops
  misc_feature: MA Experiment ID: 20000286 Result: Up-regulated in Transcription
  misc_feature: MA Experiment 20000286 PARAMETER Experiment Name: At_Open_Flower_P Parameter: Age (day) Value: 21
  misc_feature: MA Experiment 20000286 PARAMETER Experiment Name: At_Open_Flower_P Parameter: Plant Line Value: WS
  misc_feature: MA Experiment 20000286 PARAMETER Experiment Name: At_Open_Flower_P Parameter: Tissue Value: Half Open vs. Whole Plant
  misc_feature: MA Experiment ID: 20000456 Result: Up-regulated in Transcription
  misc_feature: MA Experiment 20000456 PARAMETER Experiment Name: At_100uM_BA_P Parameter: Age (day) Value: 14
  misc_feature: MA Experiment 20000456 PARAMETER Experiment Name: At_100uM_BA_P Parameter: Organism Value: A. thaliana
  misc_feature: MA Experiment 20000456 PARAMETER Experiment Name: At_100uM_BA_P Parameter: Plant Line Value: WS
  misc_feature: MA Experiment 20000456 PARAMETER Experiment Name: At_100uM_BA_P Parameter: Timepoint (hr) Value: 6
  misc_feature: MA Experiment 20000456 PARAMETER Experiment Name: At_100uM_BA_P Parameter: Tissue Value: Aerial
  misc_feature: MA Experiment 20000456 PARAMETER Experiment Name: At_100uM_BA_P Parameter: Treatment Value: 100uM BA vs. No Treatment
  misc_feature: MA Experiment ID: 20000495 Result: Down-regulated in Transcription
  misc_feature: MA Experiment 20000495 PARAMETER Experiment Name: At_Guard_Cells_P Parameter: Harvest Date Value: 8/2/2002
  misc_feature: MA Experiment 20000495 PARAMETER Experiment Name: At_Guard_Cells_P Parameter: Organism Value: A. thaliana
  misc_feature: MA Experiment 20000495 PARAMETER Experiment Name: At_Guard_Cells_P Parameter: Tissue Value: Guard Cells vs. Leaves
  misc_feature: MA Experiment ID: 20000496 Result: Down-regulated in Transcription
  misc_feature: MA Experiment 20000496 PARAMETER Experiment Name: At_Guard_Cells_P Parameter: Harvest Date Value: 7/19/2002
  misc_feature: MA Experiment 20000496 PARAMETER Experiment Name: At_Guard_Cells_P Parameter: Organism Value: Canola
  misc_feature: MA Experiment 20000496 PARAMETER Experiment Name: At_Guard_Cells_P Parameter: Tissue Value: Guard Cells vs. Leaves
  misc_feature: MA Experiment ID: 20001451 Result: Down-regulated in Transcription
  misc_feature: MA Experiment 20001451 PARAMETER Experiment Name: At_Far-red-induction_P Parameter: Age (day) Value: 7
  misc_feature: MA Experiment 20001451 PARAMETER Experiment Name: At_Far-red-induction_P Parameter: Light Value: Far-red vs. White
  misc_feature: MA Experiment 20001451 PARAMETER Experiment Name: At_Far-red-induction_P Parameter: Organism Value: A. thaliana
  misc_feature: MA Experiment 20001451 PARAMETER Experiment Name: At_Far-red-induction_P Parameter: Plant Line Value: Columbia
  misc_feature: MA Experiment 20001451 PARAMETER Experiment Name: At_Far-red-induction_P Parameter: Timepoint (hr) Value: 24
  misc_feature: MA Experiment 20001451 PARAMETER Experiment Name: At_Far-red-induction_P Parameter: Tissue Value: Whole Plant
  misc_feature: MA Experiment ID: 20001458 Result: Up-regulated in Transcription
  misc_feature: MA Experiment 20001458 PARAMETER Experiment Name: At_50mM_NH4NO3_L-to-H_P Parameter: Age (day) Value: Undefined
  misc_feature: MA Experiment 20001458 PARAMETER Experiment Name: At_50mM_NH4NO3_L-to-H_P Parameter: Organism Value: Undefined
  misc_feature: MA Experiment 20001458 PARAMETER Experiment Name: At_50mM_NH4NO3_L-to-H_P Parameter: Plant Line Value: Undefined
  misc_feature: MA Experiment 20001458 PARAMETER Experiment Name: At_50mM_NH4NO3_L-to-H_P Parameter: Timepoint (hr) Value: 2
  misc_feature: MA Experiment 20001458 PARAMETER Experiment Name: At_50mM_NH4NO3_L-to-H_P Parameter: Tissue Value: Siliques
  misc_feature: MA Experiment 20001458 PARAMETER Experiment Name: At_50mM_NH4NO3_L-to-H_P Parameter: Treatment Value: 50mM NH4NO3 vs. 100mM Manitol
  misc_feature: MA Experiment ID: 20001558 Result: Up-regulated in Transcription
  misc_feature: MA Experiment 20001558 PARAMETER Experiment Name: At_Drought_Soil_Dry_P Parameter: Age (day) Value: 27
  misc_feature: MA Experiment 20001558 PARAMETER Experiment Name: At_Drought_Soil_Dry_P Parameter: Organism Value: A. thaliana
  misc_feature: MA Experiment 20001558 PARAMETER Experiment Name: At_Drought_Soil_Dry_P Parameter: Plant Line Value: WS
  misc_feature: MA Experiment 20001558 PARAMETER Experiment Name: At_Drought_Soil_Dry_P Parameter: Post Timepoint (hr) Value: 6
  misc_feature: MA Experiment 20001558 PARAMETER Experiment Name: At_Drought_Soil_Dry_P Parameter: Post-Treatment Value: Re-Water vs. No Drought
  misc_feature: MA Experiment 20001558 PARAMETER Experiment Name: At_Drought_Soil_Dry_P Parameter: Timepoint (day) Value: 13
  misc_feature: MA Experiment 20001558 PARAMETER Experiment Name: At_Drought_Soil_Dry_P Parameter: Treatment Value: Drought vs. No Drought
  misc_feature: MA Experiment ID: 20001757 Result: Up-regulated in Transcription
  misc_feature: MA Experiment 20001757 PARAMETER Experiment Name: At_50mM_NH4NO3_L-to-H_P Parameter: Timepoint (hr) Value: 6
  misc_feature: MA Experiment 20001757 PARAMETER Experiment Name: At_50mM_NH4NO3_L-to-H_P Parameter: Tissue Value: Leaf
  misc_feature: MA Experiment 20001757 PARAMETER Experiment Name: At_50mM_NH4NO3_L-to-H_P Parameter: Treatment Value: 50mM NH4NO3 vs 100mM Mannitol
aaacccttttgccgtctccctaaaaccctaattctcatttctggggtttcacatttcatcttcaccagaatccatcacactctctgaaatctgaaaatgattagcacagtacttcgccgatctatccttggtacgtcaaggcgtactctcgccgcttcggtgacctccattaacgcagctctatttcataaccttgctccagccgccgccacagtctccgatctagcaaatggagctactaatgtcaagtctctcccttcgaattcgagcccttttggtgttaaagtgagagactttcatgttaaatctgtaccgtcggagtttagatcgtcgattgtttcttctgcgggattcgcggctcaagagtatgctccttcttatgagaacgatggagggattggagattcggagagtgttggtagcagcggtggtggtgatgggcttgcgatagctgatcttggtatatctccggagattgttaaagctttgaagggtaggggtattgagaaactctttcctattcagaaagctgtgttggagccagcgatggagggtcgtgatatgattggccgtgcaaggactggaacgggaaagacacttgcttttgggattcctattattgacaaaatcatcaaattcaacgctaaacatggtcgtgggaagaatcctcagtgcttggttttggcaccgacgagggagcttgctcgtcaggttgagaaagagttcagggaatctgctccaagtttggatactatttgtctctatggaggtacaccaatcgggcaacaaatgagggagctgaactatggtattgatgtggcggttggaactcctggtcgtatcattgatctgatgaaaaggggagctttgaatctatcagaggttcagtttgtggttcttgatgaagctgatcagatgcttcaagttggatttgcggaagatgttgaaataatattgcagaagttgccagcgaagcgtcagagtatgatgttttctgcaacaatgccaagttggatcagatctctcaccaagaagtacctgaacaatcctttgacaattgatcttgttggagattcagatcagaaacttgcagatgggattactatgtattctatcgctgcagattcttatggaagagcatccatcattggtcctcttgtaaaggaacatggcaaaggaggaaaatgcattgtctttacccaaacaaaacgtgatgcagatcgccttgcatttggattggcaaaaagctataaatgtgaagctttacacggtgacatatctcaagctcagagagaaagaacacttgctggtttcagggatgggaatttcagtattcttgttgcaactgatgttgctgcccgtggacttgatgtacctaatgtcgatttagtaattcattatgagcttcctaataacacggagacgtttgttcaccgaacggggcgaactggtcgtgctggaaagaaaggaagcgcgattctcatccacggtcaagatcaaaccagggctgttaaaatgattgagaaagaagtcggaagcagattcaatgagctgcctagcattgctgtggaaagaggaagcgcaagcatgtttgaaggagtaggtgctagatctggtgggtcgttcggaggaggtcgatcaggcggtggtgggtatggtagttacggtagcagcagtggccgttcaggtggtggtagttatggaggttatggtggcagcagtggccgttcaggtggtggtggtggtagttatggaggttcagggggatcaagcagccgttactctggtggttcagaccgctcatctggtttcggaagctttggttcaggcggttcttcaggaggatttggttcagaccgttcttctcagtcaagtggaaggagcagctttggtgggtttggatcaaacgatggtaaaagatcttactgagagaagtgttgtgttggttttgacccgactcagcaataatggagttgacttaggagagaactcggtatctcgagttgagtagtttacaaggagtcgagctatatataaattctgtagctacttcttgtctcataaaccaacataagttatatcattatttcatatcctctaattcatttttatttctcaatttgagtgaaatgtgtttccc

SEQ ID NO: 95690 - protein, 610 aa, Arabidopsis thaliana
  peptide (1)..(610): Ceres Seq. ID no. 12730036
  misc_feature (129)..(338): Pfam Name: DEAD/DEAH box helicase Pfam Description: DEAD/DEAH box helicase
  misc_feature (1)..(609): Homolog of NCBI NO: 22331253 NR Description: putative RNA helicase; protein id: At3g22330.1, by cDNA: gi_17064851, supported by cDNA: gi_20259815 [Arabidopsis
  misc_feature (248)..(610): Homolog of NCBI NO: 11358813 NR Description: RNA helicase RH9 [imported] - Arabidopsis (fragment) >gi|3775995|emb|CAA09200.1| RNA helicase [Arabidopsis
  misc_feature (135)..(598): Homolog of NCBI NO: 34899624 NR Description: putative RNA helicase [Oryza sativa (japonica
  misc_feature (63)..(483): Homolog of NCBI NO: 30690260 NR Description: DEAD box RNA helicase (RH3) [Arabidopsis >gi|20856975|gb|AAM26693.1| At5g26743 [Arabidopsis thaliana]
  misc_feature (471)..(600): Homolog of NCBI NO: 30690260 NR Description: DEAD box RNA helicase (RH3) [Arabidopsis >gi|20856975|gb|AAM26693.1| At5g26743 [Arabidopsis thaliana]
  misc_feature (63)..(483): Homolog of NCBI NO: 19347898 NR Description: unknown protein [Arabidopsis thaliana] unknown protein [Arabidopsis thaliana] At5g26752 [Arabidopsis thaliana] >gi|21689779|gb|AAM67533.1|
  misc_feature (471)..(600): Homolog of NCBI NO: 19347898 NR Description: unknown protein [Arabidopsis thaliana] unknown protein [Arabidopsis thaliana] At5g26752 [Arabidopsis thaliana] >gi|21689779|gb|AAM67533.1|
  misc_feature (63)..(483): Homolog of NCBI NO: 22135801 NR Description: At5g26740 [Arabidopsis thaliana]
  misc_feature (471)..(600): Homolog of NCBI NO: 22135801 NR Description: At5g26740 [Arabidopsis thaliana]
  misc_feature (63)..(483): Homolog of NCBI NO: 11358808 NR Description: RNA helicase RH3 [imported] - Arabidopsis
MISTVLRRSILGTSRRTLAASVTSINAALFHNLAPAAATVSDLANGATNVKSLPSNSSPFGVKVRDFHVKSVPSEFRSSIVSSAGFAAQEYAPSYENDGGIGDSESVGSSGGGDGLAIADLGISPEIVKALKGRGIEKLFPIQKAVLEPAMEGRDMIGRARTGTGKTLAFGIPIIDKIIKFNAKHGRGKNPQCLVLAPTRELARQVEKEFRESAPSLDTICLYGGTPIGQQMRELNYGIDVAVGTPGRIIDLMKRGALNLSEVQFVVLDEADQMLQVGFAEDVEIILQKLPAKRQSMMFSATMPSWIRSLTKKYLNNPLTIDLVGDSDQKLADGITMYSIAADSYGRASIIGPLVKEHGKGGKCIVFTQTKRDADRLAFGLAKSYKCEALHGDISQAQRERTLAGFRDGNFSILVATDVAARGLDVPNVDLVIHYELPNNTETFVHRTGRTGRAGKKGSAILIHGQDQTRAVKMIEKEVGSRFNELPSIAVERGSASMFEGVGARSGGSFGGGRSGGGGYGSYGSSSGRSGGGSYGGYGGSSGRSGGGGGSYGGSGGSSSRYSGGSDRSSGFGSFGSGGSSGGFGSDRSSQSSGRSSFGGFGSNDGKRSY

SEQ ID NO: 95691 - protein, 460 aa, Arabidopsis thaliana
  peptide (1)..(460): Ceres Seq. ID no. 12730037
  misc_feature (1)..(188): Pfam Name: DEAD/DEAH box helicase Pfam Description: DEAD/DEAH box helicase
  misc_feature (1)..(459): Homolog of NCBI NO: 22331253 NR Description: putative RNA helicase; protein id: At3g22330.1, by cDNA: gi_17064851, supported by cDNA: gi_20259815 [Arabidopsis
  misc_feature (98)..(460): Homolog of NCBI NO: 11358813 NR Description: RNA helicase RH9 [imported] - Arabidopsis (fragment) >gi|3775995|emb|CAA09200.1| RNA helicase [Arabidopsis
  misc_feature (1)..(448): Homolog of NCBI NO: 34899624 NR Description: putative RNA helicase [Oryza sativa (japonica
  misc_feature (1)..(333): Homolog of NCBI NO: 30690260 NR Description: DEAD box RNA helicase (RH3) [Arabidopsis >gi|20856975|gb|AAM26693.1| At5g26743 [Arabidopsis thaliana]
  misc_feature (321)..(450): Homolog of NCBI NO: 30690260 NR Description: DEAD box RNA helicase (RH3) [Arabidopsis >gi|20856975|gb|AAM26693.1| At5g26743 [Arabidopsis thaliana]
  misc_feature (1)..(333): Homolog of NCBI NO: 19347898 NR Description: unknown protein [Arabidopsis thaliana] unknown protein [Arabidopsis thaliana] At5g26752 [Arabidopsis thaliana] >gi|21689779|gb|AAM67533.1|
  misc_feature (321)..(450): Homolog of NCBI NO: 19347898 NR Description: unknown protein [Arabidopsis thaliana] unknown protein [Arabidopsis thaliana] At5g26752 [Arabidopsis thaliana] >gi|21689779|gb|AAM67533.1|
  misc_feature (1)..(333): Homolog of NCBI NO: 22135801 NR Description: At5g26740 [Arabidopsis thaliana]
  misc_feature (321)..(450): Homolog of NCBI NO: 22135801 NR Description: At5g26740 [Arabidopsis thaliana]
  misc_feature (1)..(333): Homolog of NCBI NO: 11358808 NR Description: RNA helicase RH3 [imported] - Arabidopsis
MEGRDMIGRARTGTGKTLAFGIPIIDKIIKFNAKHGRGKNPQCLVLAPTRELARQVEKEFRESAPSLDTICLYGGTPIGQQMRELNYGIDVAVGTPGRIIDLMKRGALNLSEVQFVVLDEADQMLQVGFAEDVEIILQKLPAKRQSMMFSATMPSWIRSLTKKYLNNPLTIDLVGDSDQKLADGITMYSIAADSYGRASIIGPLVKEHGKGGKCIVFTQTKRDADRLAFGLAKSYKCEALHGDISQAQRERTLAGFRDGNFSILVATDVAARGLDVPNVDLVIHYELPNNTETFVHRTGRTGRAGKKGSAILIHGQDQTRAVKMIEKEVGSRFNELPSIAVERGSASMFEGVGARSGGSFGGGRSGGGGYGSYGSSSGRSGGGSYGGYGGSSGRSGGGGGSYGGSGGSSSRYSGGSDRSSGFGSFGSGGSSGGFGSDRSSQSSGRSSFGGFGSNDGKRSY

SEQ ID NO: 95692 - protein, 455 aa, Arabidopsis thaliana
  peptide (1)..(455): Ceres Seq. ID no. 12730038
  misc_feature (1)..(183): Pfam Name: DEAD/DEAH box helicase Pfam Description: DEAD/DEAH box helicase
  misc_feature (1)..(454): Homolog of NCBI NO: 22331253 NR Description: putative RNA helicase; protein id: At3g22330.1, by cDNA: gi_17064851, supported by cDNA: gi_20259815 [Arabidopsis
  misc_feature (93)..(455): Homolog of NCBI NO: 11358813 NR Description: RNA helicase RH9 [imported] - Arabidopsis (fragment) >gi|3775995|emb|CAA09200.1| RNA helicase [Arabidopsis
  misc_feature (1)..(443): Homolog of NCBI NO: 34899624 NR Description: putative RNA helicase [Oryza sativa (japonica
  misc_feature (1)..(328): Homolog of NCBI NO: 30690260 NR Description: DEAD box RNA helicase (RH3) [Arabidopsis >gi|20856975|gb|AAM26693.1| At5g26743 [Arabidopsis thaliana]
  misc_feature (316)..(445): Homolog of NCBI NO: 30690260 NR Description: DEAD box RNA helicase (RH3) [Arabidopsis >gi|20856975|gb|AAM26693.1| At5g26743 [Arabidopsis thaliana]
  misc_feature (1)..(328): Homolog of NCBI NO: 19347898 NR Description: unknown protein [Arabidopsis thaliana] unknown protein [Arabidopsis thaliana] At5g26752 [Arabidopsis thaliana] >gi|21689779|gb|AAM67533.1|
  misc_feature (316)..(445): Homolog of NCBI NO: 19347898 NR Description: unknown protein [Arabidopsis thaliana] unknown protein [Arabidopsis thaliana] At5g26752 [Arabidopsis thaliana] >gi|21689779|gb|AAM67533.1|
  misc_feature (1)..(328): Homolog of NCBI NO: 22135801 NR Description: At5g26740 [Arabidopsis thaliana]
  misc_feature (316)..(445): Homolog of NCBI NO: 22135801 NR Description: At5g26740 [Arabidopsis thaliana]
  misc_feature (1)..(328): Homolog of NCBI NO: 11358808 NR Description: RNA helicase RH3 [imported] - Arabidopsis
MIGRARTGTGKTLAFGIPIIDKIIKFNAKHGRGKNPQCLVLAPTRELARQVEKEFRESAPSLDTICLYGGTPIGQQMRELNYGIDVAVGTPGRIIDLMKRGALNLSEVQFVVLDEADQMLQVGFAEDVEIILQKLPAKRQSMMFSATMPSWIRSLTKKYLNNPLTIDLVGDSDQKLADGITMYSIAADSYGRASIIGPLVKEHGKGGKCIVFTQTKRDADRLAFGLAKSYKCEALHGDISQAQRERTLAGFRDGNFSILVATDVAARGLDVPNVDLVIHYELPNNTETFVHRTGRTGRAGKKGSAILIHGQDQTRAVKMIEKEVGSRFNELPSIAVERGSASMFEGVGARSGGSFGGGRSGGGGYGSYGSSSGRSGGGSYGGYGGSSGRSGGGGGSYGGSGGSSSRYSGGSDRSSGFGSFGSGGSSGGFGSDRSSQSSGRSSFGGFGSNDGKRSY

SEQ ID NO: 95693 - DNA, 2052 bp, Arabidopsis thaliana
  misc_feature (1)..(2052): Ceres Seq. ID no. 12730039
  misc_feature: MA Experiment ID: 20000180 Result: Down-regulated in Transcription
  misc_feature: MA Experiment 20000180 PARAMETER Experiment Name: At_Germinating_Seeds_P Parameter: Age (hr) Value: 24 vs. 0
  misc_feature: MA Experiment 20000180 PARAMETER Experiment Name: At_Germinating_Seeds_P Parameter: Tissue Value: Germinating Seeds
  misc_feature: MA Experiment ID: 20000495 Result: Down-regulated in Transcription
  misc_feature: MA Experiment 20000495 PARAMETER Experiment Name: At_Guard_Cells_P Parameter: Harvest Date Value: 8/2/2002
  misc_feature: MA Experiment 20000495 PARAMETER Experiment Name: At_Guard_Cells_P Parameter: Organism Value: A. thaliana
  misc_feature: MA Experiment 20000495 PARAMETER Experiment Name: At_Guard_Cells_P Parameter: Tissue Value: Guard Cells vs. Leaves
  misc_feature: MA Experiment ID: 20001451 Result: Down-regulated in Transcription
  misc_feature: MA Experiment 20001451 PARAMETER Experiment Name: At_Far-red-induction_P Parameter: Age (day) Value: 7
  misc_feature: MA Experiment 20001451 PARAMETER Experiment Name: At_Far-red-induction_P Parameter: Light Value: Far-red vs. White
  misc_feature: MA Experiment 20001451 PARAMETER Experiment Name: At_Far-red-induction_P Parameter: Organism Value: A. thaliana
  misc_feature: MA Experiment 20001451 PARAMETER Experiment Name: At_Far-red-induction_P Parameter: Plant Line Value: Columbia
  misc_feature: MA Experiment 20001451 PARAMETER Experiment Name: At_Far-red-induction_P Parameter: Timepoint (hr) Value: 24
  misc_feature: MA Experiment 20001451 PARAMETER Experiment Name: At_Far-red-induction_P Parameter: Tissue Value: Whole Plant
  misc_feature: MA Experiment ID: 20001911 Result: Up-regulated in Transcription
  misc_feature: MA Experiment 20001911 PARAMETER Experiment Name: At_Drought_Reproduction_P Parameter: Age (day) Value: 40
  misc_feature: MA Experiment 20001911 PARAMETER Experiment Name: At_Drought_Reproduction_P Parameter: Organism Value: A. thaliana
  misc_feature: MA Experiment 20001911 PARAMETER Experiment Name: At_Drought_Reproduction_P Parameter: Plant Line Value: WS
  misc_feature: MA Experiment 20001911 PARAMETER Experiment Name: At_Drought_Reproduction_P Parameter: Timepoint (day) Value: 10
  misc_feature: MA Experiment 20001911 PARAMETER Experiment Name: At_Drought_Reproduction_P Parameter: Tissue Value: Flowers
  misc_feature: MA Experiment 20001911 PARAMETER Experiment Name: At_Drought_Reproduction_P Parameter: Treatment Value: Drought vs. No Drought
atcaagagaacacctgaatctgaaaatgatcactacagtgctacgacgatctctccttgatgcgtcgaagaggaatctctccgcttcgttgacctcaatcaatactgttctgtttcacaacctggccccagccgccactagagtctccgacctagccttaattggatcttccgatgtcaaagctgggtttccgtttggtgttgaagcgaaaggaattcattttcaatctgggccgttggattttagagcttcgatggtttctcaagctggatttgcgatctctgagagtagcgagagaagggttggtgattcggagagtgttggtggtgatgggcttgcgatatctgagcttgggatatctccggagattgttaaagctttgagtagtaagggtattgagaaactctttcctattcagaaagctgtgctggagccagcgatggagggtcgagatatgattggtcgtgctaggactggaacgggaaagacacttgcttttgggattcctatcattgacaaaatcatcaaatacaacgctaaacatggacgagggaggaatccgctttgtttggttttggcaccgacaagagagcttgctcgccaggttgagaaggagtttagggagtctgctccgagcttggatactatttgtctttatggaggtacaccgattggacagcaaatgaggcagcttgactatggtgttgatgtggcggttggaactccaggtcgtgtcattgatctgatgaagagaggagctttgaatctatcggaagttcagtttgtggttctggatgaagctgatcagatgcttcaagttggatttgctgaggatgttgaaataatattggaaaagttgcctgagaaacgtcagagtatgatgttttctgcaacaatgccgagttggatcagatctctcactaagaagtacctgaataatcctttgacagttgatcttgttggagattctgatcagaaactagcagatggaattacgacatattctatcatagcagattcttatggaagagcatccattattggtcctcttgtaacggagcatgccaaaggaggaaaatgcattgtttttacacaaacaaaacgagatgctgatcgcctttcatatgcattggctagaagcttcaaatgtgaagctttacacggtgatatatcccagagtcagagggaaagaacgcttgctggtttccgagatgggcatttcaatattcttgttgcgactgatgttgctgcccgtggacttgatgtacctaatgtcgatttgatcattcactatgagcttcctaataacacggagacatttgtccatcgaaccgggcgaacgggtcgggctggaaagaaaggaagtgctattctgatctacagtcaagatcaatccagggctgtaaaaataattgagagagaagttgggagccgattcactgagctccctagcattgctgtggaacgtggaagcgcaagcatgtttgaaggaataggttctcgatccggtggttcctttggaggaggcatgagggatcgtggttcaagctttggtggtcgttcaggcggtggtggttatggtggcagcagtggtggttatggtggtgggcgttcaggcggatcaagcaaccgttattctggtgattctgaccgttctggttttgggagcttcggtatgcgttctcctgagggatatggttcggatcgttcatctcagtcaggtggaaggagcagctttggtggtggtcgttcaggcggatcatcaaacaatcgttcctctggtttcggggactttggctctgaccgttcttctcagtcaggcggaaggagcagctttggtgggtttggatcaaatgatgggaaaagatcttactgagagaagtgtttttggagccgagccggcaataattggtttgaccctaggaggagggaggattcggtgactcgagtagattagttactacggcggatacgaaggagtcaagttatatatataaatctgtagctatgtaaaacaaacatatactttcgaagttatgttatcatcatttc

SEQ ID NO: 95694 - protein, 624 aa, Arabidopsis thaliana
  peptide (1)..(624): Ceres Seq. ID no. 12730040
  misc_feature (125)..(334): Pfam Name: DEAD/DEAH box helicase Pfam Description: DEAD/DEAH box helicase
  misc_feature (9)..(592): Homolog of NCBI NO: 15228722 NR Description: putative RNA helicase; protein id: At3g22310.1,
  misc_feature (55)..(619): Homolog of NCBI NO: 34899624 NR Description: putative RNA helicase [Oryza sativa (japonica
  misc_feature (244)..(592): Homolog of NCBI NO: 11358813 NR Description: RNA helicase RH9 [imported] - Arabidopsis (fragment) >gi|3775995|emb|CAA09200.1| RNA helicase [Arabidopsis
  misc_feature (84)..(479): Homolog of NCBI NO: 19347898 NR Description: unknown protein [Arabidopsis thaliana] unknown protein [Arabidopsis thaliana] At5g26752 [Arabidopsis thaliana] >gi|21689779|gb|AAM67533.1|
  misc_feature (561)..(617): Homolog of NCBI NO: 19347898 NR Description: unknown protein [Arabidopsis thaliana] unknown protein [Arabidopsis thaliana] At5g26752 [Arabidopsis thaliana] >gi|21689779|gb|AAM67533.1|
  misc_feature (84)..(479): Homolog of NCBI NO: 30690260 NR Description: DEAD box RNA helicase (RH3) [Arabidopsis >gi|20856975|gb|AAM26693.1| At5g26743 [Arabidopsis thaliana]
  misc_feature (561)..(617): Homolog of NCBI NO: 30690260 NR Description: DEAD box RNA helicase (RH3) [Arabidopsis >gi|20856975|gb|AAM26693.1| At5g26743 [Arabidopsis thaliana]
  misc_feature (84)..(479): Homolog of NCBI NO: 22135801 NR Description: At5g26740 [Arabidopsis thaliana]
  misc_feature (561)..(617): Homolog of NCBI NO: 22135801 NR Description: At5g26740 [Arabidopsis thaliana]
  misc_feature (88)..(488): Homolog of NCBI NO: 34897326 NR Description: putative RNA helicase [Oryza sativa]
SREHLNLKMITTVLRRSLLDASKRNLSASLTSINTVLFHNLAPAATRVSDLALIGSSDVKAGFPFGVEAKGIHFQSGPLDFRASMVSQAGFAISESSERRVGDSESVGGDGLAISELGISPEIVKALSSKGIEKLFPIQKAVLEPAMEGRDMIGRARTGTGKTLAFGIPIIDKIIKYNAKHGRGRNPLCLVLAPTRELARQVEKEFRESAPSLDTICLYGGTPIGQQMRQLDYGVDVAVGTPGRVIDLMKRGALNLSEVQFVVLDEADQMLQVGFAEDVEIILEKLPEKRQSMMFSATMPSWIRSLTKKYLNNPLTVDLVGDSDQKLADGITTYSIIADSYGRASIIGPLVTEHAKGGKCIVFTQTKRDADRLSYALARSFKCEALHGDISQSQRERTLAGFRDGHFNILVATDVAARGLDVPNVDLIIHYELPNNTETFVHRTGRTGRAGKKGSAILIYSQDQSRAVKIIEREVGSRFTELPSIAVERGSASMFEGIGSRSGGSFGGGMRDRGSSFGGRSGGGGYGGSSGGYGGGRSGGSSNRYSGDSDRSGFGSFGMRSPEGYGSDRSSQSGGRSSFGGGRSGGSSNNRSSGFGDFGSDRSSQSGGRSSFGGFGSNDGKRSY

SEQ ID NO: 95695 - protein, 616 aa, Arabidopsis thaliana [sequence omitted]

SEQ ID NO: 95696 - protein, 540 aa, Arabidopsis thaliana
  peptide (1)..(540): Ceres Seq. ID no. 12730042
  misc_feature (41)..(250): Pfam Name: DEAD/DEAH box helicase Pfam Description: DEAD/DEAH box helicase
  misc_feature (1)..(508): Homolog of NCBI NO: 15228722 NR Description: putative RNA helicase; protein id: At3g22310.1,
  misc_feature (1)..(535): Homolog of NCBI NO: 34899624 NR Description: putative RNA helicase [Oryza sativa (japonica
  misc_feature (160)..(508): Homolog of NCBI NO: 11358813 NR Description: RNA helicase RH9 [imported] - Arabidopsis (fragment) >gi|3775995|emb|CAA09200.1| RNA helicase [Arabidopsis
  misc_feature (1)..(395): Homolog of NCBI NO: 19347898 NR Description: unknown protein [Arabidopsis thaliana] unknown protein [Arabidopsis thaliana] At5g26752 [Arabidopsis thaliana] >gi|21689779|gb|AAM67533.1|
  misc_feature (477)..(533): Homolog of NCBI NO: 19347898 NR Description: unknown protein [Arabidopsis thaliana] unknown protein [Arabidopsis thaliana] At5g26752 [Arabidopsis thaliana] >gi|21689779|gb|AAM67533.1|
  misc_feature (1)..(395): Homolog of NCBI NO: 30690260 NR Description: DEAD box RNA helicase (RH3) [Arabidopsis >gi|20856975|gb|AAM26693.1| At5g26743 [Arabidopsis thaliana]
  misc_feature (477)..(533): Homolog of NCBI NO: 30690260 NR Description: DEAD box RNA helicase (RH3) [Arabidopsis >gi|20856975|gb|AAM26693.1| At5g26743 [Arabidopsis thaliana]
  misc_feature (1)..(395): Homolog of NCBI NO: 22135801 NR Description: At5g26740 [Arabidopsis thaliana]
  misc_feature (477)..(533): Homolog of NCBI NO: 22135801 NR Description: At5g26740 [Arabidopsis thaliana]
  misc_feature (4)..(404): Homolog of NCBI NO: 34897326 NR Description: putative RNA helicase [Oryza sativa]
MVSQAGFAISESSERRVGDSESVGGDGLAISELGISPEIVKALSSKGIEKLFPIQKAVLEPAMEGRDMIGRARTGTGKTLAFGIPIIDKIIKYNAKHGRGRNPLCLVLAPTRELARQVEKEFRESAPSLDTICLYGGTPIGQQMRQLDYGVDVAVGTPGRVIDLMKRGALNLSEVQFVVLDEADQMLQVGFAEDVEIILEKLPEKRQSMMFSATMPSWIRSLTKKYLNNPLTVDLVGDSDQKLADGITTYSIIADSYGRASIIGPLVTEHAKGGKCIVFTQTKRDADRLSYALARSFKCEALHGDISQSQRERTLAGFRDGHFNILVATDVAARGLDVPNVDLIIHYELPNNTETFVHRTGRTGRAGKKGSAILIYSQDQSRAVKIIEREVGSRFTELPSIAVERGSASMFEGIGSRSGGSFGGGMRDRGSSFGGRSGGGGYGGSSGGYGGGRSGGSSNRYSGDSDRSGFGSFGMRSPEGYGSDRSSQSGGRSSFGGGRSGGSSNNRSSGFGDFGSDRSSQSGGRSSFGGFGSNDGKRSY

SEQ ID NO: 95697 - DNA, 978 bp, Arabidopsis thaliana
  misc_feature (1)..(978): Ceres Seq. ID no. 12730047
  misc_feature: MA Experiment ID: 20000306 Result: Down-regulated in Transcription
  misc_feature: MA Experiment 20000306 PARAMETER Experiment Name: At_Germinating_Seeds_Sub_P Parameter: Age (hr) Value: 6 vs. 0
  misc_feature: MA Experiment 20000306 PARAMETER Experiment Name: At_Germinating_Seeds_Sub_P Parameter: Organism Value: A. thaliana
  misc_feature: MA Experiment 20000306 PARAMETER Experiment Name: At_Germinating_Seeds_Sub_P Parameter: Plant Line Value: WS
  misc_feature: MA Experiment 20000306 PARAMETER Experiment Name: At_Germinating_Seeds_Sub_P Parameter: Tissue Value: Germinating Seeds
  misc_feature: MA Experiment ID: 20000348 Result: Up-regulated in Transcription
  misc_feature: MA Experiment 20000348 PARAMETER Experiment Name: At_100uM_ABA_Sub_P Parameter: Age (day) Value: 14
  misc_feature: MA Experiment 20000348 PARAMETER Experiment Name: At_100uM_ABA_Sub_P Parameter: Organism Value: A. thaliana
  misc_feature: MA Experiment 20000348 PARAMETER Experiment Name: At_100uM_ABA_Sub_P Parameter: Plant Line Value: WS
  misc_feature: MA Experiment 20000348 PARAMETER Experiment Name: At_100uM_ABA_Sub_P Parameter: Timepoint (hr) Value: 1
  misc_feature: MA Experiment 20000348 PARAMETER Experiment Name: At_100uM_ABA_Sub_P Parameter: Tissue Value: Aerial
  misc_feature: MA Experiment 20000348 PARAMETER Experiment Name: At_100uM_ABA_Sub_P Parameter: Treatment Value: 100uM ABA vs. No Treatment
atgatgatgagtcgtcgctatggagccaagctaatggaaactgctgtgactcacagccatcttttgaatcctagggttcctctcgtgacggaaaatattagggttccggcgatgggagtcgtgagagttttcagcaagatgacatttgagaagaagaaaactacggaggagaaaggatctagcggtggcaaggctgatcaaggtaacaaaggggagcaattaatcgttagctactggggagtgaagccgatgaagatcaccaaagaagatggaactgaatggaaatggagttgctttaggccatgggagacatataaatcagatctgactatagatttgaagaagcatcatgttccatcgactttaccggacaaactagcttattggaccgtgaaatctcttcgatggcctaccgatcttttcttccagaggcggtacggatgcagagcaatgatgctagaaacggttgcagcggttccaggaatggttggagggatgttagtacactgcaaatcgcttcgacggtttgaacaaagcggtggttggatcaaagccctacttgaagaagcagagaacgagagaatgcatttaatgacattcatggaagtcgcgaaacctaattggtacgaacgagctcttgtgattgccgttcaaggcattttcttcaatgcttatttccttggatacctaatttctcccaaatttgctcatcgtatggttggataccttgaggaagaagcaatccactcttacactgagtttcttaaagaactcgataatggtaacatcgaaaatgtgcctgcaccggctattgccattgattactggagacttgaagctgatgcgacgcttcgtgatgtcgtcatggtggtccgtgctgatgaagcgcatcaccgtgatgttaaccactatgcatccgatattcattaccaaggtcgtgagctaaaagaagctccagctcccattggatatcattga

SEQ ID NO: 95698 - protein, 325 aa, Arabidopsis thaliana
  peptide (1)..(325): Ceres Seq. ID no. 12730048
  misc_feature (45)..(323): Pfam Name: Alternative oxidase Pfam Description: Alternative oxidase
  misc_feature (1)..(325): Homolog of NCBI NO: 15228729 NR Description: alternative oxidase 1b precursor; protein id: [Arabidopsis thaliana] >gi|3913143|sp|O23913|AX1B_ARATH oxidase 1b, mitochondrial precursor >gi|2506082|dbj|BAA22624.1|
  misc_feature (34)..(325): Homolog of NCBI NO: 15232222 NR Description: alternative oxidase 1c precursor; protein id: [Arabidopsis thaliana] >gi|3913142|sp|O22048|AX1C_ARATH oxidase 1c, mitochondrial precursor >gi|2506049|dbj|BAA22635.1|
  misc_feature (15)..(325): Homolog of NCBI NO: 11278947 NR Description: alternative respiratory pathway oxidase (EC
  misc_feature (15)..(325): Homolog of NCBI NO: 15228734 NR Description: alternative oxidase 1a precursor; protein id: supported by cDNA: 116257., supported by cDNA: gi_13877806, by cDNA: gi_16323479 [Arabidopsis thaliana]
  misc_feature (34)..(325): Homolog of NCBI NO: 421824 NR Description: alternative respiratory pathway oxidase (EC
  misc_feature (52)..(325): Homolog of NCBI NO: 1872517 NR Description: alternative oxidase [Arabidopsis thaliana]
  misc_feature (33)..(325): Homolog of NCBI NO: 6634501 NR Description: alternative oxidase [Populus tremula x Populus
  misc_feature (36)..(325): Homolog of NCBI NO: 3913066 NR Description: Alternative oxidase 2, mitochondrial precursor
MMMSRRYGAKLMETAVTHSHLLNPRVPLVTENIRVPAMGVVRVFSKMTFEKKKTTEEKGSSGGKADQGNKGEQLIVSYWGVKPMKITKEDGTEWKWSCFRPWETYKSDLTIDLKKHHVPSTLPDKLAYWTVKSLRWPTDLFFQRRYGCRAMMLETVAAVPGMVGGMLVHCKSLRRFEQSGGWIKALLEEAENERMHLMTFMEVAKPNWYERALVIAVQGIFFNAYFLGYLISPKFAHRMVGYLEEEAIHSYTEFLKELDNGNIENVPAPAIAIDYWRLEADATLRDVVMVVRADEAHHRDVNHYASDIHYQGRELKEAPAPIGYH

SEQ ID NO: 95699 - protein, 324 aa, Arabidopsis thaliana
  peptide (1)..(324): Ceres Seq. ID no. 12730049
  misc_feature (44)..(322): Pfam Name: Alternative oxidase Pfam Description: Alternative oxidase
  misc_feature (1)..(324): Homolog of NCBI NO: 15228729 NR Description: alternative oxidase 1b precursor; protein id: [Arabidopsis thaliana] >gi|3913143|sp|O23913|AX1B_ARATH oxidase 1b, mitochondrial precursor >gi|2506082|dbj|BAA22624.1|
  misc_feature (33)..(324): Homolog of NCBI NO: 15232222 NR Description: alternative oxidase 1c precursor; protein id: [Arabidopsis thaliana] >gi|3913142|sp|O22048|AX1C_ARATH oxidase 1c, mitochondrial precursor >gi|2506049|dbj|BAA22635.1|
  misc_feature (14)..(324): Homolog of NCBI NO: 11278947 NR Description: alternative respiratory pathway oxidase (EC
  misc_feature (14)..(324): Homolog of NCBI NO: 15228734 NR Description: alternative oxidase 1a precursor; protein id: supported by cDNA: 116257., supported by cDNA: gi_13877806, by cDNA: gi_16323479 [Arabidopsis thaliana]
  misc_feature (33)..(324): Homolog of NCBI NO: 421824 NR Description: alternative respiratory pathway oxidase (EC
  misc_feature (51)..(324): Homolog of NCBI NO: 1872517 NR Description: alternative oxidase [Arabidopsis thaliana]
  misc_feature (32)..(324): Homolog of NCBI NO: 6634501 NR Description: alternative oxidase [Populus tremula x Populus
  misc_feature (35)..(324): Homolog of NCBI NO: 3913066 NR Description: Alternative oxidase 2, mitochondrial precursor
MMSRRYGAKLMETAVTHSHLLNPRVPLVTENIRVPAMGVVRVFSKMTFEKKKTTEEKGSSGGKADQGNKGEQLIVSYWGVKPMKITKEDGTEWKWSCFRPWETYKSDLTIDLKKHHVPSTLPDKLAYWTVKSLRWPTDLFFQRRYGCRAMMLETVAAVPGMVGGMLVHCKSLRRFEQSGGWIKALLEEAENERMHLMTFMEVAKPNWYERALVIAVQGIFFNAYFLGYLISPKFAHRMVGYLEEEAIHSYTEFLKELDNGNIENVPAPAIAIDYWRLEADATLRDVVMVVRADEAHHRDVNHYASDIHYQGRELKEAPAPIGYH

SEQ ID NO: 95700 - protein, 323 aa, Arabidopsis thaliana
  peptide (1)..(323): Ceres Seq. ID no. 12730050
  misc_feature (43)..(321): Pfam Name: Alternative oxidase Pfam Description: Alternative oxidase
  misc_feature (1)..(323): Homolog of NCBI NO: 15228729 NR Description: alternative oxidase 1b precursor; protein id: [Arabidopsis thaliana] >gi|3913143|sp|O23913|AX1B_ARATH oxidase 1b, mitochondrial precursor >gi|2506082|dbj|BAA22624.1|
  misc_feature (32)..(323): Homolog of NCBI NO: 15232222 NR Description: alternative oxidase 1c precursor; protein id: [Arabidopsis thaliana] >gi|3913142|sp|O22048|AX1C_ARATH oxidase 1c, mitochondrial precursor >gi|2506049|dbj|BAA22635.1|
  misc_feature (13)..(323): Homolog of NCBI NO: 11278947 NR Description: alternative respiratory pathway oxidase (EC
  misc_feature (13)..(323): Homolog of NCBI NO: 15228734 NR Description: alternative oxidase 1a precursor; protein id: supported by cDNA: 116257., supported by cDNA: gi_13877806, by cDNA: gi_16323479 [Arabidopsis thaliana]
  misc_feature (32)..(323): Homolog of NCBI NO: 421824 NR Description: alternative respiratory pathway oxidase (EC
  misc_feature (50)..(323): Homolog of NCBI NO: 1872517 NR Description: alternative oxidase [Arabidopsis thaliana]
  misc_feature (31)..(323): Homolog of NCBI NO: 6634501 NR Description: alternative oxidase [Populus tremula x Populus
  misc_feature (34)..(323): Homolog of NCBI NO: 3913066 NR Description: Alternative oxidase 2, mitochondrial precursor
MSRRYGAKLMETAVTHSHLLNPRVPLVTENIRVPAMGVVRVFSKMTFEKKKTTEEKGSSGGKADQGNKGEQLIVSYWGVKPMKITKEDGTEWKWSCFRPWETYKSDLTIDLKKHHVPSTLPDKLAYWTVKSLRWPTDLFFQRRYGCRAMMLETVAAVPGMVGGMLVHCKSLRRFEQSGGWIKALLEEAENERMHLMTFMEVAKPNWYERALVIAVQGIFFNAYFLGYLISPKFAHRMVGYLEEEAIHSYTEFLKELDNGNIENVPAPAIAIDYWRLEADATLRDVVMVVRADEAHHRDVNHYASDIHYQGRELKEAPAPIGYH

SEQ ID NO: 95701 - DNA, 1215 bp, Arabidopsis thaliana
  misc_feature (1)..(1215): Ceres Seq. ID no. 12730067
  misc_feature: MA Experiment ID: 20000306 Result: Up-regulated in Transcription
  misc_feature: MA Experiment 20000306 PARAMETER Experiment Name: At_Germinating_Seeds_Sub_P Parameter: Age (hr) Value: 6 vs. 0
  misc_feature: MA Experiment 20000306 PARAMETER Experiment Name: At_Germinating_Seeds_Sub_P Parameter: Organism Value: A. thaliana
  misc_feature: MA Experiment 20000306 PARAMETER Experiment Name: At_Germinating_Seeds_Sub_P Parameter: Plant Line Value: WS
  misc_feature: MA Experiment 20000306 PARAMETER Experiment Name: At_Germinating_Seeds_Sub_P Parameter: Tissue Value: Germinating Seeds
  misc_feature: MA Experiment ID: 20000307 Result: Up-regulated in Transcription
  misc_feature: MA Experiment 20000307 PARAMETER Experiment Name: At_Germinating_Seeds_Sub_P Parameter: Age (hr) Value: 24 vs. 0
  misc_feature: MA Experiment 20000307 PARAMETER Experiment Name: At_Germinating_Seeds_Sub_P Parameter: Organism Value: A. thaliana
  misc_feature: MA Experiment 20000307 PARAMETER Experiment Name: At_Germinating_Seeds_Sub_P Parameter: Plant Line Value: WS
  misc_feature: MA Experiment 20000307 PARAMETER Experiment Name: At_Germinating_Seeds_Sub_P Parameter: Tissue Value: Germinating Seeds
  misc_feature: MA Experiment ID: 20000315 Result: Down-regulated in Transcription
  misc_feature: MA Experiment 20000315 PARAMETER Experiment Name: At_14day_Shoots-Roots_Sub_P Parameter: Age (day) Value: 14
  misc_feature: MA Experiment 20000315 PARAMETER Experiment Name: At_14day_Shoots-Roots_Sub_P Parameter: Organism Value: A. thaliana
  misc_feature: MA Experiment 20000315 PARAMETER Experiment Name: At_14day_Shoots-Roots_Sub_P Parameter: Plant Line Value: WS
  misc_feature: MA Experiment 20000315 PARAMETER Experiment Name: At_14day_Shoots-Roots_Sub_P Parameter: Tissue Value: Shoots vs. Whole Plant
  misc_feature: MA Experiment ID: 20000329 Result: Down-regulated in Transcription
  misc_feature: MA Experiment 20000329 PARAMETER Experiment Name: At_4deg_Cold_Sub_P Parameter: Age (day) Value: 14
  misc_feature: MA Experiment 20000329 PARAMETER Experiment Name: At_4deg_Cold_Sub_P Parameter: Organism Value: A. thaliana
  misc_feature: MA Experiment 20000329 PARAMETER Experiment Name: At_4deg_Cold_Sub_P Parameter: Plant Line Value: WS
  misc_feature: MA Experiment 20000329 PARAMETER Experiment Name: At_4deg_Cold_Sub_P Parameter: Temperature (deg C) Value: 4 vs. 22
  misc_feature: MA Experiment 20000329 PARAMETER Experiment Name: At_4deg_Cold_Sub_P Parameter: Timepoint (hr) Value: 6
  misc_feature: MA Experiment 20000329 PARAMETER Experiment Name: At_4deg_Cold_Sub_P Parameter: Tissue Value: Aerial
  misc_feature: MA Experiment ID: 20000355 Result: Down-regulated in Transcription
  misc_feature: MA Experiment 20000355 PARAMETER Experiment Name: At_Siliques_Sub_P Parameter: Age (day) Value: 21
  misc_feature: MA Experiment 20000355 PARAMETER Experiment Name: At_Siliques_Sub_P Parameter: Organism Value: A. thaliana
  misc_feature: MA Experiment 20000355 PARAMETER Experiment Name: At_Siliques_Sub_P Parameter: Plant Line Value: WS
  misc_feature: MA Experiment 20000355 PARAMETER Experiment Name: At_Siliques_Sub_P Parameter: Tissue Value: Less Than 5mm Siliques vs. Whole Plant
  misc_feature: MA Experiment ID: 20000440 Result: Down-regulated in Transcription
  misc_feature: MA Experiment 20000440 PARAMETER Experiment Name: At_Closed-Flower__Sub_P Parameter: Tissue Value: Closed Flower vs. Whole Plant
  misc_feature: MA Experiment ID: 20001807 Result: Down-regulated in Transcription
  misc_feature: MA Experiment 20001807 PARAMETER Experiment Name: At_50mM_NH4NO3_L-to-H_Sub_P Parameter: Timepoint (hr) Value: 6
  misc_feature: MA Experiment 20001807 PARAMETER Experiment Name: At_50mM_NH4NO3_L-to-H_Sub_P Parameter: Tissue Value: Leaf
  misc_feature: MA Experiment 20001807 PARAMETER Experiment Name: At_50mM_NH4NO3_L-to-H_Sub_P Parameter: Treatment Value: 50mM NH4NO3 vs 100mM Mannitol
tcttccatagccgatcgacctttgttcacaattcccaccgatttttatttgctagatcgatatattttcagtgagcttgaaacatggcttcagtggctcctaaaatcgctaaagatgtaactgaactaatagggaacactccattagtgtatctaaacaaagtagctaaagattgtgttggtcatgttgctgctaagcttgagatgatggaaccatgttctagcgtcaaagacaggattggttatagtatgattgctgatgcagaagctaaaggacttattaaaccgggagagagtgtgttgattgagccaacaagtgggaacactggagttggtttagcatttactgcagctgcaaagggctataagcttgttataacaatgccagcttcaatgagtatagagagaagaatcattctcttagcttttggagctgagttgattcttactgatccggctaaaggtatgaaaggtgctgttgcaaaggcggaggagattttggcgaaaacacctaatggttatatgcttcaacagtttgagaatcctgctaatccaaagatccattatgagactactggacctgagatatggaaaggttctggtggaaaagtggatggctttgtttctggtattggtactggtggtacctgaacaggtgctgggaagtatctcaaggaacagaacacaaacataaagctgtatggtgtcgagcctgttgaaagccctattctgtccggtggaaagccaggtccccacaaaattcaaggtataggtgctggttttattccaggcattttggatgttgatcttatagatgaagttgttcaggtttcaagtgaagaatccattgacatggcaaggcttcttgctagggaagagggtctgttagtgggaatctcatctggagcagcagctactgcagcaatcaaacttgcaaagaggccagaaaatgctgggaagcttatagtggcggtgtttccgagtttcggggaaagatatctatcgactgtactgtttgatgcagcaaggaaagaggcagagactatgacctttgagccctgaatctgttcccctttcttcttggtgatacaaataaatgatctttcttccaacatatatatcttcagattctgtctgtatcttgtcatttgtgagaactcaaaagtagtttgtctgctactatgaacaatccatttctagaaagtttctggttgag

SEQ ID NO: 95702 - protein, 188 aa, Arabidopsis thaliana
  peptide (1)..(188): Ceres Seq. ID no. 12730068
  misc_feature (12)..(188): Pfam Name: Pyridoxal-phosphate dependent enzyme Pfam Description: Pyridoxal-phosphate dependent enzyme
  misc_feature (1)..(173): Homolog of NCBI NO: 11994278 NR Description: cysteine synthase; O-acetylserine(thiol) lyase
  misc_feature (4)..(188): Homolog of NCBI NO: 11131561 NR Description: Cysteine synthase (O-acetylserine sulfhydrylase)
  misc_feature (4)..(188): Homolog of NCBI NO: 15233613 NR Description: cytosolic O-acetylserine(thiol)lyase (EC protein id: At4g14880.1, supported by cDNA: gi_15027936
  misc_feature (8)..(188): Homolog of NCBI NO: 11131564 NR Description: Cysteine synthase (O-acetylserine sulfhydrylase)
  misc_feature (4)..(188): Homolog of NCBI NO: 804950 NR Description: cysteine synthase [Arabidopsis thaliana]
  misc_feature (4)..(188): Homolog of NCBI NO: 15027937 NR Description: putative cytosolic O-acetylserine(thiol)lyase
MASVAPKIAKDVTELIGNTPLVYLNKVAKDCVGHVAAKLEMMEPCSSVKDRIGYSMIADAEAKGLIKPGESVLIEPTSGNTGVGLAFTAAAKGYKLVITMPASMSIERRIILLAFGAELILTDPAKGMKGAVAKAEEILAKTPNGYMLQQFENPANPKIHYETTGPEIWKGSGGKVDGFVSGIGTGGT

SEQ ID NO: 95703 - protein, 148 aa, Arabidopsis thaliana
  peptide (1)..(148): Ceres Seq. ID no. 12730069
  misc_feature (1)..(148): Pfam Name: Pyridoxal-phosphate dependent enzyme Pfam Description: Pyridoxal-phosphate dependent enzyme
  misc_feature (1)..(133): Homolog of NCBI NO: 11994278 NR Description: cysteine synthase; O-acetylserine(thiol) lyase
  misc_feature (1)..(148): Homolog of NCBI NO: 11131561 NR Description: Cysteine synthase (O-acetylserine sulfhydrylase)
  misc_feature (1)..(148): Homolog of NCBI NO: 15233613 NR Description: cytosolic O-acetylserine(thiol)lyase (EC protein id: At4g14880.1, supported by cDNA: gi_15027936
  misc_feature (1)..(148): Homolog of NCBI NO: 11131564 NR Description: Cysteine synthase (O-acetylserine sulfhydrylase)
  misc_feature (1)..(148): Homolog of NCBI NO: 804950 NR Description: cysteine synthase [Arabidopsis thaliana]
  misc_feature (1)..(148): Homolog of NCBI NO: 15027937 NR Description: putative cytosolic O-acetylserine(thiol)lyase
MMEPCSSVKDRIGYSMIADAEAKGLIKPGESVLIEPTSGNTGVGLAFTAAAKGYKLVITMPASMSIERRIILLAFGAELILTDPAKGMKGAVAKAEEILAKTPNGYMLQQFENPANPKIHYETTGPEIWKGSGGKVDGFVSGIGTGGT

SEQ ID NO: 95704 - protein, 147 aa, Arabidopsis thaliana
  peptide (1)..(147): Ceres Seq. ID no. 12730070
  misc_feature (1)..(147): Pfam Name: Pyridoxal-phosphate dependent enzyme Pfam Description: Pyridoxal-phosphate dependent enzyme
  misc_feature (1)..(132): Homolog of NCBI NO: 11994278 NR Description: cysteine synthase; O-acetylserine(thiol) lyase
  misc_feature (1)..(147): Homolog of NCBI NO: 11131561 NR Description: Cysteine synthase (O-acetylserine sulfhydrylase)
  misc_feature (1)..(147): Homolog of NCBI NO: 15233613 NR Description: cytosolic O-acetylserine(thiol)lyase (EC protein id: At4g14880.1, supported by cDNA: gi_15027936
  misc_feature (1)..(147): Homolog of NCBI NO: 11131564 NR Description: Cysteine synthase (O-acetylserine sulfhydrylase)
  misc_feature (1)..(147): Homolog of NCBI NO: 804950 NR Description: cysteine synthase [Arabidopsis thaliana]
  misc_feature (1)..(147): Homolog of NCBI NO: 15027937 NR Description: putative cytosolic O-acetylserine(thiol)lyase
MEPCSSVKDRIGYSMIADAEAKGLIKPGESVLIEPTSGNTGVGLAFTAAAKGYKLVITMPASMSIERRIILLAFGAELILTDPAKGMKGAVAKAEEILAKTPNGYMLQQFENPANPKIHYETTGPEIWKGSGGKVDGFVSGIGTGGT

SEQ ID NO: 95705 - DNA, 1860 bp, Arabidopsis thaliana
  misc_feature (1)..(1860): Ceres Seq. ID no. 12730071
  misc_feature: MA Experiment ID: 20000327 Result: Up-regulated in Transcription
  misc_feature: MA Experiment 20000327 PARAMETER Experiment Name: At_42deg_Heat_Sub_P Parameter: Age (day) Value: 14
  misc_feature: MA Experiment 20000327 PARAMETER Experiment Name: At_42deg_Heat_Sub_P Parameter: Organism Value: A. thaliana
  misc_feature: MA Experiment 20000327 PARAMETER Experiment Name: At_42deg_Heat_Sub_P Parameter: Plant Line Value: WS
  misc_feature: MA Experiment 20000327 PARAMETER Experiment Name: At_42deg_Heat_Sub_P Parameter: Temperature (deg C) Value: 42 vs. 22
  misc_feature: MA Experiment 20000327 PARAMETER Experiment Name: At_42deg_Heat_Sub_P Parameter: Timepoint (hr) Value: 1
  misc_feature: MA Experiment 20000327 PARAMETER Experiment Name: At_42deg_Heat_Sub_P Parameter: Tissue Value: Aerial
atgatacagagattgattcctctaaatcgaaaagcttcgaactttactcagattcttgagaaaggtacttctttattacactattctagtatcaccgaagcgaagctttcttataaagagagattaaggaatgggattgttgatattaaggttaatgatgctattgatctcttcgaatccatgattcaatctcgtcctttacctactccaatcgatttcaatagattgtgtagtgctgttgctagaacgaaacagtatgatttagtgttaggtttctgcaagggaatggagttgaatgggattgagcatgacatgtatactatgaccattatgatcaattgctattgtagaaaaaagaaacttcttttcgcattttctgttcttgggagagcttggaagcttgggtatgagcctgatacaatcacgttttcgactttggttaacgggttttgcctcgagggtagagtttctgaagcggttgcgttagttgatcggatggtggaaatgaagcaaagaccggatcttgtaaccgttagcactctgatcaatggactttgtctaaagggtagagtgtctgaagctttggttttgattgataggatggttgagtatggttttcaacctgatgaggttacttatggaccggttttgaatagactgtgtaagtcagggaactctgctttggctttggatttgtttagaaagatggaagaaagaaatatcaaagctagtgttgttcagtatagtattgttattgatagtctttgtaaagatgggagctttgacgatgcgcttagccttttcaatgagatggagatgaaagggattaaagctgatgttgttacgtatagttctcttataggaggtctttgtaacgacggtaaatgggatgatggtgcaaagatgttgagggagatgattggaaggaatatcattcccgatgttgtcacatttagtgctttgattgatgtttttgtgaaagaggggaagcttctagaggctaaagagttgtacaatgagatgatcacaagaggtatagctcctgacaccattacatataattcattaattgatgggttttgtaaggagaattgcttacatgaggctaatcagatgtttgatctgatggttagcaaagggtgcgaacctgacatcgtgacttatagtattctcataaatagctactgcaaagctaagagagttgatgatggtatgagactttttcgtgagatttcttcgaaaggattgattcctaatacaatcacttataacactcttgtcctagggttttgtcaatcgggaaaacttaacgccgccaaagaactcttccaagagatggtttctcgtggtgtgccaccaagtgttgtaacttatggtattttgctggatggtttgtgtgacaatggtgaactaaataaagcattggagatatttgagaaaatgcagaagagtaggatgactcttggtattggtatctataatatcatcattcacgggatgtgcaatgctagtaaggtcgatgatgcttggagtttattctgtagcctctctgacaaaggagtgaaacctgatgtcgtgacatacaatgtaatgattggaggactatgtaagaaaggctcgttgtctgaagccgatatgctgtttagaaaaatgaaggaggatgggtgtactccggatgattttacgtacaacattcttatcagggcacatcttggaggtagtggtctaatctcttcagttgaactcatagaagaaatgaaggtgtgtgggttctctgcagattcttccaccataaagatggttattgatatgttatcagatcgtagattggataaaagctttttggatatgctttcttga

SEQ ID NO: 95706 - protein, 619 aa, Arabidopsis thaliana
  peptide (1)..(619): Ceres Seq. ID no. 12730072
  misc_feature (351)..(385): Pfam Name: PPR repeat Pfam Description: PPR repeat
  misc_feature (28)..(619): Homolog of NCBI NO: 15221282 NR Description: hypothetical protein; protein id: At1g12300.1
  misc_feature (33)..(607): Homolog of NCBI NO: 25402719 NR Description: protein F5O11.4 [imported] - Arabidopsis thaliana
  misc_feature (28)..(619): Homolog of NCBI NO: 18391414 NR Description: expressed protein; protein id: At1g12620.1, by cDNA: gi_13605504 [Arabidopsis thaliana] At1g12620/T12C24_25 [Arabidopsis thaliana]
  misc_feature (28)..(619): Homolog of NCBI NO: 25518293 NR Description: hypothetical protein F13K23.2 - Arabidopsis >gi|8698724|gb|AAF78482.1|AC012187_2 Contains similarity to an protein F16M19.7 gi|6598837 from Arabidopsis thaliana BAC
  misc_feature (31)..(619): Homolog of NCBI NO: 15220990 NR Description: unknown protein; protein id: At1g12770.1
  misc_feature (28)..(606): Homolog of NCBI NO: 9502388 NR Description: T12C24.15 [Arabidopsis thaliana]
  misc_feature (12)..(619): Homolog of NCBI NO: 25404380 NR Description: hypothetical protein F16P17.7 [imported] - thaliana >gi|8493580|gb|AAF75803.1|AC011000_6 Contains weak to leaf protein from Ipomea nil gb|D85101 and contains a RepB
  misc_feature (30)..(619): Homolog of NCBI NO: 25404377 NR Description: hypothetical protein F16P17.5 [imported] - thaliana >gi|8493578|gb|AAF75801.1|AC011000_4 Contains a RepB protein domain and multiple PPR PF|01535 repeats. [Arabidopsis
  misc_feature (18)..(619): Homolog of NCBI NO: 6630464 NR Description: F23N19.4 [Arabidopsis thaliana]
  misc_feature (135)..(605): Homolog of NCBI NO: 25402738 NR Description: protein T12C24.22 [imported] - Arabidopsis >gi|9502386|gb|AAF88093.1|AC025417_21 T12C24.22 [Arabidopsis
MIQRLIPLNRKASNFTQILEKGTSLLHYSSITEAKLSYKERLRNGIVDIKVNDAIDLFESMIQSRPLPTPIDFNRLCSAVARTKQYDLVLGFCKGMELNGIEHDMYTMTIMINCYCRKKKLLFAFSVLGRAWKLGYEPDTITFSTLVNGFCLEGRVSEAVALVDRMVEMKQRPDLVTVSTLINGLCLKGRVSEALVLIDRMVEYGFQPDEVTYGPVLNRLCKSGNSALALDLFRKMEERNIKASVVQYSIVIDSLCKDGSFDDALSLFNEMEMKGIKADVVTYSSLIGGLCNDGKWDDGAKMLREMIGRNIIPDVVTFSALIDVFVKEGKLLEAKELYNEMITRGIAPDTITYNSLIDGFCKENCLHEANQMFDLMVSKGCEPDIVTYSILINSYCKAKRVDDGMRLFREISSKGLIPNTITYNTLVLGFCQSGKLNAAKELFQEMVSRGVPPSVVTYGILLDGLCDNGELNKALEIFEKMQKSRMTLGIGIYNIIIHGMCNASKVDDAWSLFCSLSDKGVKPDVVTYNVMIGGLCKKGSLSEADMLFRKMKEDGCTPDDFTYNILIRAHLGGSGLISSVELIEEMKVCGFSADSSTIKMVIDMLSDRRLDKSFLDMLS

SEQ ID NO: 95707 - protein, 559 aa, Arabidopsis thaliana
  peptide (1)..(559): Ceres Seq. ID no. 12730073
  misc_feature (291)..(325): Pfam Name: PPR repeat Pfam Description: PPR repeat
  misc_feature (1)..(559): Homolog of NCBI NO: 15221282 NR Description: hypothetical protein; protein id: At1g12300.1
  misc_feature (1)..(547): Homolog of NCBI NO: 25402719 NR Description: protein F5O11.4 [imported] - Arabidopsis thaliana
  misc_feature (1)..(559): Homolog of NCBI NO: 18391414 NR Description: expressed protein; protein id: At1g12620.1, by cDNA: gi_13605504 [Arabidopsis thaliana] At1g12620/T12C24_25 [Arabidopsis thaliana]
  misc_feature (1)..(559): Homolog of NCBI NO: 25518293 NR Description: hypothetical protein F13K23.2 - Arabidopsis >gi|8698724|gb|AAF78482.1|AC012187_2 Contains similarity to an protein F16M19.7 gi|6598837 from Arabidopsis thaliana BAC
  misc_feature (1)..(559): Homolog of NCBI NO: 15220990 NR Description: unknown protein; protein id: At1g12770.1
  misc_feature (1)..(546): Homolog of NCBI NO: 9502388 NR Description: T12C24.15 [Arabidopsis thaliana]
  misc_feature (1)..(559): Homolog of NCBI NO: 25404380 NR Description: hypothetical protein F16P17.7 [imported] - thaliana >gi|8493580|gb|AAF75803.1|AC011000_6 Contains weak to leaf protein from Ipomea nil gb|D85101 and contains a RepB
  misc_feature (1)..(559): Homolog of NCBI NO: 25404377 NR Description: hypothetical protein F16P17.5 [imported] - thaliana >gi|8493578|gb|AAF75801.1|AC011000_4 Contains a RepB protein domain and multiple PPR PF|01535 repeats. [Arabidopsis
  misc_feature (1)..(559): Homolog of NCBI NO: 6630464 NR Description: F23N19.4 [Arabidopsis thaliana]
  misc_feature (75)..(545): Homolog of NCBI NO: 25402738 NR Description: protein T12C24.22 [imported] - Arabidopsis >gi|9502386|gb|AAF88093.1|AC025417_21 T12C24.22 [Arabidopsis
MIQSRPLPTPIDFNRLCSAVARTKQYDLVLGFCKGMELNGIEHDMYTMTIMINCYCRKKKLLFAFSVLGRAWKLGYEPDTITFSTLVNGFCLEGRVSEAVALVDRMVEMKQRPDLVTVSTLINGLCLKGRVSEALVLIDRMVEYGFQPDEVTYGPVLNRLCKSGNSALALDLFRKMEERNIKASVVQYSIVIDSLCKDGSFDDALSLFNEMEMKGIKADVVTYSSLIGGLCNDGKWDDGAKMLREMIGRNIIPDVVTFSALIDVFVKEGKLLEAKELYNEMITRGIAPDTITYNSLIDGFCKENCLHEANQMFDLMVSKGCEPDIVTYSILINSYCKAKRVDDGMRLFREISSKGLIPNTITYNTLVLGFCQSGKLNAAKELFQEMVSRGVPPSVVTYGILLDGLCDNGELNKALEIFEKMQKSRMTLGIGIYNIIIHGMCNASKVDDAWSLFCSLSDKGVKPDVVTYNVMIGGLCKKGSLSEADMLFRKMKEDGCTPDDFTYNILIRAHLGGSGLISSVELIEEMKVCGFSADSSTIKMVIDMLSDRRLDKSFLDMLS

SEQ ID NO: 95708 - protein, 524 aa, Arabidopsis thaliana
  peptide (1)..(524): Ceres Seq. ID no. 12730074
  misc_feature (256)..(290): Pfam Name: PPR repeat Pfam Description: PPR repeat
  misc_feature (1)..(524): Homolog of NCBI NO: 15221282 NR Description: hypothetical protein; protein id: At1g12300.1
  misc_feature (1)..(512): Homolog of NCBI NO: 25402719 NR Description: protein F5O11.4 [imported] - Arabidopsis thaliana
  misc_feature (1)..(524): Homolog of NCBI NO: 18391414 NR Description: expressed protein; protein id: At1g12620.1, by cDNA: gi_13605504 [Arabidopsis thaliana] At1g12620/T12C24_25 [Arabidopsis thaliana]
  misc_feature (1)..(524): Homolog of NCBI NO: 25518293 NR Description: hypothetical protein F13K23.2 - Arabidopsis >gi|8698724|gb|AAF78482.1|AC012187_2 Contains similarity to an protein F16M19.7 gi|6598837 from Arabidopsis thaliana BAC
  misc_feature (1)..(524): Homolog of NCBI NO: 15220990 NR Description: unknown protein; protein id: At1g12770.1
  misc_feature (1)..(511): Homolog of NCBI NO: 9502388 NR Description: T12C24.15 [Arabidopsis thaliana]
  misc_feature (1)..(524): Homolog of NCBI NO: 25404380 NR Description: hypothetical protein F16P17.7 [imported] - thaliana >gi|8493580|gb|AAF75803.1|AC011000_6 Contains weak to leaf protein from Ipomea nil gb|D85101 and contains a RepB
  misc_feature (1)..(524): Homolog of NCBI NO: 25404377 NR Description: hypothetical protein F16P17.5 [imported] - thaliana >gi|8493578|gb|AAF75801.1|AC011000_4 Contains a RepB protein domain and multiple PPR PF|01535 repeats. [Arabidopsis
  misc_feature (1)..(524): Homolog of NCBI NO: 6630464 NR Description: F23N19.4 [Arabidopsis thaliana]
  misc_feature (40)..(510): Homolog of NCBI NO: 25402738 NR Description: protein T12C24.22 [imported] - Arabidopsis >gi|9502386|gb|AAF88093.1|AC025417_21 T12C24.22 [Arabidopsis
MELNGIEHDMYTMTIMINCYCRKKKLLFAFSVLGRAWKLGYEPDTITFSTLVNGFCLEGRVSEAVALVDRMVEMKQRPDLVTVSTLINGLCLKGRVSEALVLIDRMVEYGFQPDEVTYGPVLNRLCKSGNSALALDLFRKMEERNIKASVVQYSIVIDSLCKDGSFDDALSLFNEMEMKGIKADVVTYSSLIGGLCNDGKWDDGAKMLREMIGRNIIPDVVTFSALIDVFVKEGKLLEAKELYNEMITRGIAPDTITYNSLIDGFCKENCLHEANQMFDLMVSKGCEPDIVTYSILINSYCKAKRVDDGMRLFREISSKGLIPNTITYNTLVLGFCQSGKLNAAKELFQEMVSRGVPPSVVTYGILLDGLCDNGELNKALEIFEKMQKSRMTLGIGIYNIIIHGMCNASKVDDAWSLFCSLSDKGVKPDVVTYNVMIGGLCKKGSLSEADMLFRKMKEDGCTPDDFTYNILIRAHLGGSGLISSVELIEEMKVCGFSADSSTIKMVIDMLSDRRLDKSFLDMLS

SEQ ID NO: 95709 - DNA, 1080 bp, Arabidopsis thaliana
  misc_feature (1)..(1080): Ceres Seq. ID no. 12730079
  misc_feature: MA Experiment ID: 20000180 Result: Down-regulated in Transcription
  misc_feature: MA Experiment 20000180 PARAMETER Experiment Name: At_Germinating_Seeds_P Parameter: Age (hr) Value: 24 vs. 0
  misc_feature: MA Experiment 20000180 PARAMETER Experiment Name: At_Germinating_Seeds_P Parameter: Tissue Value: Germinating Seeds
  misc_feature: MA Experiment ID: 20000437 Result: Up-regulated in Transcription
  misc_feature: MA Experiment 20000437 PARAMETER Experiment Name: At_Drought_P Parameter: Age (day) Value: 8
  misc_feature: MA Experiment 20000437 PARAMETER Experiment Name: At_Drought_P Parameter: Organism Value: A. thaliana
  misc_feature: MA Experiment 20000437 PARAMETER Experiment Name: At_Drought_P Parameter: Plant Line Value: WS
  misc_feature: MA Experiment 20000437 PARAMETER Experiment Name: At_Drought_P Parameter: Timepoint (hr) Value: 24
  misc_feature: MA Experiment 20000437 PARAMETER Experiment Name: At_Drought_P Parameter: Tissue Value: Whole Plant
  misc_feature: MA Experiment 20000437 PARAMETER Experiment Name: At_Drought_P Parameter: Treatment Value: Drought vs. No Drought
  misc_feature: MA Experiment ID: 20001904 Result: Up-regulated in Transcription
  misc_feature: MA Experiment 20001904 PARAMETER Experiment Name: At_Drought_Reproduction_P Parameter: Age (day) Value: 37
  misc_feature: MA Experiment 20001904 PARAMETER Experiment Name: At_Drought_Reproduction_P Parameter: Organism Value: A. thaliana
  misc_feature: MA Experiment 20001904 PARAMETER Experiment Name: At_Drought_Reproduction_P Parameter: Plant Line Value: WS
  misc_feature: MA Experiment 20001904 PARAMETER Experiment Name: At_Drought_Reproduction_P Parameter: Timepoint (day) Value: 7
  misc_feature: MA Experiment 20001904 PARAMETER Experiment Name: At_Drought_Reproduction_P Parameter: Tissue Value: Rosettes
  misc_feature: MA Experiment 20001904 PARAMETER Experiment Name: At_Drought_Reproduction_P Parameter: Treatment Value: Drought vs. No Drought
aacagaacattaacgtaacaaaacaaagatgagccaagagcaaccaaggaggccaagagagccagtcaaatacggggacgtttttgaagtctccggtgaactcgctgataagcccatagcacctgaggatgcaaagatgatgcaatccgcggagacacatgtgttcggccatactcagaaaggcggtccagctgcggtcatgcaatctgcagccaccaccaatatacgcggtggctttgtccatccagatgacaaaactgagcttgtcgctgaacgaggcgccacagtggagcaaacggtccctgctgcaactgtcacaaccgaattcgtcggtggacaggtcgttggacaacacgttgaaccgaggcgtgtagtcgctgctgcgcgtacggacgaagaagctttgcaaagtacaataacgattggagaagcactggaagcaactgtgaagacagctggaaacaaacctgtggatcaaagcgacgccgcagcgattcaagcggcagagatgagagcttccggtaccaacgtcattgctctagctggagtcgccgcttcagctcaatctgcagcggatcacaacgctaccgtagatcgtgacgagaggaaaatcaagcttcgtgatgttttgacgggtgcagcagggaagttatcggcagacagagctgtgacgagggaagatgccgagggagtggtgagcgcagagatgaggaataaccctaaattgtgtactcaccctggtggtgtagcggcttctcttaccgtcgctgctaggcttaacgagagagttgatatatgacaagacaaatccggcgagaggatcgatgatctttcttttttttgtttgtttgtttgtttgttcgtctctctttcacaacttaggaaacttgttatgtaaaatcgtctacagcttttggtcctttagccgatatgttagaaaatccggcggggagaggatggtgttcacaagcttgtgacatttaatcgactagcttttttgttcttttttgtatcttactgcttaaaaacttcccaaggatgatgttggaatgaataatggggactttttagtttgaagtt

SEQ ID NO: 95710 - protein, 256 aa, Arabidopsis thaliana
  peptide (1)..(256): Ceres Seq. ID no. 12730080
  misc_feature (193)..(256): Pfam Name: Seed maturation protein Pfam Description: Seed maturation protein
  misc_feature (1)..(256): Homolog of NCBI NO: 15228770 NR Description: LEA protein, putative; protein id: At3g22500.1, by cDNA: gi_15450430, supported by cDNA: gi_992920 [Arabidopsis >gi|11994283|dbj|BAB01466.1| LEA protein in group 5 [Arabidopsis
  misc_feature (1)..(256): Homolog of NCBI NO: 1526422 NR Description: LEA protein in group 5 [Arabidopsis thaliana]
  misc_feature (1)..(256): Homolog of NCBI NO: 15228768 NR Description: LEA protein, putative; protein id: At3g22490.1 thaliana] >gi|11994281|dbj|BAB01464.1| seed maturation protein,
  misc_feature (1)..(255): Homolog of NCBI NO: 126078 NR Description: LATE EMBRYOGENESIS ABUNDANT PROTEIN D-34 (LEA
  misc_feature (1)..(209): Homolog of NCBI NO: 2129632 NR Description: embryonic protein LEA.D34 homolog type 1 - thaliana >gi|1113094|emb|CAA63085.1| LEA D34 protein homologue
MSQEQPRRPREPVKYGDVFEVSGELADKPIAPEDAKMMQSAETHVFGHTQKGGPAAVMQSAATTNIRGGFVHPDDKTELVAERGATVEQTVPAATVTTEFVGGQVVGQHVEPRRVVAAARTDEEALQSTITIGEALEATVKTAGNKPVDQSDAAAIQAAEMRASGTNVIALAGVAASAQSAADHNATVDRDERKIKLRDVLTGAAGKLSADRAVTREDAEGVVSAEMRNNPKLCTHPGGVAASLTVAARLNERVDI

SEQ ID NO: 95711 - protein, 220 aa, Arabidopsis thaliana
  peptide (1)..(220): Ceres Seq. ID no. 12730081
  misc_feature (157)..(220): Pfam Name: Seed maturation protein Pfam Description: Seed maturation protein
  misc_feature (1)..(220): Homolog of NCBI NO: 15228770 NR Description: LEA protein, putative; protein id: At3g22500.1, by cDNA: gi_15450430, supported by cDNA: gi_992920 [Arabidopsis >gi|11994283|dbj|BAB01466.1| LEA protein in group 5 [Arabidopsis
  misc_feature (1)..(220): Homolog of NCBI NO: 1526422 NR Description: LEA protein in group 5 [Arabidopsis thaliana]
  misc_feature (1)..(220): Homolog of NCBI NO: 15228768 NR Description: LEA protein, putative; protein id: At3g22490.1 thaliana] >gi|11994281|dbj|BAB01464.1| seed maturation protein,
  misc_feature (1)..(219): Homolog of NCBI NO: 126078 NR Description: LATE EMBRYOGENESIS ABUNDANT PROTEIN D-34 (LEA
  misc_feature (1)..(173): Homolog of NCBI NO: 2129632 NR Description: embryonic protein LEA.D34 homolog type 1 - thaliana >gi|1113094|emb|CAA63085.1| LEA D34 protein homologue
MMQSAETHVFGHTQKGGPAAVMQSAATTNIRGGFVHPDDKTELVAERGATVEQTVPAATVTTEFVGGQVVGQHVEPRRVVAAARTDEEALQSTITIGEALEATVKTAGNKPVDQSDAAAIQAAEMRASGTNVIALAGVAASAQSAADHNATVDRDERKIKLRDVLTGAAGKLSADRAVTREDAEGVVSAEMRNNPKLCTHPGGVAASLTVAARLNERVDI

SEQ ID NO: 95712 - protein, 219 aa, Arabidopsis thaliana
  peptide (1)..(219): Ceres Seq. ID no. 12730082
  misc_feature (156)..(219): Pfam Name: Seed maturation protein Pfam Description: Seed maturation protein
  misc_feature (1)..(219): Homolog of NCBI NO: 15228770 NR Description: LEA protein, putative; protein id: At3g22500.1, by cDNA: gi_15450430, supported by cDNA: gi_992920 [Arabidopsis >gi|11994283|dbj|BAB01466.1| LEA protein in group 5 [Arabidopsis
  misc_feature (1)..(219): Homolog of NCBI NO: 1526422 NR Description: LEA protein in group 5 [Arabidopsis thaliana]
  misc_feature (1)..(219): Homolog of NCBI NO: 15228768 NR Description: LEA protein, putative; protein id: At3g22490.1 thaliana] >gi|11994281|dbj|BAB01464.1| seed maturation protein,
  misc_feature (1)..(218): Homolog of NCBI NO: 126078 NR Description: LATE EMBRYOGENESIS ABUNDANT PROTEIN D-34 (LEA
  misc_feature (1)..(172): Homolog of NCBI NO: 2129632 NR Description: embryonic protein LEA.D34 homolog type 1 - thaliana >gi|1113094|emb|CAA63085.1| LEA D34 protein homologue
MQSAETHVFGHTQKGGPAAVMQSAATTNIRGGFVHPDDKTELVAERGATVEQTVPAATVTTEFVGGQVVGQHVEPRRVVAAARTDEEALQSTITIGEALEATVKTAGNKPVDQSDAAAIQAAEMRASGTNVIALAGVAASAQSAADHNATVDRDERKIKLRDVLTGAAGKLSADRAVTREDAEGVVSAEMRNNPKLCTHPGGVAASLTVAARLNERVDI

SEQ ID NO: 95713 - DNA, 2089 bp, Arabidopsis thaliana
  misc_feature (1)..(2089): Ceres Seq. ID no. 12730104
  misc_feature: MA Experiment ID: 20000306 Result: Down-regulated in Transcription
  misc_feature: MA Experiment 20000306 PARAMETER Experiment Name: At_Germinating_Seeds_Sub_P Parameter: Age (hr) Value: 6 vs. 0
  misc_feature: MA Experiment 20000306 PARAMETER Experiment Name: At_Germinating_Seeds_Sub_P Parameter: Organism Value: A. thaliana
  misc_feature: MA Experiment 20000306 PARAMETER Experiment Name: At_Germinating_Seeds_Sub_P Parameter: Plant Line Value: WS
  misc_feature: MA Experiment 20000306 PARAMETER Experiment Name: At_Germinating_Seeds_Sub_P Parameter: Tissue Value: Germinating Seeds
  misc_feature: MA Experiment ID: 20000315 Result: Down-regulated in Transcription
  misc_feature: MA Experiment 20000315 PARAMETER Experiment Name: At_14day_Shoots-Roots_Sub_P Parameter: Age (day) Value: 14
  misc_feature: MA Experiment 20000315 PARAMETER Experiment Name: At_14day_Shoots-Roots_Sub_P Parameter: Organism Value: A. thaliana
  misc_feature: MA Experiment 20000315 PARAMETER Experiment Name: At_14day_Shoots-Roots_Sub_P Parameter: Plant Line Value: WS
  misc_feature: MA Experiment 20000315 PARAMETER Experiment Name: At_14day_Shoots-Roots_Sub_P Parameter: Tissue Value: Shoots vs. Whole Plant
actctcagcctctccttcttcgtttcctaaactcatttttcttcgctctctttagattctttttttctcatatctctccttgatcctctgttttttattctgaggttgtttttcggagaaggaatcacctaaaccctttcaaatctcttcttctaccaaatatatttttttggatgaaaaaaacttctaccaaattctcagattttatttccttgagggttttgtgttttttttgcatggtctagttgatttctgaaatttaagtatatcttgtttacgataatatagaaaaaaattattggtgtttttgtgtgtttataatttatcttgggtcaatgataatagtggacgacgagtcggtgtcttagggtttactttttgtaaagaaaattttcttgttgaattattggctttttgtgaattcgattttctcttatttatataaaacattattgaatttcaacgctattttgaaaattttatttttaatattcatgttgtattagaatctggaatgtcagaagaacgtgtgcaggaacaagaacttggggttggtgtaatagtttaaataaattcttacaaagaataaaaaaaaaatcaggttctctgcaccaaatttttaaaatcattatttaacatattttgctaaattctctaaaaacaaatttgataatgatgaaaattttgattagttctgtgttgtgtttggtgattgcttgaattaagtctgattgaattttagggttatttgagttttgtgtgtctttgagattattgttttacaagaaaaaaaagaaaaaaagagagatggaaacaagaaacgagacaaaagcttcaccggaaaacaacctcagaaacagaggagctgatggaaacaatagcaagaaagacatgattttccgagctgataagattgatttgaagaatttggatatccagctagagaaacatctgagtagggtttggtcaagaagcattgagaagcaccctaagcctaaggaggaatgggaaattgaattggctaaattagagatgaggaatgtcattgctcgtggtgcttatggtattgtctacaaaggcatatatgatggtcaagatgttgctgtgaaagtacttgattggggagaagatggttacgcgacaacggctgagacatctgctctacgtgcttcatttcgtcaagaagttgcggtttggcataagcttgaccatcctaatgtcacaaggtttgtgggagcatcaatgggaacagcgaatttgaagataccttcatcagctgagacggagaactcgttgcctcaacgagcttgttgtgtcgttgtggagtatatccctggaggaactcttaagcagtatttgttccgaaacaggcgaaagaaactcgcttttaaagtcgtggttcaactcgctctcgatctctcccgagggttaagttatttgcattcagagaggattgttcatcgcgatgtgaaaacagagaatatgcttttggattatcagaggaatctaaagattgctgattttggggttgctagagttgaagctcagaatccaaaagacatgactggagaaactggaactcttggatacatggctccagaggttcttgatggcaagccatacaacagaagatgtgatgtttacagctttgggatatgcttgtgggagatttattgttgtgatatgccttatcctgatctcagctttgctgatgtttcttctgctgttgttcgtcagaatctgagaccggatattccaagatgttgtccaacagcattggcgaccataatgaagagatgttgggaagctaatccggagaaacgaccagagatggaggaagttgtgagtttgcttgaagctgtcgacaccaccaaaggcggtggaatgatcccggaagatcagagacctggctgtttctgctttgtctctggtcgtggtccctaattttaccccctctctctttttacctttatttatttacttacttaccttcacattgaattttggagcaatgctctgttttttttcttcttctttaatctgtcaagataaaaaaagattttcattattaatatatatacacattatt

SEQ ID NO: 95714 - protein, 378 aa, Arabidopsis thaliana
  peptide (1)..(378): Ceres Seq. ID no. 12730105
  misc_feature (1)..(378): Homolog of NCBI NO: 18403507 NR Description: expressed protein; protein id: At3g22750.1, by cDNA: gi_14334661, supported by cDNA: gi_17104596 [Arabidopsis
  misc_feature (21)..(378): Homolog of NCBI NO: 15233574 NR Description: kinase like protein; protein id: At4g14780.1
  misc_feature (62)..(378): Homolog of NCBI NO: 15240597 NR Description: protein kinase; protein id: At5g50000.1, by cDNA: 142106. [Arabidopsis thaliana]
  misc_feature (27)..(66): Homolog of NCBI NO: 15240597 NR Description: protein kinase; protein id: At5g50000.1, by cDNA: 142106. [Arabidopsis thaliana]
  misc_feature (62)..(378): Homolog of NCBI NO: 21553402 NR Description: protein kinase [Arabidopsis thaliana]
  misc_feature (27)..(66): Homolog of NCBI NO: 21553402 NR Description: protein kinase [Arabidopsis thaliana]
  misc_feature (60)..(378): Homolog of NCBI NO: 34911620 NR Description: protein kinase -like [Oryza sativa (japonica
  misc_feature (15)..(60): Homolog of NCBI NO: 34911620 NR Description: protein kinase -like [Oryza sativa (japonica
  misc_feature (1)..(378): Homolog of NCBI NO: 15232131 NR Description: putative protein kinase; protein id: At3g01490.1, by cDNA: gi_16323086 [Arabidopsis thaliana] putative protein kinase [Arabidopsis thaliana]
  misc_feature (64)..(378): Homolog of NCBI NO: 29367399 NR Description: putative protein kinase [Oryza sativa (japonica
METRNETKASPENNLRNRGADGNNSKKDMIFRADKIDLKNLDIQLEKHLSRVWSRSIEKHPKPKEEWEIELAKLEMRNVIARGAYGIVYKGIYDGQDVAVKVLDWGEDGYATTAETSALRASFRQEVAVWHKLDHPNVTRFVGASMGTANLKIPSSAETENSLPQRACCVVVEYIPGGTLKQYLFRNRRKKLAFKVVVQLALDLSRGLSYLHSERIVHRDVKTENMLLDYQRNLKIADFGVARVEAQNPKDMTGETGTLGYMAPEVLDGKPYNRRCDVYSFGICLWEIYCCDMPYPDLSFADVSSAVVRQNLRPDIPRCCPTALATIMKRCWEANPEKRPEMEEVVSLLEAVDTTKGGGMIPEDQRPGCFCFVSGRGP

SEQ ID NO: 95715 - protein, 350 aa, Arabidopsis thaliana
  peptide (1)..(350): Ceres Seq. ID no. 12730106
  misc_feature (1)..(350): Homolog of NCBI NO: 18403507 NR Description: expressed protein; protein id: At3g22750.1, by cDNA: gi_14334661, supported by cDNA: gi_17104596 [Arabidopsis
  misc_feature (1)..(350): Homolog of NCBI NO: 15233574 NR Description: kinase like protein; protein id: At4g14780.1
  misc_feature (34)..(350): Homolog of NCBI NO: 15240597 NR Description: protein kinase; protein id: At5g50000.1, by cDNA: 142106. [Arabidopsis thaliana]
  misc_feature (1)..(38): Homolog of NCBI NO: 15240597 NR Description: protein kinase; protein id: At5g50000.1, by cDNA: 142106. [Arabidopsis thaliana]
  misc_feature (34)..(350): Homolog of NCBI NO: 21553402 NR Description: protein kinase [Arabidopsis thaliana]
  misc_feature (1)..(38): Homolog of NCBI NO: 21553402 NR Description: protein kinase [Arabidopsis thaliana]
  misc_feature (32)..(350): Homolog of NCBI NO: 34911620 NR Description: protein kinase -like [Oryza sativa (japonica
  misc_feature (1)..(32): Homolog of NCBI NO: 34911620 NR Description: protein kinase -like [Oryza sativa (japonica
  misc_feature (1)..(350): Homolog of NCBI NO: 15232131 NR Description: putative protein kinase; protein id: At3g01490.1, by cDNA: gi_16323086 [Arabidopsis thaliana] putative protein kinase [Arabidopsis thaliana]
  misc_feature (36)..(350): Homolog of NCBI NO: 29367399 NR Description: putative protein kinase [Oryza sativa (japonica
MIFRADKIDLKNLDIQLEKHLSRVWSRSIEKHPKPKEEWEIELAKLEMRNVIARGAYGIVYKGIYDGQDVAVKVLDWGEDGYATTAETSALRASFRQEVAVWHKLDHPNVTRFVGASMGTANLKIPSSAETENSLPQRACCVVVEYIPGGTLKQYLFRNRRKKLAFKVVVQLALDLSRGLSYLHSERIVHRDVKTENMLLDYQRNLKIADFGVARVEAQNPKDMTGETGTLGYMAPEVLDGKPYNRRCDVYSFGICLWEIYCCDMPYPDLSFADVSSAVVRQNLRPDIPRCCPTALATIMKRCWEANPEKRPEMEEVVSLLEAVDTTKGGGMIPEDQRPGCFCFVSGRGP

SEQ ID NO: 95716 - protein, 303 aa, Arabidopsis thaliana
  peptide (1)..(303): Ceres Seq. ID no. 12730107
  misc_feature (1)..(303): Homolog of NCBI NO: 18403507 NR Description: expressed protein; protein id: At3g22750.1, by cDNA: gi_14334661, supported by cDNA: gi_17104596 [Arabidopsis
  misc_feature (1)..(303): Homolog of NCBI NO: 15233574 NR Description: kinase like protein; protein id: At4g14780.1
  misc_feature (1)..(303): Homolog of NCBI NO: 15240597 NR Description: protein kinase; protein id: At5g50000.1, by cDNA: 142106. [Arabidopsis thaliana]
  misc_feature (1)..(303): Homolog of NCBI NO: 21553402 NR Description: protein kinase [Arabidopsis thaliana]
  misc_feature (1)..(303): Homolog of NCBI NO: 34911620 NR Description: protein kinase -like [Oryza sativa (japonica
  misc_feature (1)..(303): Homolog of NCBI NO: 15232131 NR Description: putative protein kinase; protein id: At3g01490.1, by cDNA: gi_16323086 [Arabidopsis thaliana] putative protein kinase [Arabidopsis thaliana]
  misc_feature (1)..(303): Homolog of NCBI NO: 29367399 NR Description: putative protein kinase [Oryza sativa (japonica
  misc_feature (1)..(303): Homolog of NCBI NO: 15229398 NR Description: ATMRK1; protein id: At3g63260.1, supported by
  misc_feature (1)..(303): Homolog of NCBI NO: 21554375 NR Description: ATMRK1 [Arabidopsis thaliana]
  misc_feature (1)..(302): Homolog of NCBI NO: 14626298 NR Description: putative protein kinase [Oryza sativa (japonica
MRNVIARGAYGIVYKGIYDGQDVAVKVLDWGEDGYATTAETSALRASFRQEVAVWHKLDHPNVTRFVGASMGTANLKIPSSAETENSLPQRACCVVVEYIPGGTLKQYLFRNRRKKLAFKVVVQLALDLSRGLSYLHSERIVHRDVKTENMLLDYQRNLKIADFGVARVEAQNPKDMTGETGTLGYMAPEVLDGKPYNRRCDVYSFGICLWEIYCCDMPYPDLSFADVSSAVVRQNLRPDIPRCCPTALATIMKRCWEANPEKRPEMEEVVSLLEAVDTTKGGGMIPEDQRPGCFCFVSGRGP

SEQ ID NO: 95717 - DNA, 1538 bp, Arabidopsis thaliana
  misc_feature (1)..(1538): Ceres Seq. ID no. 12730108
  misc_feature: MA Experiment ID: 20000267 Result: Up-regulated in Transcription
  misc_feature: MA Experiment 20000267 PARAMETER Experiment Name: At_Drought_P Parameter: Age (day) Value: 7
  misc_feature: MA Experiment 20000267 PARAMETER Experiment Name: At_Drought_P Parameter: Organism Value: A. thaliana
  misc_feature: MA Experiment 20000267 PARAMETER Experiment Name: At_Drought_P Parameter: Plant Line Value: WS
  misc_feature: MA Experiment 20000267 PARAMETER Experiment Name: At_Drought_P Parameter: Timepoint (hr) Value: 6
  misc_feature: MA Experiment 20000267 PARAMETER Experiment Name: At_Drought_P Parameter: Tissue Value: Whole Plant
  misc_feature: MA Experiment 20000267 PARAMETER Experiment Name: At_Drought_P Parameter: Treatment Value: Drought vs. No Drought
  misc_feature: MA Experiment ID: 20000436 Result: Up-regulated in Transcription
  misc_feature: MA Experiment 20000436 PARAMETER Experiment Name: At_Drought_P Parameter: Age (day) Value: 7
  misc_feature: MA Experiment 20000436 PARAMETER Experiment Name: At_Drought_P Parameter: Organism Value: A. thaliana
  misc_feature: MA Experiment 20000436 PARAMETER Experiment Name: At_Drought_P Parameter: Plant Line Value: WS
  misc_feature: MA Experiment 20000436 PARAMETER Experiment Name: At_Drought_P Parameter: Timepoint (hr) Value: 12
  misc_feature: MA Experiment 20000436 PARAMETER Experiment Name: At_Drought_P Parameter: Tissue Value: Whole Plant
  misc_feature: MA Experiment 20000436 PARAMETER Experiment Name: At_Drought_P Parameter: Treatment Value: Drought vs. No Drought
  misc_feature: MA Experiment ID: 20000437 Result: Up-regulated in Transcription
  misc_feature: MA Experiment 20000437 PARAMETER Experiment Name: At_Drought_P Parameter: Age (day) Value: 8
  misc_feature: MA Experiment 20000437 PARAMETER Experiment Name: At_Drought_P Parameter: Organism Value: A. thaliana
  misc_feature: MA Experiment 20000437 PARAMETER Experiment Name: At_Drought_P Parameter: Plant Line Value: WS
  misc_feature: MA Experiment 20000437 PARAMETER Experiment Name: At_Drought_P Parameter: Timepoint (hr) Value: 24
  misc_feature: MA Experiment 20000437 PARAMETER Experiment Name: At_Drought_P Parameter: Tissue Value: Whole Plant
  misc_feature: MA Experiment 20000437 PARAMETER Experiment Name: At_Drought_P Parameter: Treatment Value: Drought vs. No Drought
  misc_feature: MA Experiment ID: 20001904 Result: Up-regulated in Transcription
  misc_feature: MA Experiment 20001904 PARAMETER Experiment Name: At_Drought_Reproduction_P Parameter: Age (day) Value: 37
  misc_feature: MA Experiment 20001904 PARAMETER Experiment Name: At_Drought_Reproduction_P Parameter: Organism Value: A. thaliana
  misc_feature: MA Experiment 20001904 PARAMETER Experiment Name: At_Drought_Reproduction_P Parameter: Plant Line Value: WS
  misc_feature: MA Experiment 20001904 PARAMETER Experiment Name: At_Drought_Reproduction_P Parameter: Timepoint (day) Value: 7
  misc_feature: MA Experiment 20001904 PARAMETER Experiment Name: At_Drought_Reproduction_P Parameter: Tissue Value: Rosettes
  misc_feature: MA Experiment 20001904 PARAMETER Experiment Name: At_Drought_Reproduction_P Parameter: Treatment Value: Drought vs. No Drought
acaaaatatctctccctctatctgcaaattttccaaagttgcatcctttcaatttccactcctctctaatataattcacattttcccactattgctgattcatttttttttgtgaattatttcaaacccacataaaaaaatctttgtttaaatttaaaaccatggatccttcatttaggttcattaaagaggagtttcctgctggattcagtgattctccatcaccaccatcttcttcttcatacctttattcatcttccatggctgaagcagccataaatgatccaacaacattgagctatccacaaccattagaaggtctccatgaatcagggccacctccatttttgacaaagacatatgacttggtggaagattcaagaaccaatcatgtcgtgtcttggagcaaatccaataacagcttcattgtctgggatccacaggccttttctgtaactctccttcccagattcttcaagcacaataacttctccagttttgtccgccagctcaacacatatggtttcagaaaggtgaatccggatcggtgggagtttgcaaacgaagggtttcttagagggcaaaagcatctcctcaagaacataaggagaagaaaaacaagtaataatagtaatcaaatgcaacaacctcaaagttctgaacaacaatctctagacaatttttgcatagaagtgggtaggtacggtctagatggagagatggacagcctaaggcgagacaagcaagtgttgatgatggagctagtgagactaagacagcaacaacaaagcaccaaaatgtatctcacattgattgaagagaagctcaagaagaccgagtcaaaacaaaaacaaatgatgagcttccttgcccgcgcaatgcagaatccagattttattcagcagctagtagagcagaaggaaaagaggaaagagatcgaagaggcgatcagcaagaagagacaaagaccgatcgatcaaggaaaaagaaatgtggaagattatggtgatgaaagtggttatgggaatgatgttgcagcctcatcctcagcattgattggtatgagtcaggaatatacatatggaaacatgtctgaattcgagatgtcggagttggacaaacttgctatgcacattcaaggacttggagataattccagtgctagggaagaagtcttgaatgtggaaaaaggaaatgatgaggaagaagtagaagatcaacaacaagggtaccataaggagaacaatgagatttatggtgaaggtttttgggaagatttgttaaatgaaggtcaaaattttgattttgaaggagatcaagaaaatgttgatgtgttaattcagcaacttggttatttgggttctagttcacacactaattaagaagaaattgaaatgatgactactttaagcatttgaatcaacttgtttcctattagtaatttggctttgtttcaatcaagtgagtcgtggactaacttattgaatttgggggttaaatccgtttcttatttttggaaataaaattgctttttgttt

SEQ ID NO: 95718 - protein, 406 aa, Arabidopsis thaliana
  peptide (1)..(406): Ceres Seq. ID no. 12730109
  misc_feature (60)..(236): Pfam Name: HSF-type DNA-binding Pfam Description: HSF-type DNA-binding
  misc_feature (1)..(406): Homolog of NCBI NO: 15228865 NR Description: putative heat shock protein; protein id: supported by cDNA: gi_15028342, supported by cDNA: gi_19310748
  misc_feature (48)..(347): Homolog of NCBI NO: 37534406 NR Description: putative auxin-induced protein [Oryza sativa
  misc_feature (48)..(367): Homolog of NCBI NO: 28971956 NR Description: putative heat shock transcription factor [Oryza
  misc_feature (48)..(367): Homolog of NCBI NO: 33087081 NR Description: heat stress protein [Oryza sativa (japonica
  misc_feature (37)..(268): Homolog of NCBI NO: 15225255 NR Description: putative heat shock transcription factor; protein At2g26150.1 [Arabidopsis thaliana] >gi|7485001|pir||T02609
  misc_feature (45)..(272): Homolog of NCBI NO: 30017583 NR Description: putative heat shock factor [Oryza sativa
  misc_feature (50)..(352): Homolog of NCBI NO: 729774 NR Description: HEAT SHOCK FACTOR PROTEIN HSF30 (HEAT SHOCK FACTOR 30) (HSTF 30) (HEAT STRESS TRANSCRIPTION FACTOR)
  misc_feature (35)..(335): Homolog of NCBI NO: 29126355 NR Description: putative heat shock transcription factor [Oryza
  misc_feature (31)..(268): Homolog of NCBI NO: 729775 NR Description: HEAT SHOCK FACTOR PROTEIN HSF8 (HEAT SHOCK FACTOR 8) (HSTF 8) (HEAT STRESS TRANSCRIPTION FACTOR)
  misc_feature (31)..(268): Homolog of NCBI NO: 11386827 NR Description: Heat shock factor protein HSF8 (Heat shock factor 8) (HSTF 8) (Heat stress transcription factor)
MDPSFRFIKEEFPAGFSDSPSPPSSSSYLYSSSMAEAAINDPTTLSYPQPLEGLHESGPPPFLTKTYDLVEDSRTNHVVSWSKSNNSFIVWDPQAFSVTLLPRFFKHNNFSSFVRQLNTYGFRKVNPDRWEFANEGFLRGQKHLLKNIRRRKTSNNSNQMQQPQSSEQQSLDNFCIEVGRYGLDGEMDSLRRDKQVLMMELVRLRQQQQSTKMYLTLIEEKLKKTESKQKQMMSFLARAMQNPDFIQQLVEQKEKRKEIEEAISKKRQRPIDQGKRNVEDYGDESGYGNDVAASSSALIGMSQEYTYGNMSEFEMSELDKLAMHIQGLGDNSSAREEVLNVEKGNDEEEVEDQQQGYHKENNEIYGEGFWEDLLNEGQNFDFEGDQENVDVLIQQLGYLGSSSHTN

SEQ ID NO: 95719 - protein, 373 aa, Arabidopsis thaliana
  peptide (1)..(373): Ceres Seq. ID no. 12730110
  misc_feature (27)..(203): Pfam Name: HSF-type DNA-binding Pfam Description: HSF-type DNA-binding
  misc_feature (1)..(373): Homolog of NCBI NO: 15228865 NR Description: putative heat shock protein; protein id: supported by cDNA: gi_15028342, supported by cDNA: gi_19310748
  misc_feature (15)..(314): Homolog of NCBI NO: 37534406 NR Description: putative auxin-induced protein [Oryza sativa
  misc_feature (15)..(334): Homolog of NCBI NO: 28971956 NR Description: putative heat shock transcription factor [Oryza
  misc_feature (15)..(334): Homolog of NCBI NO: 33087081 NR Description: heat stress protein [Oryza sativa (japonica
  misc_feature (4)..(235): Homolog of NCBI NO: 15225255 NR Description: putative heat shock transcription factor; protein At2g26150.1 [Arabidopsis thaliana] >gi|7485001|pir||T02609
  misc_feature (12)..(239): Homolog of NCBI NO: 30017583 NR Description: putative heat shock factor [Oryza sativa
  misc_feature (17)..(319): Homolog of NCBI NO: 729774 NR Description: HEAT SHOCK FACTOR PROTEIN HSF30 (HEAT SHOCK FACTOR 30) (HSTF 30) (HEAT STRESS TRANSCRIPTION FACTOR)
  misc_feature (2)..(302): Homolog of NCBI NO: 29126355 NR Description: putative heat shock transcription factor [Oryza
  misc_feature (1)..(235): Homolog of NCBI NO: 729775 NR Description: HEAT SHOCK FACTOR PROTEIN HSF8 (HEAT SHOCK FACTOR 8) (HSTF 8) (HEAT STRESS TRANSCRIPTION FACTOR)
  misc_feature (1)..(235): Homolog of NCBI NO: 11386827 NR Description: Heat shock factor protein HSF8 (Heat shock factor 8) (HSTF 8) (Heat stress transcription factor)
MAEAAINDPTTLSYPQPLEGLHESGPPPFLTKTYDLVEDSRTNHVVSWSKSNNSFIVWDPQAFSVTLLPRFFKHNNFSSFVRQLNTYGFRKVNPDRWEFANEGFLRGQKHLLKNIRRRKTSNNSNQMQQPQSSEQQSLDNFCIEVGRYGLDGEMDSLRRDKQVLMMELVRLRQQQQSTKMYLTLIEEKLKKTESKQKQMMSFLARAMQNPDFIQQLVEQKEKRKEIEEAISKKRQRPIDQGKRNVEDYGDESGYGNDVAASSSALIGMSQEYTYGNMSEFEMSELDKLAMHIQGLGDNSSAREEVLNVEKGNDEEEVEDQQQGYHKENNEIYGEGFWEDLLNEGQNFDFEGDQENVDVLIQQLGYLGSSSHTN

SEQ ID NO: 95720 - protein, 247 aa, Arabidopsis thaliana
  peptide (1)..(247): Ceres Seq. ID no. 12730111
  misc_feature (1)..(77): Pfam Name: HSF-type DNA-binding Pfam Description: HSF-type DNA-binding
  misc_feature (1)..(247): Homolog of NCBI NO: 15228865 NR Description: putative heat shock protein; protein id: supported by cDNA: gi_15028342, supported by cDNA: gi_19310748
  misc_feature (1)..(188): Homolog of NCBI NO: 37534406 NR Description: putative auxin-induced protein [Oryza sativa
  misc_feature (1)..(208): Homolog of NCBI NO: 28971956 NR Description: putative heat shock transcription factor [Oryza
  misc_feature (1)..(208): Homolog of NCBI NO: 33087081 NR Description: heat stress protein [Oryza sativa (japonica
  misc_feature (1)..(109): Homolog of NCBI NO: 15225255 NR Description: putative heat shock transcription factor; protein At2g26150.1 [Arabidopsis thaliana] >gi|7485001|pir||T02609
  misc_feature (1)..(113): Homolog of NCBI NO: 30017583 NR Description: putative heat shock factor [Oryza sativa
  misc_feature (1)..(193): Homolog of NCBI NO: 729774 NR Description: HEAT SHOCK FACTOR PROTEIN HSF30 (HEAT SHOCK FACTOR 30) (HSTF 30) (HEAT STRESS TRANSCRIPTION FACTOR)
  misc_feature (1)..(176): Homolog of NCBI NO: 29126355 NR Description: putative heat shock transcription factor [Oryza
  misc_feature (1)..(109): Homolog of NCBI NO: 729775 NR Description: HEAT SHOCK FACTOR PROTEIN HSF8 (HEAT SHOCK FACTOR 8) (HSTF 8) (HEAT STRESS TRANSCRIPTION FACTOR)
  misc_feature (1)..(109): Homolog of NCBI NO: 11386827 NR Description: Heat shock factor protein HSF8 (Heat shock factor 8) (HSTF 8) (Heat stress transcription factor)
MQQPQSSEQQSLDNFCIEVGRYGLDGEMDSLRRDKQVLMMELVRLRQQQQSTKMYLTLIEEKLKKTESKQKQMMSFLARAMQNPDFIQQLVEQKEKRKEIEEAISKKRQRPIDQGKRNVEDYGDESGYGNDVAASSSALIGMSQEYTYGNMSEFEMSELDKLAMHIQGLGDNSSAREEVLNVEKGNDEEEVEDQQQGYHKENNEIYGEGFWEDLLNEGQNFDFEGDQENVDVLIQQLGYLGSSSHTN

SEQ ID NO: 95721 - DNA, 345 bp, Arabidopsis thaliana
  misc_feature (1)..(345): Ceres Seq. ID no. 12730112
  misc_feature: MA Experiment ID: 20000179 Result: Up-regulated in Transcription
  misc_feature: MA Experiment 20000179 PARAMETER Experiment Name: At_Germinating_Seeds_P Parameter: Age (hr) Value: 6 vs. 0
  misc_feature: MA Experiment 20000179 PARAMETER Experiment Name: At_Germinating_Seeds_P Parameter: Tissue Value: Germinating Seeds
  misc_feature: MA Experiment ID: 20000182 Result: Up-regulated in Transcription
  misc_feature: MA Experiment 20000182 PARAMETER Experiment Name: At_2mM_SA_P Parameter: Age (day) Value: 14
  misc_feature: MA Experiment 20000182 PARAMETER Experiment Name: At_2mM_SA_P Parameter: Organism Value: A. thaliana
  misc_feature: MA Experiment 20000182 PARAMETER Experiment Name: At_2mM_SA_P Parameter: Plant Line Value: WS
  misc_feature: MA Experiment 20000182 PARAMETER Experiment Name: At_2mM_SA_P Parameter: Timepoint (hr) Value: 6
  misc_feature: MA Experiment 20000182 PARAMETER Experiment Name: At_2mM_SA_P Parameter: Tissue Value: Aerial
  misc_feature: MA Experiment 20000182 PARAMETER Experiment Name: At_2mM_SA_P Parameter: Treatment Value: 2mM SA vs. No Treatment
  misc_feature: MA Experiment ID: 20000234 Result: Up-regulated in Transcription
  misc_feature: MA Experiment 20000234 PARAMETER Experiment Name: At_Siliques_P Parameter: Age (day) Value: 21
  misc_feature: MA Experiment 20000234 PARAMETER Experiment Name: At_Siliques_P Parameter: Organism Value: A. thaliana
  misc_feature: MA Experiment 20000234 PARAMETER Experiment Name: At_Siliques_P Parameter: Plant Line Value: WS
  misc_feature: MA Experiment 20000234 PARAMETER Experiment Name: At_Siliques_P Parameter: Tissue Value: Less Than 5mm Siliques vs. Whole Plant
atgtacaaattttgtttccacaatccttattctactcctgaaactgtctccttttatattcatgttggtcatattcctaatgagcatgacttagccaaagatgaacatttggacccggtaaatgttaagatagctgagttgagagaggctttggaatctgttgttgctgagcagaagtatttgaaagctcgtgacactcgtcaccgtcatacgaatgagagcacgagaaagcgagtgatattctacacagtaggagagtacattttccttgccgcagctagtggacttcaagttctctacatccgcaagctcttcagcaagtcggtagcatacaacagagtttga

SEQ ID NO: 95722 - protein, 114 aa, Arabidopsis thaliana; identical to SEQ ID NO: 48173
  peptide (1)..(114): Ceres Seq. ID no. 12730113
  misc_feature (1)..(111): Pfam Name: emp24/gp25L/p24 family Pfam Description: emp24/gp25L/p24 family
  misc_feature (1)..(114): Homolog of NCBI NO: 17979492 NR Description: AT3g22845/MWI23_22 [Arabidopsis thaliana]
  misc_feature (1)..(114): Homolog of NCBI NO: 22331264 NR Description: hypothetical protein; protein id: At3g22845.1, by cDNA: gi_17979491, supported by cDNA: gi_20147304 [Arabidopsis
  misc_feature (1)..(114): Homolog of NCBI NO: 30017578 NR Description: putative cop-coated vesicle membrane protein
  misc_feature (1)..(114): Homolog of NCBI NO: 15231496 NR Description: putative coated vesicle membrane protein; protein At3g07680.1, supported by cDNA: 8095., supported by cDNA: [Arabidopsis thaliana] >gi|6466951|gb|AAF13086.1|AC009176_13
  misc_feature (1)..(114): Homolog of NCBI NO: 21595553 NR Description: putative coated vesicle membrane protein
  misc_feature (1)..(105): Homolog of NCBI NO: 40056982 NR Description: emp24/gp25L/p24 family protein [Dictyostelium
  misc_feature (1)..(105): Homolog of NCBI NO: 4514557 NR Description: COP-coated vesicle membrane protein P24 homolog
  misc_feature (2)..(105): Homolog of NCBI NO: 29477153 NR Description: Similar to coated vesicle membrane protein [Danio
  misc_feature (2)..(105): Homolog of NCBI NO: 1352660 NR Description: Cop-coated vesicle membrane protein p24 precursor
  misc_feature (2)..(105): Homolog of NCBI NO: 5803149 NR Description: coated vesicle membrane protein [Homo sapiens]

SEQ ID NO: 95723 - DNA, 699 bp, Arabidopsis thaliana
  misc_feature (1)..(699): Ceres Seq. ID no. 12730122
  misc_feature: MA Experiment ID: 20000307 Result: Down-regulated in Transcription
  misc_feature: MA Experiment 20000307 PARAMETER Experiment Name: At_Germinating_Seeds_Sub_P Parameter: Age (hr) Value: 24 vs. 0
  misc_feature: MA Experiment 20000307 PARAMETER Experiment Name: At_Germinating_Seeds_Sub_P Parameter: Organism Value: A. thaliana
  misc_feature: MA Experiment 20000307 PARAMETER Experiment Name: At_Germinating_Seeds_Sub_P Parameter: Plant Line Value: WS
  misc_feature: MA Experiment 20000307 PARAMETER Experiment Name: At_Germinating_Seeds_Sub_P Parameter: Tissue Value: Germinating Seeds
atggctaaccctaaagttttctttgatttgaccgtggatggcaaacccgctggtcggatcgtgatagagctcttcgctgacttgactccacggacggcggagaacttcaggggtctgtgtaccggcgagagaggcatcggaaagtgtggtaaaccaatccactacaaaggatcaaccttcgaccatattgttcccgatctcatgtggtgtggaggagatatcatcttcgaaaacgaacccatccacagcgaagaattagacgacgagtactttatcttgaaccacgaagacggtccaggtatcatctccatggccgactccaacggatctcagttccaaatccacatgaaggactatggcttgcaagtggacggtgatcacgttgtgatcggcaaagttgttgaaggattggatcttatgaggaacattgagaaggaggtcataactacgacaacaaggacgccttcaaagcctgtggtgatcgcggactgcggtgagctttcagattataggtcagaaagatgttatcttatgaagaacattgagaaggaggtcataattaaaacagcaaaggataacaagcccgtggtgattgcggactgcggtgggctttcagatgatagatctgaaagatattatcttataaatatagttgttgcttgcatggttttgatgtgtttttggtcttggttcgtttaa

SEQ ID NO: 95724 - protein, 232 aa, Arabidopsis thaliana
  peptide (1)..(232): Ceres Seq. ID no. 12730123
  misc_feature (1)..(232): Homolog of NCBI NO: 15228892 NR Description: cyclophilin, putative; protein id: At3g22920.1
  misc_feature (2)..(168): Homolog of NCBI NO: 18076088 NR Description: cyclophilin [Ricinus communis]
  misc_feature (1)..(168): Homolog of NCBI NO: 6014890 NR Description: Peptidyl-prolyl cis-trans isomerase (PPIase)
  misc_feature (3)..(168): Homolog of NCBI NO: 15227259 NR Description: cytosolic cyclophilin (ROC3); protein id: supported by cDNA: 23995., supported by cDNA: gi_1305454, by cDNA: gi_15081645, supported by cDNA: gi_20147152 [Arabidopsis
  misc_feature (1)..(167): Homolog of NCBI NO: 118103 NR Description: Peptidyl-prolyl cis-trans isomerase (PPIase)
  misc_feature (1)..(168): Homolog of NCBI NO: 15234781 NR Description: peptidylprolyl isomerase ROC1; protein id: supported by cDNA: 41363. [Arabidopsis thaliana]
  misc_feature (1)..(167): Homolog of NCBI NO: 68406 NR Description: peptidylprolyl isomerase (EC 5.2.1.8) - tomato
  misc_feature (1)..(168): Homolog of NCBI NO: 29124975 NR Description: cyclophilin [Populus tremuloides]
  misc_feature (1)..(168): Homolog of NCBI NO: 18146786 NR Description: CYP1 [Vigna radiata]
  misc_feature (1)..(167): Homolog of NCBI NO: 13925734 NR Description: cyclophilin A-2 [Triticum aestivum]
MANPKVFFDLTVDGKPAGRIVIELFADLTPRTAENFRGLCTGERGIGKCGKPIHYKGSTFDHIVPDLMWCGGDIIFENEPIHSEELDDEYFILNHEDGPGIISMADSNGSQFQIHMKDYGLQVDGDHVVIGKVVEGLDLMRNIEKEVITTTTRTPSKPVVIADCGELSDYRSERCYLMKNIEKEVIIKTAKDNKPVVIADCGGLSDDRSERYYLINIVVACMVLMCFWSWFV

SEQ ID NO: 95725 - protein, 165 aa, Arabidopsis thaliana
  peptide (1)..(165): Ceres Seq. ID no. 12730124
  misc_feature (1)..(165): Homolog of NCBI NO: 15228892 NR Description: cyclophilin, putative; protein id: At3g22920.1
  misc_feature (1)..(101): Homolog of NCBI NO: 18076088 NR Description: cyclophilin [Ricinus communis]
  misc_feature (1)..(101): Homolog of NCBI NO: 6014890 NR Description: Peptidyl-prolyl cis-trans isomerase (PPIase)
  misc_feature (1)..(101): Homolog of NCBI NO: 15227259 NR Description: cytosolic cyclophilin (ROC3); protein id: supported by cDNA: 23995., supported by cDNA: gi_1305454, by cDNA: gi_15081645, supported by cDNA: gi_20147152 [Arabidopsis
  misc_feature (1)..(100): Homolog of NCBI NO: 118103 NR Description: Peptidyl-prolyl cis-trans isomerase (PPIase)
  misc_feature (1)..(101): Homolog of NCBI NO: 15234781 NR Description: peptidylprolyl isomerase ROC1; protein id: supported by cDNA: 41363. [Arabidopsis thaliana]
  misc_feature (1)..(100): Homolog of NCBI NO: 68406 NR Description: peptidylprolyl isomerase (EC 5.2.1.8) - tomato
  misc_feature (1)..(101): Homolog of NCBI NO: 29124975 NR Description: cyclophilin [Populus tremuloides]
  misc_feature (1)..(101): Homolog of NCBI NO: 18146786 NR Description: CYP1 [Vigna radiata]
  misc_feature (1)..(100): Homolog of NCBI NO: 13925734 NR Description: cyclophilin A-2 [Triticum aestivum]
MWCGGDIIFENEPIHSEELDDEYFILNHEDGPGIISMADSNGSQFQIHMKDYGLQVDGDHVVIGKVVEGLDLMRNIEKEVITTTTRTPSKPVVIADCGELSDYRSERCYLMKNIEKEVIIKTAKDNKPVVIADCGGLSDDRSERYYLINIVVACMVLMCFWSWFV

SEQ ID NO: 95726 - protein, 129 aa, Arabidopsis thaliana
  peptide (1)..(129): Ceres Seq. ID no. 12730125
  misc_feature (1)..(129): Homolog of NCBI NO: 15228892 NR Description: cyclophilin, putative; protein id: At3g22920.1
  misc_feature (1)..(65): Homolog of NCBI NO: 18076088 NR Description: cyclophilin [Ricinus communis]
  misc_feature (1)..(65): Homolog of NCBI NO: 6014890 NR Description: Peptidyl-prolyl cis-trans isomerase (PPIase)
  misc_feature (1)..(65): Homolog of NCBI NO: 15227259 NR Description: cytosolic cyclophilin (ROC3); protein id: supported by cDNA: 23995., supported by cDNA: gi_1305454, by cDNA: gi_15081645, supported by cDNA: gi_20147152 [Arabidopsis
  misc_feature (1)..(64): Homolog of NCBI NO: 118103 NR Description: Peptidyl-prolyl cis-trans isomerase (PPIase)
  misc_feature (1)..(65): Homolog of NCBI NO: 15234781 NR Description: peptidylprolyl isomerase ROC1; protein id: supported by cDNA: 41363. [Arabidopsis thaliana]
  misc_feature (1)..(64): Homolog of NCBI NO: 68406 NR Description: peptidylprolyl isomerase (EC 5.2.1.8) - tomato
  misc_feature (1)..(65): Homolog of NCBI NO: 29124975 NR Description: cyclophilin [Populus tremuloides]
  misc_feature (1)..(65): Homolog of NCBI NO: 18146786 NR Description: CYP1 [Vigna radiata]
  misc_feature (1)..(64): Homolog of NCBI NO: 13925734 NR Description: cyclophilin A-2 [Triticum aestivum]
MADSNGSQFQIHMKDYGLQVDGDHVVIGKVVEGLDLMRNIEKEVITTTTRTPSKPVVIADCGELSDYRSERCYLMKNIEKEVIIKTAKDNKPVVIADCGGLSDDRSERYYLINIVVACMVLMCFWSWFV

SEQ ID NO: 95727 - DNA, 1470 bp, Arabidopsis thaliana
  misc_feature (1)..(1470): Ceres Seq. ID no. 12730134
  misc_feature: MA Experiment ID: 20000315 Result: Up-regulated in Transcription
  misc_feature: MA Experiment 20000315 PARAMETER Experiment Name: At_14day_Shoots-Roots_Sub_P Parameter: Age (day) Value: 14
  misc_feature: MA Experiment 20000315 PARAMETER Experiment Name: At_14day_Shoots-Roots_Sub_P Parameter: Organism Value: A. thaliana
  misc_feature: MA Experiment 20000315 PARAMETER Experiment Name: At_14day_Shoots-Roots_Sub_P Parameter: Plant Line Value: WS
  misc_feature: MA Experiment 20000315 PARAMETER Experiment Name: At_14day_Shoots-Roots_Sub_P Parameter: Tissue Value: Shoots vs. Whole Plant
  misc_feature: MA Experiment ID: 20000328 Result: Up-regulated in Transcription
  misc_feature: MA Experiment 20000328 PARAMETER Experiment Name: At_42deg_Heat_Sub_P Parameter: Age (day) Value: 14
  misc_feature: MA Experiment 20000328 PARAMETER Experiment Name: At_42deg_Heat_Sub_P Parameter: Organism Value: A. thaliana
  misc_feature: MA Experiment 20000328 PARAMETER Experiment Name: At_42deg_Heat_Sub_P Parameter: Plant Line Value: WS
  misc_feature: MA Experiment 20000328 PARAMETER Experiment Name: At_42deg_Heat_Sub_P Parameter: Temperature (deg C) Value: 42 vs. 22
  misc_feature: MA Experiment 20000328 PARAMETER Experiment Name: At_42deg_Heat_Sub_P Parameter: Timepoint (hr) Value: 6
  misc_feature: MA Experiment 20000328 PARAMETER Experiment Name: At_42deg_Heat_Sub_P Parameter: Tissue Value: Aerial
  misc_feature: MA Experiment ID: 20000329 Result: Up-regulated in Transcription
  misc_feature: MA Experiment 20000329 PARAMETER Experiment Name: At_4deg_Cold_Sub_P Parameter: Age (day) Value: 14
  misc_feature: MA Experiment 20000329 PARAMETER Experiment Name: At_4deg_Cold_Sub_P Parameter: Organism Value: A. thaliana
  misc_feature: MA Experiment 20000329 PARAMETER Experiment Name: At_4deg_Cold_Sub_P Parameter: Plant Line Value: WS
  misc_feature: MA Experiment 20000329 PARAMETER Experiment Name: At_4deg_Cold_Sub_P Parameter: Temperature (deg C) Value: 4 vs. 22
  misc_feature: MA Experiment 20000329 PARAMETER Experiment Name: At_4deg_Cold_Sub_P Parameter: Timepoint (hr) Value: 6
  misc_feature: MA Experiment 20000329 PARAMETER Experiment Name: At_4deg_Cold_Sub_P Parameter: Tissue Value: Aerial
  misc_feature: MA Experiment ID: 20000355 Result: Down-regulated in Transcription
  misc_feature: MA Experiment 20000355 PARAMETER Experiment Name: At_Siliques_Sub_P Parameter: Age (day) Value: 21
  misc_feature: MA Experiment 20000355 PARAMETER Experiment Name: At_Siliques_Sub_P Parameter: Organism Value: A. thaliana
  misc_feature: MA Experiment 20000355 PARAMETER Experiment Name: At_Siliques_Sub_P Parameter: Plant Line Value: WS
  misc_feature: MA Experiment 20000355 PARAMETER Experiment Name: At_Siliques_Sub_P Parameter: Tissue Value: Less Than 5mm Siliques vs. Whole Plant
  misc_feature: MA Experiment ID: 20000440 Result: Down-regulated in Transcription
  misc_feature: MA Experiment 20000440 PARAMETER Experiment Name: At_Closed-Flower__Sub_P Parameter: Tissue Value: Closed Flower vs. Whole Plant
gtccctgaaacctctcttcagaaaactcaggcaccattttctccttccgccgccgccatggaatcacttccccagccgcaaaaccaatcatctccggcaacaactccggcgaagatcctccttgggaaatacgaactcggtcgtcgtctcggtagcggaagcttcgcgaaagtccatttagctcgatcaatcgaatccgacgagctcgtcgccgttaaaatcatcgagaagaagaaaacaatcgaatccggtatggaaccaagaataatcagagagatcgatgcgatgcgtcgtcttcgtcatcatccaaacatactcaagatccatgaagttatggcaaccaaatctaagatctatctcgtaatggaactcgcttccggtggtgaacttttctcaaaagtcctccgtcgtggacgtcttcctgaatcaacggcgcgtcgttactttcaacaactcgcctccgctcttcgtttctctcaccaagacggtgtcgctcaccgtgatgtgaaacctcagaatctactcttagatgagcaaggtaacctcaaggtctctgactttggtttatcagctttaccggagcatctacaaaacggattgcttcacacggcgtgtggtactccggcttatacagctccggaggttatttcacggaggggatacgacggagcaaaagctgatgcgtggtcttgtggtgtgattttgtttgttttattggttggcgatgttccatttgatgattcgaatatcgctgcgatgtatcggaagattcatcggagagattatcggtttccgagctggatttcgaaacaagctaaatcgataatctatcagatgttagatccgaatccagtaacgaggatgagtattgaaacagtgatgaaaacgaattggttcaagaagtctctagagacttctgagtttcatcgtaacgtctttgattcggaagtagagatgaaatcgagtgttaattcgattactgcttttgatttgatctcgttatcgtcgggattagatctttctggattgtttgaggctaagaagaagaaggagaggagattcacggcgaaggtttcgggtgttgaagtggaggagaaggcgaagatgattggggagaagttaggttatgtagtgaagaagaagatgatgaagaaggaaggagaagtgaaggttgttggattagggagaggaagaactgtgattgtggtggaagcagtggagttaacggtggatgttgtggtggttgaagtgaaagttgttgaaggtgaagaagatgattcacggtggtctgatttgattactgagcttgaagatatagttctttcatggcacaatgacatcatgtaaatagattgtgactttgtggattttagtctcttttttgttttgtttctgttcagttttgtataatccatgaagaaatcaaaatctcccgcttcattgtcttttggtaaatctcgagagatctat

SEQ ID NO: 95728 - protein, 448 aa, Arabidopsis thaliana
  peptide (1)..(448): Ceres Seq. ID no. 12730135
  misc_feature (44)..(299): Pfam Name: Protein kinase domain Pfam Description: Protein kinase domain
  misc_feature (20)..(448): Homolog of NCBI NO: 15228920 NR Description: SNF1 related protein kinase (ATSRPK1); protein At3g23000.1, supported by cDNA: gi_13249112, supported by cDNA: supported by cDNA: gi_15451211, supported by cDNA: gi_5478790,
  misc_feature (20)..(448): Homolog of NCBI NO: 9798601 NR Description: serine/threonine protein kinase [Arabidopsis
  misc_feature (20)..(448): Homolog of NCBI NO: 15451212 NR Description: SNF1 related protein kinase [Arabidopsis thaliana]
  misc_feature (20)..(445): Homolog of NCBI NO: 15233500 NR Description: SNF1 like protein kinase; protein id: supported by cDNA: gi_13249502 [Arabidopsis thaliana]
  misc_feature (26)..(327): Homolog of NCBI NO: 15218854 NR Description: protein kinase PK4, putative; protein id: supported by cDNA: gi_14334387 [Arabidopsis thaliana]
  misc_feature (324)..(448): Homolog of NCBI NO: 15218854 NR Description: protein kinase PK4, putative; protein id: supported by cDNA: gi_14334387 [Arabidopsis thaliana]
  misc_feature (15)..(317): Homolog of NCBI NO: 5821067 NR Description: OsPK4 [Oryza sativa]
  misc_feature (325)..(426): Homolog of NCBI NO: 5821067 NR Description: OsPK4 [Oryza sativa]
  misc_feature (39)..(444): Homolog of NCBI NO: 15241066 NR Description: serine/threonine protein kinase ATPK10; protein At5g01810.1, supported by cDNA: gi_13249133, supported by cDNA: supported by cDNA: gi_1777311 [Arabidopsis thaliana]
  misc_feature (39)..(444): Homolog of NCBI NO: 1777312 NR Description: novel serine/threonine protein kinase
VPETSLQKTQAPFSPSAAAMESLPQPQNQSSPATTPAKILLGKYELGRRLGSGSFAKVHLARSIESDELVAVKIIEKKKTIESGMEPRIIREIDAMRRLRHHPNILKIHEVMATKSKIYLVMELASGGELFSKVLRRGRLPESTARRYFQQLASALRFSHQDGVAHRDVKPQNLLLDEQGNLKVSDFGLSALPEHLQNGLLHTACGTPAYTAPEVISRRGYDGAKADAWSCGVILFVLLVGDVPFDDSNIAAMYRKIHRRDYRFPSWISKQAKSIIYQMLDPNPVTRMSIETVMKTNWFKKSLETSEFHRNVFDSEVEMKSSVNSITAFDLISLSSGLDLSGLFEAKKKKERRFTAKVSGVEVEEKAKMIGEKLGYVVKKKMMKKEGEVKVVGLGRGRTVIVVEAVELTVDVVVVEVKVVEGEEDDSRWSDLITELEDIVLSWHNDIM

SEQ ID NO: 95729 - protein, 429 aa, Arabidopsis thaliana; identical to SEQ ID NO: 76289
  peptide (1)..(429): Ceres Seq. ID no. 12730136
  misc_feature (25)..(280): Pfam Name: Protein kinase domain Pfam Description: Protein kinase domain
  misc_feature (1)..(429): Homolog of NCBI NO: 15228920 NR Description: SNF1 related protein kinase (ATSRPK1); protein At3g23000.1, supported by cDNA: gi_13249112, supported by cDNA: supported by cDNA: gi_15451211, supported by cDNA: gi_5478790,
  misc_feature (1)..(429): Homolog of NCBI NO: 9798601 NR Description: serine/threonine protein kinase [Arabidopsis
  misc_feature (1)..(429): Homolog of NCBI NO: 15451212 NR Description: SNF1 related protein kinase [Arabidopsis thaliana]
  misc_feature (1)..(426): Homolog of NCBI NO: 15233500 NR Description: SNF1 like protein kinase; protein id: supported by cDNA: gi_13249502 [Arabidopsis thaliana]
  misc_feature (7)..(308): Homolog of NCBI NO: 15218854 NR Description: protein kinase PK4, putative; protein id: supported by cDNA: gi_14334387 [Arabidopsis thaliana]
  misc_feature (305)..(429): Homolog of NCBI NO: 15218854 NR Description: protein kinase PK4, putative; protein id: supported by cDNA: gi_14334387 [Arabidopsis thaliana]
  misc_feature (1)..(298): Homolog of NCBI NO: 5821067 NR Description: OsPK4 [Oryza sativa]
  misc_feature (306)..(407): Homolog of NCBI NO: 5821067 NR Description: OsPK4 [Oryza sativa]
  misc_feature (20)..(425): Homolog of NCBI NO: 15241066 NR Description: serine/threonine protein kinase ATPK10; protein At5g01810.1, supported by cDNA: gi_13249133, supported by cDNA: supported by cDNA: gi_1777311 [Arabidopsis thaliana]
  misc_feature (20)..(425): Homolog of NCBI NO: 1777312 NR Description: novel serine/threonine protein kinase

SEQ ID NO: 95730 - protein, 364 aa, Arabidopsis thaliana; identical to SEQ ID NO: 76290
  peptide (1)..(364): Ceres Seq. ID no. 12730137
  misc_feature (1)..(215): Pfam Name: Protein kinase domain Pfam Description: Protein kinase domain
  misc_feature (1)..(364): Homolog of NCBI NO: 15228920 NR Description: SNF1 related protein kinase (ATSRPK1); protein At3g23000.1, supported by cDNA: gi_13249112, supported by cDNA: supported by cDNA: gi_15451211, supported by cDNA: gi_5478790,
  misc_feature (1)..(364): Homolog of NCBI NO: 9798601 NR Description: serine/threonine protein kinase [Arabidopsis
  misc_feature (1)..(364): Homolog of NCBI NO: 15451212 NR Description: SNF1 related protein kinase [Arabidopsis thaliana]
  misc_feature (1)..(361): Homolog of NCBI NO: 15233500 NR Description: SNF1 like protein kinase; protein id: supported by cDNA: gi_13249502 [Arabidopsis thaliana]
  misc_feature (1)..(243): Homolog of NCBI NO: 15218854 NR Description: protein kinase PK4, putative; protein id: supported by cDNA: gi_14334387 [Arabidopsis thaliana]
  misc_feature (240)..(364): Homolog of NCBI NO: 15218854 NR Description: protein kinase PK4, putative; protein id: supported by cDNA: gi_14334387 [Arabidopsis thaliana]
  misc_feature (1)..(233): Homolog of NCBI NO: 5821067 NR Description: OsPK4 [Oryza sativa]
  misc_feature (241)..(342): Homolog of NCBI NO: 5821067 NR Description: OsPK4 [Oryza sativa]
  misc_feature (1)..(360): Homolog of NCBI NO: 15241066 NR Description: serine/threonine protein kinase ATPK10; protein At5g01810.1, supported by cDNA: gi_13249133, supported by cDNA: supported by cDNA: gi_1777311 [Arabidopsis thaliana]
  misc_feature (1)..(360): Homolog of NCBI NO: 1777312 NR Description: novel serine/threonine protein kinase

SEQ ID NO: 95731 - DNA, 1017 bp, Arabidopsis thaliana
  misc_feature (1)..(1017): Ceres Seq. ID no. 12730142
  misc_feature: MA Experiment ID: 20000180 Result: Up-regulated in Transcription
  misc_feature: MA Experiment 20000180 PARAMETER Experiment Name: At_Germinating_Seeds_P Parameter: Age (hr) Value: 24 vs. 0
  misc_feature: MA Experiment 20000180 PARAMETER Experiment Name: At_Germinating_Seeds_P Parameter: Tissue Value: Germinating Seeds
  misc_feature: MA Experiment ID: 20000184 Result: Down-regulated in Transcription
  misc_feature: MA Experiment 20000184 PARAMETER Experiment Name: At_Shoots__P Parameter: Age (day) Value: 7
  misc_feature: MA Experiment 20000184 PARAMETER Experiment Name: At_Shoots__P Parameter: Tissue Value: Shoots vs. Whole Plant
  misc_feature: MA Experiment ID: 20000234 Result: Down-regulated in Transcription
  misc_feature: MA Experiment 20000234 PARAMETER Experiment Name: At_Siliques_P Parameter: Age (day) Value: 21
  misc_feature: MA Experiment 20000234 PARAMETER Experiment Name: At_Siliques_P Parameter: Organism Value: A. thaliana
  misc_feature: MA Experiment 20000234 PARAMETER Experiment Name: At_Siliques_P Parameter: Plant Line Value: WS
  misc_feature: MA Experiment 20000234 PARAMETER Experiment Name: At_Siliques_P Parameter: Tissue Value: Less Than 5mm Siliques vs. Whole Plant
  misc_feature: MA Experiment ID: 20000235 Result: Down-regulated in Transcription
  misc_feature: MA Experiment 20000235 PARAMETER Experiment Name: At_Siliques_P Parameter: Age (day) Value: 21
  misc_feature: MA Experiment 20000235 PARAMETER Experiment Name: At_Siliques_P Parameter: Organism Value: A. thaliana
  misc_feature: MA Experiment 20000235 PARAMETER Experiment Name: At_Siliques_P Parameter: Plant Line Value: WS
  misc_feature: MA Experiment 20000235 PARAMETER Experiment Name: At_Siliques_P Parameter: Tissue Value: 5-10mm Siliques vs. Whole Plant
  misc_feature: MA Experiment ID: 20000265 Result: Down-regulated in Transcription
  misc_feature: MA Experiment 20000265 PARAMETER Experiment Name: At_Open_Flower_P Parameter: Age (day) Value: 21
  misc_feature: MA Experiment 20000265 PARAMETER Experiment Name: At_Open_Flower_P Parameter: Plant Line Value: WS
  misc_feature: MA Experiment 20000265 PARAMETER Experiment Name: At_Open_Flower_P Parameter: Tissue Value: Closed Flower vs. Whole Plant
  misc_feature: MA Experiment ID: 20000438 Result: Down-regulated in Transcription
  misc_feature: MA Experiment 20000438 PARAMETER Experiment Name: At_Shoots__P Parameter: Age (day) Value: 14
  misc_feature: MA Experiment 20000438 PARAMETER Experiment Name: At_Shoots__P Parameter: Tissue Value: Shoots vs. Whole Plant
  misc_feature: MA Experiment ID: 20001451 Result: Up-regulated in Transcription
  misc_feature: MA Experiment 20001451 PARAMETER Experiment Name: At_Far-red-induction_P Parameter: Age (day) Value: 7
  misc_feature: MA Experiment 20001451 PARAMETER Experiment Name: At_Far-red-induction_P Parameter: Light Value: Far-red vs. White
  misc_feature: MA Experiment 20001451 PARAMETER Experiment Name: At_Far-red-induction_P Parameter: Organism Value: A. thaliana
  misc_feature: MA Experiment 20001451 PARAMETER Experiment Name: At_Far-red-induction_P Parameter: Plant Line Value: Columbia
  misc_feature: MA Experiment 20001451 PARAMETER Experiment Name: At_Far-red-induction_P Parameter: Timepoint (hr) Value: 24
  misc_feature: MA Experiment 20001451 PARAMETER Experiment Name: At_Far-red-induction_P Parameter: Tissue Value: Whole Plant
  misc_feature: MA Experiment ID: 20001556 Result: Down-regulated in Transcription
  misc_feature: MA Experiment 20001556 PARAMETER Experiment Name: At_Drought_Soil_Dry_P Parameter: Age (day) Value: 26
  misc_feature: MA Experiment 20001556 PARAMETER Experiment Name: At_Drought_Soil_Dry_P Parameter: Organism Value: A. thaliana
  misc_feature: MA Experiment 20001556 PARAMETER Experiment Name: At_Drought_Soil_Dry_P Parameter: Plant Line Value: WS
  misc_feature: MA Experiment 20001556 PARAMETER Experiment Name: At_Drought_Soil_Dry_P Parameter: Post Timepoint (hr) Value: None
  misc_feature: MA Experiment 20001556 PARAMETER Experiment Name: At_Drought_Soil_Dry_P Parameter: Post-Treatment Value: None
  misc_feature: MA Experiment 20001556 PARAMETER Experiment Name: At_Drought_Soil_Dry_P Parameter: Timepoint (day) Value: 12
  misc_feature: MA Experiment 20001556 PARAMETER Experiment Name: At_Drought_Soil_Dry_P Parameter: Treatment Value: Drought vs. No Drought
  misc_feature: MA Experiment ID: 20001558 Result: Down-regulated in Transcription
  misc_feature: MA Experiment 20001558 PARAMETER Experiment Name: At_Drought_Soil_Dry_P Parameter: Age (day) Value: 27
  misc_feature: MA Experiment 20001558 PARAMETER Experiment Name: At_Drought_Soil_Dry_P Parameter: Organism Value: A. thaliana
  misc_feature: MA Experiment 20001558 PARAMETER Experiment Name: At_Drought_Soil_Dry_P Parameter: Plant Line Value: WS
  misc_feature: MA Experiment 20001558 PARAMETER Experiment Name: At_Drought_Soil_Dry_P Parameter: Post Timepoint (hr) Value: 6
  misc_feature: MA Experiment 20001558 PARAMETER Experiment Name: At_Drought_Soil_Dry_P Parameter: Post-Treatment Value: Re-Water vs. No Drought
  misc_feature: MA Experiment 20001558 PARAMETER Experiment Name: At_Drought_Soil_Dry_P Parameter: Timepoint (day) Value: 13
  misc_feature: MA Experiment 20001558 PARAMETER Experiment Name: At_Drought_Soil_Dry_P Parameter: Treatment Value: Drought vs. No Drought
atggatatctgtatggacaaggagccagatggtgtggtggtctatgcgaacggtgattcgtgtaatccaaaccaagaaaatgtttctgagcctctcttagattcagtatcacgcgatgatgctaatgtacatacagagcttcgatatggggaagagaacatcgaagtaaacgaatatgatgttaaagagtgtactagtgagatccccgttggtaagccgataggagatgattttgagtctaaagatgtcactaagtcaagtttacatgcaaagcatgcttcaaaatcaggtagagggaataacaaaacaaggaacaccgttccacaaccgttttctttagcaactgagaaacgtgcttcatctacacgttcgtttactagtgaatctctcgaatcagctggcttgaaaaagtttccggatggacatagtaaagtacaaagtcaggcaacaaaggtacctaggaaaccattgcagccaaaaaacaagaagctttcagatgaggaagattcttgctctgttgcttcatatgccacgtcgggtgcaaagtctgctaaatcaagaactgttgtcaccgcagctccttcgttccgatccactgagcgtgccgagaagaggaaggagttctatacaaaactggaggagaaacaccaagccatggaggccgagaaaacgcaaagtgaagcaaggaacaaggaagcaaccgaagcagctttaagacaattaagaaaaagtttgaggtttaaagcaaacccaatgccaaaattttatcatgaagggcctcccccaaaggttgaacttaagaagcctcttccaactcgagcaaagtcgccaaaactagggcggaggaacccgaaagaaggaaacagagcaaaaggagcttcgaggcggcatgaaactcgaaagactctagtgatctctaaagaagaccatgatgatgaaaccacacggaatgctgaccagataaaccataaagaaatgaaccgaaatttggaaccagagactgcttttgcctgctaa

SEQ ID NO: 95732 - protein, 338 aa, Arabidopsis thaliana
  peptide (1)..(338): Ceres Seq. ID no. 12730143
  misc_feature (1)..(338): Homolog of NCBI NO: 9294199 NR Description: gb|AAF04893.1~gene_id:MXC7.13~similar to unknown
  misc_feature (1)..(338): Homolog of NCBI NO: 15228950 NR Description: unknown protein; protein id: At3g23090.1 thaliana] >gi|27765054|gb|AAO23648.1| At3g23090 [Arabidopsis
  misc_feature (1)..(297): Homolog of NCBI NO: 34897180 NR Description: unknown protein [Oryza sativa (japonica
  misc_feature (115)..(329): Homolog of NCBI NO: 21618286 NR Description: unknown [Arabidopsis thaliana]
  misc_feature (115)..(329): Homolog of NCBI NO: 30679219 NR Description: expressed protein [Arabidopsis thaliana]
  misc_feature (115)..(329): Homolog of NCBI NO: 6175167 NR Description: unknown protein [Arabidopsis thaliana]
  misc_feature (115)..(329): Homolog of NCBI NO: 18396961 NR Description: expressed protein; protein id: At3g04630.1,
  misc_feature (60)..(282): Homolog of NCBI NO: 21553401 NR Description: unknown [Arabidopsis thaliana]
  misc_feature (60)..(282): Homolog of NCBI NO: 18404945 NR Description: expressed protein; protein id: At1g54460.1, by cDNA: 142094., supported by cDNA: gi_13605600, supported by gi_15777864 [Arabidopsis thaliana]
  misc_feature (162)..(304): Homolog of NCBI NO: 28453880 NR Description: WAVE-DAMPENED2 [Arabidopsis thaliana]
MDICMDKEPDGVVVYANGDSCNPNQENVSEPLLDSVSRDDANVHTELRYGEENIEVNEYDVKECTSEIPVGKPIGDDFESKDVTKSSLHAKHASKSGRGNNKTRNTVPQPFSLATEKRASSTRSFTSESLESAGLKKFPDGHSKVQSQATKVPRKPLQPKNKKLSDEEDSCSVASYATSGAKSAKSRTVVTAAPSFRSTERAEKRKEFYTKLEEKHQAMEAEKTQSEARNKEATEAALRQLRKSLRFKANPMPKFYHEGPPPKVELKKPLPTRAKSPKLGRRNPKEGNRAKGASRRHETRKTLVISKEDHDDETTRNADQINHKEMNRNLEPETAFAC

SEQ ID NO: 95733 - protein, 334 aa, Arabidopsis thaliana
  peptide (1)..(334): Ceres Seq. ID no. 12730144
  misc_feature (1)..(334): Homolog of NCBI NO: 9294199 NR Description: gb|AAF04893.1~gene_id:MXC7.13~similar to unknown
  misc_feature (1)..(334): Homolog of NCBI NO: 15228950 NR Description: unknown protein; protein id: At3g23090.1 thaliana] >gi|27765054|gb|AAO23648.1| At3g23090 [Arabidopsis
  misc_feature (1)..(293): Homolog of NCBI NO: 34897180 NR Description: unknown protein [Oryza sativa (japonica
  misc_feature (111)..(325): Homolog of NCBI NO: 21618286 NR Description: unknown [Arabidopsis thaliana]
  misc_feature (111)..(325): Homolog of NCBI NO: 30679219 NR Description: expressed protein [Arabidopsis thaliana]
  misc_feature (111)..(325): Homolog of NCBI NO: 6175167 NR Description: unknown protein [Arabidopsis thaliana]
  misc_feature (111)..(325): Homolog of NCBI NO: 18396961 NR Description: expressed protein; protein id: At3g04630.1,
  misc_feature (56)..(278): Homolog of NCBI NO: 21553401 NR Description: unknown [Arabidopsis thaliana]
  misc_feature (56)..(278): Homolog of NCBI NO: 18404945 NR Description: expressed protein; protein id: At1g54460.1, by cDNA: 142094., supported by cDNA: gi_13605600, supported by gi_15777864 [Arabidopsis thaliana]
  misc_feature (158)..(300): Homolog of NCBI NO: 28453880 NR Description: WAVE-DAMPENED2 [Arabidopsis thaliana]
MDKEPDGVVVYANGDSCNPNQENVSEPLLDSVSRDDANVHTELRYGEENIEVNEYDVKECTSEIPVGKPIGDDFESKDVTKSSLHAKHASKSGRGNNKTRNTVPQPFSLATEKRASSTRSFTSESLESAGLKKFPDGHSKVQSQATKVPRKPLQPKNKKLSDEEDSCSVASYATSGAKSAKSRTVVTAAPSFRSTERAEKRKEFYTKLEEKHQAMEAEKTQSEARNKEATEAALRQLRKSLRFKANPMPKFYHEGPPPKVELKKPLPTRAKSPKLGRRNPKEGNRAKGASRRHETRKTLVISKEDHDDETTRNADQINHKEMNRNLEPETAFAC

SEQ ID NO: 95734 - DNA, 1569 bp, Arabidopsis thaliana
  misc_feature (1)..(1569): Ceres Seq. ID no. 12730159
  misc_feature: MA Experiment ID: 20000179 Result: Up-regulated in Transcription
  misc_feature: MA Experiment 20000179 PARAMETER Experiment Name: At_Germinating_Seeds_P Parameter: Age (hr) Value: 6 vs. 0
  misc_feature: MA Experiment 20000179 PARAMETER Experiment Name: At_Germinating_Seeds_P Parameter: Tissue Value: Germinating Seeds
  misc_feature: MA Experiment ID: 20000185 Result: Up-regulated in Transcription
  misc_feature: MA Experiment 20000185 PARAMETER Experiment Name: At_Roots__P Parameter: Age (day) Value: 7 vs. 21
  misc_feature: MA Experiment 20000185 PARAMETER Experiment Name: At_Roots__P Parameter: Organism Value: A. thaliana
  misc_feature: MA Experiment 20000185 PARAMETER Experiment Name: At_Roots__P Parameter: Tissue Value: Roots vs. Whole Plant
  misc_feature: MA Experiment ID: 20001757 Result: Down-regulated in Transcription
  misc_feature: MA Experiment 20001757 PARAMETER Experiment Name: At_50mM_NH4NO3_L-to-H_P Parameter: Timepoint (hr) Value: 6
  misc_feature: MA Experiment 20001757 PARAMETER Experiment Name: At_50mM_NH4NO3_L-to-H_P Parameter: Tissue Value: Leaf
  misc_feature: MA Experiment 20001757 PARAMETER Experiment Name: At_50mM_NH4NO3_L-to-H_P Parameter: Treatment Value: 50mM NH4NO3 vs 100mM Mannitol
  misc_feature: MA Experiment ID: 20001904 Result: Up-regulated in Transcription
  misc_feature: MA Experiment 20001904 PARAMETER Experiment Name: At_Drought_Reproduction_P Parameter: Age (day) Value: 37
  misc_feature: MA Experiment 20001904 PARAMETER Experiment Name: At_Drought_Reproduction_P Parameter: Organism Value: A. thaliana
  misc_feature: MA Experiment 20001904 PARAMETER Experiment Name: At_Drought_Reproduction_P Parameter: Plant Line Value: WS
  misc_feature: MA Experiment 20001904 PARAMETER Experiment Name: At_Drought_Reproduction_P Parameter: Timepoint (day) Value: 7
  misc_feature: MA Experiment 20001904 PARAMETER Experiment Name: At_Drought_Reproduction_P Parameter: Tissue Value: Rosettes
  misc_feature: MA Experiment 20001904 PARAMETER Experiment Name: At_Drought_Reproduction_P Parameter: Treatment Value: Drought vs. No Drought
  misc_feature: MA Experiment ID: 20001905 Result: Up-regulated in Transcription
  misc_feature: MA Experiment 20001905 PARAMETER Experiment Name: At_Drought_Reproduction_P Parameter: Age (day) Value: 40
  misc_feature: MA Experiment 20001905 PARAMETER Experiment Name: At_Drought_Reproduction_P Parameter: Organism Value: A. thaliana
  misc_feature: MA Experiment 20001905 PARAMETER Experiment Name: At_Drought_Reproduction_P Parameter: Plant Line Value: WS
  misc_feature: MA Experiment 20001905 PARAMETER Experiment Name: At_Drought_Reproduction_P Parameter: Timepoint (day) Value: 10
  misc_feature: MA Experiment 20001905 PARAMETER Experiment Name: At_Drought_Reproduction_P Parameter: Tissue Value: Rosettes
  misc_feature: MA Experiment 20001905 PARAMETER Experiment Name: At_Drought_Reproduction_P Parameter: Treatment Value: Drought vs. No Drought
atgagaaaccaagtaagttctaatctcaagcacgctcttcttcttgaatcttcttccactaagaaaacccctaaaccagtctctcttcctaaacaaacaattggaatcttatctttcgaagtagctaacgttatgtctaaaaccattcaccttcaccgttctctgtccgatacagagatctctaagcttaaagccgaggtttttcactcggaaggagttagaaagcttgtatcttccgatgagaatcatcttttagatctctctgtctctgagaagcttgatgatttgagccgtgtagctagtgttgtgtctaggttaggtaagaaatgtaacgaacctgctttacaaggatttgagcatgtttatgaagatatagtgaatggtgcgattgattttaggaagttagggttcttggttaaagatatggaatctatggttaagaagatggagagatttgtgaatgctacttgtagtttgtattgtgaaatggaagtgatgaatgagcttgaacaagctatagtgaagcttcagagaagtcagcagcatcaagagagtgttaaagcttttgaacagaagcttatgtggcagagacaggacgtgaagagtcttagagatggttcgttgtggaaccaaacttatgataaggttgttgagatgttggctaggactgtttgtactatttatggtaggattgaaactgtttttggtgggttgggtttgagagggaaaaaggatgtgactttgaagagagatcgtagcaagaatgaagcgagtaaggctgttaactcaaggtctgttgcgggttttaaggattcgaggagaagcgaagcggatgagtttacgcgtgcaggggatttcaatttcccttgtgggactaatcctggtaggatgttcatggaatgtcttgctatgaataggactattggtgatgatgatgatgatgatgatgaagatgggggtcggattacatttcctttgagtacagctaggatgattcggagtaataagtttggttttaagagcaggttaactcaacatgcttcagcttcaactattggaggatctgctttatctttgcactatgcaaatgttgtgattgtggtagaaaagcttcttaagtaccctcatctaataggcgaagaagcaagagatgatctttaccaaatgttaccaacgagtttgaagacaacgcttaaggctagtctaagatcatacttgaagaacatttcgatctacgacgctcctctagctcacgactggaaagaaaccatagacggtatactttcttggcttgctcctttagctcacaacatgatccggtggcagagcgaacgcaacttcgagcagcagaatcagattgtgaagcgaactaacgttcttctacttcagactctttactttgctgatagagagaagacagaagctgcgatttgtaagcttcttgtcgggttaaactacatttgccattacgaacaacaacaaaacgcgttgttggattgcgcgagtagctttgattatgaagattgttttgagtggcagagccaatgccgtgcagcttacttggactaa

SEQ ID NO: 95735 - protein, 522 aa, Arabidopsis thaliana; identical to SEQ ID NO: 78960
  peptide (1)..(522): Ceres Seq. ID no. 12730160
  misc_feature (351)..(440): Pfam Name: Protein of unknown function (DUF668) Pfam Description: Protein of unknown function (DUF668)
  misc_feature (1)..(522): Homolog of NCBI NO: 7939524 NR Description: contains similarity to unknown
  misc_feature (1)..(522): Homolog of NCBI NO: 15228977 NR Description: hypothetical protein; protein id: At3g23160.1
  misc_feature (31)..(236): Homolog of NCBI NO: 15238198 NR Description: putative protein; protein id: At5g04550.1, by cDNA: gi_13605828, supported by cDNA: gi_17064801, supported cDNA: gi_20259825, supported by cDNA: gi_20260407 [Arabidopsis
  misc_feature (347)..(511): Homolog of NCBI NO: 15238198 NR Description: putative protein; protein id: At5g04550.1, by cDNA: gi_13605828, supported by cDNA: gi_17064801, supported cDNA: gi_20259825, supported by cDNA: gi_20260407 [Arabidopsis
  misc_feature (9)..(262): Homolog of NCBI NO: 15242144 NR Description: putative protein; protein id: At5g51670.1 thaliana] >gi|8953735|dbj|BAA98099.1| contains similarity to
  misc_feature (341)..(496): Homolog of NCBI NO: 15242144 NR Description: putative protein; protein id: At5g51670.1 thaliana] >gi|8953735|dbj|BAA98099.1| contains similarity to
  misc_feature (81)..(256): Homolog of NCBI NO: 12003396 NR Description: Avr9/Cf-9 rapidly elicited protein 137 [Nicotiana
  misc_feature (334)..(494): Homolog of NCBI NO: 12003396 NR Description: Avr9/Cf-9 rapidly elicited protein 137 [Nicotiana
  misc_feature (14)..(266): Homolog of NCBI NO: 30102981 NR Description: hypothetical protein [Oryza sativa (japonica
  misc_feature (351)..(493): Homolog of NCBI NO: 30102981 NR Description: hypothetical protein [Oryza sativa (japonica

SEQ ID NO: 95736 - protein, 478 aa, Arabidopsis thaliana; identical to SEQ ID NO: 78961
  peptide (1)..(478): Ceres Seq. ID no. 12730161
  misc_feature (307)..(396): Pfam Name: Protein of unknown function (DUF668) Pfam Description: Protein of unknown function (DUF668)
  misc_feature (1)..(478): Homolog of NCBI NO: 7939524 NR Description: contains similarity to unknown
  misc_feature (1)..(478): Homolog of NCBI NO: 15228977 NR Description: hypothetical protein; protein id: At3g23160.1
  misc_feature (1)..(192): Homolog of NCBI NO: 15238198 NR Description: putative protein; protein id: At5g04550.1, by cDNA: gi_13605828, supported by cDNA: gi_17064801, supported cDNA: gi_20259825, supported by cDNA: gi_20260407 [Arabidopsis
  misc_feature (303)..(467): Homolog of NCBI NO: 15238198 NR Description: putative protein; protein id: At5g04550.1, by cDNA: gi_13605828, supported by cDNA: gi_17064801, supported cDNA: gi_20259825, supported by cDNA: gi_20260407 [Arabidopsis
  misc_feature (1)..(218): Homolog of NCBI NO: 15242144 NR Description: putative protein; protein id: At5g51670.1 thaliana] >gi|8953735|dbj|BAA98099.1| contains similarity to
  misc_feature (297)..(452): Homolog of NCBI NO: 15242144 NR Description: putative protein; protein id: At5g51670.1 thaliana] >gi|8953735|dbj|BAA98099.1| contains similarity to
  misc_feature (37)..(212): Homolog of NCBI NO: 12003396 NR Description: Avr9/Cf-9 rapidly elicited protein 137 [Nicotiana
  misc_feature (290)..(450): Homolog of NCBI NO: 12003396 NR Description: Avr9/Cf-9 rapidly elicited protein 137 [Nicotiana
  misc_feature (1)..(222): Homolog of NCBI NO: 30102981 NR Description: hypothetical protein [Oryza sativa (japonica
  misc_feature (307)..(449): Homolog of NCBI NO: 30102981 NR Description: hypothetical protein [Oryza sativa (japonica

SEQ ID NO: 95737 - protein, 381 aa, Arabidopsis thaliana
  peptide (1)..(381): Ceres Seq. ID no. 12730162
  misc_feature (210)..(299): Pfam Name: Protein of unknown function (DUF668) Pfam Description: Protein of unknown function (DUF668)
  misc_feature (1)..(381): Homolog of NCBI NO: 7939524 NR Description: contains similarity to unknown
  misc_feature (1)..(381): Homolog of NCBI NO: 15228977 NR Description: hypothetical protein; protein id: At3g23160.1
  misc_feature (1)..(95): Homolog of NCBI NO: 15238198 NR Description: putative protein; protein id: At5g04550.1, by cDNA: gi_13605828, supported by cDNA: gi_17064801, supported cDNA: gi_20259825, supported by cDNA: gi_20260407 [Arabidopsis
  misc_feature (206)..(370): Homolog of NCBI NO: 15238198 NR Description: putative protein; protein id: At5g04550.1, by cDNA: gi_13605828, supported by cDNA: gi_17064801, supported cDNA: gi_20259825, supported by cDNA: gi_20260407 [Arabidopsis
  misc_feature (1)..(121): Homolog of NCBI NO: 15242144 NR Description: putative protein; protein id: At5g51670.1 thaliana] >gi|8953735|dbj|BAA98099.1| contains similarity to
  misc_feature (200)..(355): Homolog of NCBI NO: 15242144 NR Description: putative protein; protein id: At5g51670.1 thaliana] >gi|8953735|dbj|BAA98099.1| contains similarity to
  misc_feature (1)..(115): Homolog of NCBI NO: 12003396 NR Description: Avr9/Cf-9 rapidly elicited protein 137 [Nicotiana
  misc_feature (193)..(353): Homolog of NCBI NO: 12003396 NR Description: Avr9/Cf-9 rapidly elicited protein 137 [Nicotiana
  misc_feature (1)..(125): Homolog of NCBI NO: 30102981 NR Description: hypothetical protein [Oryza sativa (japonica
  misc_feature (210)..(352): Homolog of NCBI NO: 30102981 NR Description: hypothetical protein [Oryza sativa (japonica
MESMVKKMERFVNATCSLYCEMEVMNELEQAIVKLQRSQQHQESVKAFEQKLMWQRQDVKSLRDGSLWNQTYDKVVEMLARTVCTIYGRIETVFGGLGLRGKKDVTLKRDRSKNEASKAVNSRSVAGFKDSRRSEADEFTRAGDFNFPCGTNPGRMFMECLAMNRTIGDDDDDDDEDGGRITFPLSTARMIRSNKFGFKSRLTQHASASTIGGSALSLHYANVVIVVEKLLKYPHLIGEEARDDLYQMLPTSLKTTLKASLRSYLKNISIYDAPLAHDWKETIDGILSWLAPLAHNMIRWQSERNFEQQNQIVKRTNVLLLQTLYFADREKTEAAICKLLVGLNYICHYEQQQNALLDCASSFDYEDCFEWQSQCRAAYLD

SEQ ID NO: 95738 - DNA, 2148 bp, Arabidopsis thaliana
  misc_feature (1)..(2148): Ceres Seq. ID no. 12730172
  misc_feature: MA Experiment ID: 20000315 Result: Down-regulated in Transcription
  misc_feature: MA Experiment 20000315 PARAMETER Experiment Name: At_14day_Shoots-Roots_Sub_P Parameter: Age (day) Value: 14
  misc_feature: MA Experiment 20000315 PARAMETER Experiment Name: At_14day_Shoots-Roots_Sub_P Parameter: Organism Value: A. thaliana
  misc_feature: MA Experiment 20000315 PARAMETER Experiment Name: At_14day_Shoots-Roots_Sub_P Parameter: Plant Line Value: WS
  misc_feature: MA Experiment 20000315 PARAMETER Experiment Name: At_14day_Shoots-Roots_Sub_P Parameter: Tissue Value: Shoots vs. Whole Plant
  misc_feature: MA Experiment ID: 20000440 Result: Up-regulated in Transcription
  misc_feature: MA Experiment 20000440 PARAMETER Experiment Name: At_Closed-Flower__Sub_P Parameter: Tissue Value: Closed Flower vs. Whole Plant
atgagttcatcaaaagccctaatcaaaaccctgattaagaatccaactcgaatcaaatccaaatctcaagcgaagcagcttcacgcacaattcatcagaactcaatcactctctcatacatcagcttcaatcgtaatctcaatctacacaaaccttaaacttttgcacgaagctttgcttcttttcaaaacccttaagtctcctcctgttctagcatggaagtcagtaatcagatgcttcaccgaccagtctctattctccaaggcgttagcttcgtttgtggaaatgcgagcttctgggagatgcccagatcacaatgtgtttccttctgttttgaaatcgtgtacgatgatgatggatttgagatttggtgagtctgttcatgggtttattgttaggcttggtatggattgtgatttgtatactggtaatgcgcttatgaatatgtatgctaagcttcttggtatgggttctaagattagtgtaggtaatgtgttcgatgaaatgcctcaaagaacgtccaattctggagacgaagatgtaaaggctgaaacttgcattatgccttttggaatagacagtgtgaggagggtttttgaagtgatgcctagaaaggatgttgtgtcgtataatactatcattgcagggtatgcacagagtggaatgtatgaagatgctttgagaatggttagggagatgggaactactgacttaaagcctgattcttttactttgtctagtgtgcttccgatattttctgagtatgtggatgttattaaggggaaagagattcatgggtatgtgattaggaaagggattgatagtgatgtatatattgggagtagtttggttgatatgtatgcgaaaagtgctcggattgaagactctgaaagagtgttttctcgcttgtattgtcgggatggtatctcgtggaactcgcttgtagctgggtatgtacagaatggtagatacaatgaggctctgagattgttcaggcaaatggtgaccgcaaaggttaagccaggggctgtggcgttctcaagtgtgattcctgcttgtgctcacctagccaccttgcaccttgggaaacaacttcacggatatgtattaaggggtggctttggcagtaacatattcatagctagtgcacttgttgatatgtactcgaaatgtgggaatattaaggctgctaggaagatttttgacaggatgaatgtactcgatgaagtatcatggacggctattataatggggcatgcgttacatggtcatgggcatgaagcagtttcgttgtttgaggagatgaaacgacaaggagtgaaaccgaatcaagtggcatttgttgctgtactaacggcttgtagtcatgtggggttggtagatgaggcatggggatatttcaacagcatgactaaggtttacggtttaaaccaggagttagaacattatgcagctgtagcggatcttctaggccgtgcagggaagctggaagaagcatacaatttcatttcaaagatgtgtgttgaaccaactggtagtgtctggtctaccttattgtcttcttgcagcgttcacaagaatcttgagttggctgagaaggtagcggagaagatattcactgtcgattctgaaaacatgggagcttatgttttgatgtgcaatatgtatgcgtctaatggaagatggaaagaaatggcgaaactaagattgcgtatgaggaagaaaggattgcggaaaaagccagcttgtagttggatcgaaatgaaaaacaagactcatggatttgtttcaggagatagatcgcatccgagtatggacaagatcaacgagtttcttaaagctgtaatggaacagatggagaaagaagggtatgttgcagacacaagcggcgtgcttcacgatgtagacgaagagcataagagagagcttttgttcggacacagtgagagattggctgttgcctttggtatcatcaacacagaacctggcacgacaattagagtcactaagaatataaggatatgcacggattgtcatgtcgcaatcaagtttatctcgaagatcacggaaagagagattatcgttagggataatagcagattccaccatttcaaccgtggaaactgttcttgtggagattattggtaa

SEQ ID NO: 95739 - protein, 715 aa, Arabidopsis thaliana
  peptide (1)..(715): Ceres Seq. ID no. 12730173
  misc_feature (410)..(444): Pfam Name: PPR repeat Pfam Description: PPR repeat
  misc_feature (68)..(715): Homolog of NCBI NO: 22093801 NR Description: hypothetical protein~predicted by
  misc_feature (19)..(715): Homolog of NCBI NO: 15223099 NR Description: unknown protein; protein id: At1g08070.1 thaliana] >gi|8778839|gb|AAF79838.1|AC026875_18 T6D22.15
  misc_feature (194)..(715): Homolog of NCBI NO: 34903762 NR Description: unnamed protein product [Oryza sativa (japonica group)] >gi|7340873|dbj|BAA92963.1| unnamed protein product
  misc_feature (43)..(172): Homolog of NCBI NO: 34903762 NR Description: unnamed protein product [Oryza sativa (japonica group)] >gi|7340873|dbj|BAA92963.1| unnamed protein product
  misc_feature (45)..(172): Homolog of NCBI NO: 34903762 NR Description: unnamed protein product [Oryza sativa (japonica group)] >gi|7340873|dbj|BAA92963.1| unnamed protein product
  misc_feature (196)..(715): Homolog of NCBI NO: 15232837 NR Description: hypothetical protein; protein id: At3g02010.1 thaliana] >gi|6091739|gb|AAF03451.1|AC010797_27 hypothetical [Arabidopsis thaliana] >gi|6513930|gb|AAF14834.1|AC011664_16
  misc_feature (40)..(171): Homolog of NCBI NO: 15232837 NR Description: hypothetical protein; protein id: At3g02010.1 thaliana] >gi|6091739|gb|AAF03451.1|AC010797_27 hypothetical [Arabidopsis thaliana] >gi|6513930|gb|AAF14834.1|AC011664_16
  misc_feature (194)..(715): Homolog of NCBI NO: 11281371 NR Description: hypothetical protein T8H10.30 - Arabidopsis >gi|6706414|emb|CAB66100.1| putative protein [Arabidopsis
  misc_feature (194)..(715): Homolog of NCBI NO: 30694644 NR Description: pentatricopeptide (PPR) repeat-containing protein
  misc_feature (194)..(715): Homolog of NCBI NO: 30794008 NR Description: unknown protein [Arabidopsis thaliana]
MSSSKALIKTLIKNPTRIKSKSQAKQLHAQFIRTQSLSHTSASIVISIYTNLKLLHEALLLFKTLKSPPVLAWKSVIRCFTDQSLFSKALASFVEMRASGRCPDHNVFPSVLKSCTMMMDLRFGESVHGFIVRLGMDCDLYTGNALMNMYAKLLGMGSKISVGNVFDEMPQRTSNSGDEDVKAETCIMPFGIDSVRRVFEVMPRKDVVSYNTIIAGYAQSGMYEDALRMVREMGTTDLKPDSFTLSSVLPIFSEYVDVIKGKEIHGYVIRKGIDSDVYIGSSLVDMYAKSARIEDSERVFSRLYCRDGISWNSLVAGYVQNGRYNEALRLFRQMVTAKVKPGAVAFSSVIPACAHLATLHLGKQLHGYVLRGGFGSNIFIASALVDMYSKCGNIKAARKIFDRMNVLDEVSWTAIIMGHALHGHGHEAVSLFEEMKRQGVKPNQVAFVAVLTACSHVGLVDEAWGYFNSMTKVYGLNQELEHYAAVADLLGRAGKLEEAYNFISKMCVEPTGSVWSTLLSSCSVHKNLELAEKVAEKIFTVDSENMGAYVLMCNMYASNGRWKEMAKLRLRMRKKGLRKKPACSWIEMKNKTHGFVSGDRSHPSMDKINEFLKAVMEQMEKEGYVADTSGVLHDVDEEHKRELLFGHSERLAVAFGIINTEPGTTIRVTKNIRICTDCHVAIKFISKITEREIIVRDNSRFHHFNRGNCSCGDYW

SEQ ID NO: 95740 - protein, 620 aa, Arabidopsis thaliana
  peptide (1)..(620): Ceres Seq. ID no. 12730174
  misc_feature (315)..(349): Pfam Name: PPR repeat Pfam Description: PPR repeat
  misc_feature (1)..(620): Homolog of NCBI NO: 22093801 NR Description: hypothetical protein~predicted by
  misc_feature (1)..(620): Homolog of NCBI NO: 15223099 NR Description: unknown protein; protein id: At1g08070.1 thaliana] >gi|8778839|gb|AAF79838.1|AC026875_18 T6D22.15
  misc_feature (99)..(620): Homolog of NCBI NO: 34903762 NR Description: unnamed protein product [Oryza sativa (japonica group)] >gi|7340873|dbj|BAA92963.1| unnamed protein product
  misc_feature (1)..(77): Homolog of NCBI NO: 34903762 NR Description: unnamed protein product [Oryza sativa (japonica group)] >gi|7340873|dbj|BAA92963.1| unnamed protein product
  misc_feature (1)..(77): Homolog of NCBI NO: 34903762 NR Description: unnamed protein product [Oryza sativa (japonica group)] >gi|7340873|dbj|BAA92963.1| unnamed protein product
  misc_feature (101)..(620): Homolog of NCBI NO: 15232837 NR Description: hypothetical protein; protein id: At3g02010.1 thaliana] >gi|6091739|gb|AAF03451.1|AC010797_27 hypothetical [Arabidopsis thaliana] >gi|6513930|gb|AAF14834.1|AC011664_16
  misc_feature (1)..(76): Homolog of NCBI NO: 15232837 NR Description: hypothetical protein; protein id: At3g02010.1 thaliana] >gi|6091739|gb|AAF03451.1|AC010797_27 hypothetical [Arabidopsis thaliana] >gi|6513930|gb|AAF14834.1|AC011664_16
  misc_feature (99)..(620): Homolog of NCBI NO: 11281371 NR Description: hypothetical protein T8H10.30 - Arabidopsis >gi|6706414|emb|CAB66100.1| putative protein [Arabidopsis
  misc_feature (99)..(620): Homolog of NCBI NO: 30794008 NR Description: unknown protein [Arabidopsis thaliana]
  misc_feature (99)..(620): Homolog of NCBI NO: 30694644 NR Description: pentatricopeptide (PPR) repeat-containing protein
MRASGRCPDHNVFPSVLKSCTMMMDLRFGESVHGFIVRLGMDCDLYTGNALMNMYAKLLGMGSKISVGNVFDEMPQRTSNSGDEDVKAETCIMPFGIDSVRRVFEVMPRKDVVSYNTIIAGYAQSGMYEDALRMVREMGTTDLKPDSFTLSSVLPIFSEYVDVIKGKEIHGYVIRKGIDSDVYIGSSLVDMYAKSARIEDSERVFSRLYCRDGISWNSLVAGYVQNGRYNEALRLFRQMVTAKVKPGAVAFSSVIPACAHLATLHLGKQLHGYVLRGGFGSNIFIASALVDMYSKCGNIKAARKIFDRMNVLDEVSWTAIIMGHALHGHGHEAVSLFEEMKRQGVKPNQVAFVAVLTACSHVGLVDEAWGYFNSMTKVYGLNQELEHYAAVADLLGRAGKLEEAYNFISKMCVEPTGSVWSTLLSSCSVHKNLELAEKVAEKIFTVDSENMGAYVLMCNMYASNGRWKEMAKLRLRMRKKGLRKKPACSWIEMKNKTHGFVSGDRSHPSMDKINEFLKAVMEQMEKEGYVADTSGVLHDVDEEHKRELLFGHSERLAVAFGIINTEPGTTIRVTKNIRICTDCHVAIKFISKITEREIIVRDNSRFHHFNRGNCSCGDYW

SEQ ID NO: 95741 - protein, 599 aa, Arabidopsis thaliana
  peptide (1)..(599): Ceres Seq. ID no. 12730175
  misc_feature (294)..(328): Pfam Name: PPR repeat Pfam Description: PPR repeat
  misc_feature (1)..(599): Homolog of NCBI NO: 22093801 NR Description: hypothetical protein~predicted by
  misc_feature (1)..(599): Homolog of NCBI NO: 15223099 NR Description: unknown protein; protein id: At1g08070.1 thaliana] >gi|8778839|gb|AAF79838.1|AC026875_18 T6D22.15
  misc_feature (78)..(599): Homolog of NCBI NO: 34903762 NR Description: unnamed protein product [Oryza sativa (japonica group)] >gi|7340873|dbj|BAA92963.1| unnamed protein product
  misc_feature (1)..(56): Homolog of NCBI NO: 34903762 NR Description: unnamed protein product [Oryza sativa (japonica group)] >gi|7340873|dbj|BAA92963.1| unnamed protein product
  misc_feature (1)..(56): Homolog of NCBI NO: 34903762 NR Description: unnamed protein product [Oryza sativa (japonica group)] >gi|7340873|dbj|BAA92963.1| unnamed protein product
  misc_feature (80)..(599): Homolog of NCBI NO: 15232837 NR Description: hypothetical protein; protein id: At3g02010.1 thaliana] >gi|6091739|gb|AAF03451.1|AC010797_27 hypothetical [Arabidopsis thaliana] >gi|6513930|gb|AAF14834.1|AC011664_16
  misc_feature (1)..(55): Homolog of NCBI NO: 15232837 NR Description: hypothetical protein; protein id: At3g02010.1 thaliana] >gi|6091739|gb|AAF03451.1|AC010797_27 hypothetical [Arabidopsis thaliana] >gi|6513930|gb|AAF14834.1|AC011664_16
  misc_feature (78)..(599): Homolog of NCBI NO: 11281371 NR Description: hypothetical protein T8H10.30 - Arabidopsis >gi|6706414|emb|CAB66100.1| putative protein [Arabidopsis
  misc_feature (78)..(599): Homolog of NCBI NO: 30694644 NR Description: pentatricopeptide (PPR) repeat-containing protein
  misc_feature (78)..(599): Homolog of NCBI NO: 30794008 NR Description: unknown protein [Arabidopsis thaliana]
MMMDLRFGESVHGFIVRLGMDCDLYTGNALMNMYAKLLGMGSKISVGNVFDEMPQRTSNSGDEDVKAETCIMPFGIDSVRRVFEVMPRKDVVSYNTIIAGYAQSGMYEDALRMVREMGTTDLKPDSFTLSSVLPIFSEYVDVIKGKEIHGYVIRKGIDSDVYIGSSLVDMYAKSARIEDSERVFSRLYCRDGISWNSLVAGYVQNGRYNEALRLFRQMVTAKVKPGAVAFSSVIPACAHLATLHLGKQLHGYVLRGGFGSNIFIASALVDMYSKCGNIKAARKIFDRMNVLDEVSWTAIIMGHALHGHGHEAVSLFEEMKRQGVKPNQVAFVAVLTACSHVGLVDEAWGYFNSMTKVYGLNQELEHYAAVADLLGRAGKLEEAYNFISKMCVEPTGSVWSTLLSSCSVHKNLELAEKVAEKIFTVDSENMGAYVLMCNMYASNGRWKEMAKLRLRMRKKGLRKKPACSWIEMKNKTHGFVSGDRSHPSMDKINEFLKAVMEQMEKEGYVADTSGVLHDVDEEHKRELLFGHSERLAVAFGIINTEPGTTIRVTKNIRICTDCHVAIKFISKITEREIIVRDNSRFHHFNRGNCSCGDYW

SEQ ID NO: 95742 - DNA, 1740 bp, Arabidopsis thaliana
  misc_feature (1)..(1740): Ceres Seq. ID no. 12730176
  misc_feature: MA Experiment ID: 20000173 Result: Up-regulated in Transcription
  misc_feature: MA Experiment 20000173 PARAMETER Experiment Name: At_42deg_Heat_P Parameter: Age (day) Value: 14
  misc_feature: MA Experiment 20000173 PARAMETER Experiment Name: At_42deg_Heat_P Parameter: Organism Value: A. thaliana
  misc_feature: MA Experiment 20000173 PARAMETER Experiment Name: At_42deg_Heat_P Parameter: Plant Line Value: WS
  misc_feature: MA Experiment 20000173 PARAMETER Experiment Name: At_42deg_Heat_P Parameter: Temperature (deg C) Value: 42 vs. 22
  misc_feature: MA Experiment 20000173 PARAMETER Experiment Name: At_42deg_Heat_P Parameter: Timepoint (hr) Value: 6
  misc_feature: MA Experiment 20000173 PARAMETER Experiment Name: At_42deg_Heat_P Parameter: Tissue Value: Aerial
  misc_feature: MA Experiment ID: 20000227 Result: Down-regulated in Transcription
  misc_feature: MA Experiment 20000227 PARAMETER Experiment Name: At_Root-Tips-vs-Tops_P Parameter: Tissue Value: Root Tips vs. Root Tops
  misc_feature: MA Experiment ID: 20000234 Result: Down-regulated in Transcription
  misc_feature: MA Experiment 20000234 PARAMETER Experiment Name: At_Siliques_P Parameter: Age (day) Value: 21
  misc_feature: MA Experiment 20000234 PARAMETER Experiment Name: At_Siliques_P Parameter: Organism Value: A. thaliana
  misc_feature: MA Experiment 20000234 PARAMETER Experiment Name: At_Siliques_P Parameter: Plant Line Value: WS
  misc_feature: MA Experiment 20000234 PARAMETER Experiment Name: At_Siliques_P Parameter: Tissue Value: Less Than 5mm Siliques vs. Whole Plant
  misc_feature: MA Experiment ID: 20000264 Result: Down-regulated in Transcription
  misc_feature: MA Experiment 20000264 PARAMETER Experiment Name: At_Open_Flower_P Parameter: Age (day) Value: 21
  misc_feature: MA Experiment 20000264 PARAMETER Experiment Name: At_Open_Flower_P Parameter: Plant Line Value: WS
  misc_feature: MA Experiment 20000264 PARAMETER Experiment Name: At_Open_Flower_P Parameter: Tissue Value: Open Flower vs. Whole Plant
  misc_feature: MA Experiment ID: 20000265 Result: Down-regulated in Transcription
  misc_feature: MA Experiment 20000265 PARAMETER Experiment Name: At_Open_Flower_P Parameter: Age (day) Value: 21
  misc_feature: MA Experiment 20000265 PARAMETER Experiment Name: At_Open_Flower_P Parameter: Plant Line Value: WS
  misc_feature: MA Experiment 20000265 PARAMETER Experiment Name: At_Open_Flower_P Parameter: Tissue Value: Closed Flower vs. Whole Plant
  misc_feature: MA Experiment ID: 20000286 Result: Down-regulated in Transcription
  misc_feature: MA Experiment 20000286 PARAMETER Experiment Name: At_Open_Flower_P Parameter: Age (day) Value: 21
  misc_feature: MA Experiment 20000286 PARAMETER Experiment Name: At_Open_Flower_P Parameter: Plant Line Value: WS
  misc_feature: MA Experiment 20000286 PARAMETER Experiment Name: At_Open_Flower_P Parameter: Tissue Value: Half Open vs. Whole Plant
  misc_feature: MA Experiment ID: 20000438 Result: Up-regulated in Transcription
  misc_feature: MA Experiment 20000438 PARAMETER Experiment Name: At_Shoots__P Parameter: Age (day) Value: 14
  misc_feature: MA Experiment 20000438 PARAMETER Experiment Name: At_Shoots__P Parameter: Tissue Value: Shoots vs. Whole Plant
  misc_feature: MA Experiment ID: 20000573 Result: Down-regulated in Transcription
  misc_feature: MA Experiment 20000573 PARAMETER Experiment Name: At_100uM_ABA_Mutants__P Parameter: Organism Value: A. thaliana
  misc_feature: MA Experiment 20000573 PARAMETER Experiment Name: At_100uM_ABA_Mutants__P Parameter: Plant Line Value: CS22 vs. Ler wt
  misc_feature: MA Experiment 20000573 PARAMETER Experiment Name: At_100uM_ABA_Mutants__P Parameter: Timepoint (hr) Value: N/A
  misc_feature: MA Experiment 20000573 PARAMETER Experiment Name: At_100uM_ABA_Mutants__P Parameter: Tissue Value: Whole Plant
  misc_feature: MA Experiment 20000573 PARAMETER Experiment Name: At_100uM_ABA_Mutants__P Parameter: Treatment Value: None
  misc_feature: MA Experiment ID: 20000576 Result: Up-regulated in Transcription
  misc_feature: MA Experiment 20000576 PARAMETER Experiment Name: At_100uM_ABA_Mutants__P Parameter: Organism Value: A. thaliana
  misc_feature: MA Experiment 20000576 PARAMETER Experiment Name: At_100uM_ABA_Mutants__P Parameter: Plant Line Value: CS23
  misc_feature: MA Experiment 20000576 PARAMETER Experiment Name: At_100uM_ABA_Mutants__P Parameter: Timepoint (hr) Value: 6
  misc_feature: MA Experiment 20000576 PARAMETER Experiment Name: At_100uM_ABA_Mutants__P Parameter: Tissue Value: Whole Plant
  misc_feature: MA Experiment 20000576 PARAMETER Experiment Name: At_100uM_ABA_Mutants__P Parameter: Treatment Value: 1uM ABA vs. No Treatment
  misc_feature: MA Experiment ID: 20000794 Result: Down-regulated in Transcription
  misc_feature: MA Experiment 20000794 PARAMETER Experiment Name: At_Petals_P Parameter: Age (day) Value: 23-25 days
  misc_feature: MA Experiment 20000794 PARAMETER Experiment Name: At_Petals_P Parameter: Plant Line Value: WS
  misc_feature: MA Experiment 20000794 PARAMETER Experiment Name: At_Petals_P Parameter: Tissue Value: Petals vs. Whole plant
aaataaataacatccgtcaaaaccatctgtctctgttttctcattcatctcctctacttgtttagtcggtcatcaaactatctcttcaagtttatcctcagaaatatacaaactcctcagaaaattctttcgtttggtttgcttcgttctacaattttgtattgatgagaatgttatattgagtcattaaccgtttgataaatcgtatttggctctgtaagtagtatttattggtattgaaacgatggatcatgtaatcggtggcaagttcaagttaggtaggaagattggtagtggatcattcggtgaactttatattgggattaatgttcaaactggagaagaagttgctcttaagctggaacctgtgaagacaaagcatcctcagctccattatgaatcaaaagtatacatgcttcttcaaggagggacgggtgttccgcatatcaaatggttcggtgttgagggtaactacaattgtatggctattgaccttcttggtccaagcttggaagacttgttcaactattgcactcggagtttttctttgaaaactgttctaatgcttgctgatcagttaataaacagagttgagtacatgcactctcgaggatttcttcaccgtgatattaaaccggataactttttgatgggtctcggtcgcaaagcaaaccaagtgtacattattgattatgggcttgctaaaaagtatagagatcttcagacacacaagcatataccttacagggaaaataagaatctgactggaactgctaggtatgcaagtgtcaacacacaccttggcattgagcaaagtagacgagatgatctggagtctcttggttatgttctgatgtattttatacgaggaagtttaccatggcaaggtctaaaagctggtactaagaaacagaaatacgagaagataagtgaaaagaagatgcttactcccgtagaggttctttgcaagtcatatccatccgagttcacatcatatttccattactgccgttcattgaggtttgaggataaaccagattattcatatctgaaaagacttttcagggacctttttattcgggaaggttatcagtttgactatgtgtttgattggacaatcttgaaatatcctcagagtggctctatttcaaaaccaaggccaaatcctaaaccagctctagaccctccaggaccatctgcagaacgaaatgaaaagcctatagtggggcaggatctacgagaaagattctcaggtgcagttgaagcattcgctagacgaaatgtaccgagtcatggcattcgcccgaagcacattttttctgatgatgcttccaaagaagtgcaagtgtctgaaaaaacccgaaatgagattgctacaaagatggcagtgatgtctagcagccaacctggctcatcaggtgagctgagtgagaaccgctcaagtaaacttttttcaagcagtgcccaaaagattcaaccggtgcaagaaactaagttatctgcaaggcttgggcgtgatgacggcctgagaagcttcgatatgcttactatcggttccggaaagcggaaatgagtcactcaagaaagcttgcggatcggagtttggaagaatctgaaaatgtgtaaacaatgtaaaactgtctcccactttatgtgtttatagttcttcatagaattttataaagtggtatatgtaacttgtaacacaagtactttgtttatattagttcaaatttggtc

SEQ ID NO: 95743 - protein, 442 aa, Arabidopsis thaliana
  peptide (1)..(442): Ceres Seq. ID no. 12730177
  misc_feature (1)..(442): Homolog of NCBI NO: 15229427 NR Description: putative casein kinase I; protein id: supported by cDNA: gi_15809823, supported by cDNA: gi_18377818 thaliana] >gi|11994319|dbj|BAB02278.1| casein kinase [Arabidopsis
  misc_feature (26)..(442): Homolog of NCBI NO: 1197461 NR Description: casein kinase I [Arabidopsis thaliana]
  misc_feature (1)..(442): Homolog of NCBI NO: 15236471 NR Description: casein kinase I; protein id: At4g14340.1, by cDNA: gi_15450524, supported by cDNA: gi_16974430, supported cDNA: gi_9965744 [Arabidopsis thaliana] >gi|7488072|pir||C71405
  misc_feature (1)..(406): Homolog of NCBI NO: 15219733 NR Description: putative casein kinase I; protein id: At1g04440.1
  misc_feature (1)..(406): Homolog of NCBI NO: 27754653 NR Description: putative casein kinase I [Arabidopsis thaliana]
  misc_feature (1)..(406): Homolog of NCBI NO: 15239840 NR Description: casein kinase I; protein id: At5g43320.1, by cDNA: gi_13430689, supported by cDNA: gi_14532893 [Arabidopsis >gi|8843885|dbj|BAA97411.1| casein kinase I [Arabidopsis
  misc_feature (1)..(420): Homolog of NCBI NO: 18417216 NR Description: protein kinase ADK1-like protein; protein id: supported by cDNA: 113439., supported by cDNA: gi_20466497
  misc_feature (1)..(420): Homolog of NCBI NO: 21536851 NR Description: protein kinase ADK1-like protein [Arabidopsis
  misc_feature (1)..(442): Homolog of NCBI NO: 32482941 NR Description: OSJNBb0072M01.6 [Oryza sativa (japonica
  misc_feature (1)..(407): Homolog of NCBI NO: 15240091 NR Description: casein kinase I; protein id: At5g44100.1, by cDNA: gi_18087639 [Arabidopsis thaliana]
MDHVIGGKFKLGRKIGSGSFGELYIGINVQTGEEVALKLEPVKTKHPQLHYESKVYMLLQGGTGVPHIKWFGVEGNYNCMAIDLLGPSLEDLFNYCTRSFSLKTVLMLADQLINRVEYMHSRGFLHRDIKPDNFLMGLGRKANQVYIIDYGLAKKYRDLQTHKHIPYRENKNLTGTARYASVNTHLGIEQSRRDDLESLGYVLMYFIRGSLPWQGLKAGTKKQKYEKISEKKMLTPVEVLCKSYPSEFTSYFHYCRSLRFEDKPDYSYLKRLFRDLFIREGYQFDYVFDWTILKYPQSGSISKPRPNPKPALDPPGPSAERNEKPIVGQDLRERFSGAVEAFARRNVPSHGIRPKHIFSDDASKEVQVSEKTRNEIATKMAVMSSSQPGSSGELSENRSSKLFSSSAQKIQPVQETKLSARLGRDDGLRSFDMLTIGSGKRK

SEQ ID NO: 95744 - protein, 386 aa, Arabidopsis thaliana
  peptide (1)..(386): Ceres Seq. ID no. 12730178
  misc_feature (1)..(386): Homolog of NCBI NO: 15229427 NR Description: putative casein kinase I; protein id: supported by cDNA: gi_15809823, supported by cDNA: gi_18377818 thaliana] >gi|11994319|dbj|BAB02278.1| casein kinase [Arabidopsis
  misc_feature (1)..(386): Homolog of NCBI NO: 1197461 NR Description: casein kinase I [Arabidopsis thaliana]
  misc_feature (1)..(386): Homolog of NCBI NO: 15236471 NR Description: casein kinase I; protein id: At4g14340.1, by cDNA: gi_15450524, supported by cDNA: gi_16974430, supported cDNA: gi_9965744 [Arabidopsis thaliana] >gi|7488072|pir||C71405
  misc_feature (1)..(350): Homolog of NCBI NO: 15219733 NR Description: putative casein kinase I; protein id: At1g04440.1
  misc_feature (1)..(350): Homolog of NCBI NO: 27754653 NR Description: putative casein kinase I [Arabidopsis thaliana]
  misc_feature (1)..(350): Homolog of NCBI NO: 15239840 NR Description: casein kinase I; protein id: At5g43320.1, by cDNA: gi_13430689, supported by cDNA: gi_14532893 [Arabidopsis >gi|8843885|dbj|BAA97411.1| casein kinase I [Arabidopsis
  misc_feature (1)..(364): Homolog of NCBI NO: 18417216 NR Description: protein kinase ADK1-like protein; protein id: supported by cDNA: 113439., supported by cDNA: gi_20466497
  misc_feature (1)..(364): Homolog of NCBI NO: 21536851 NR Description: protein kinase ADK1-like protein [Arabidopsis
  misc_feature (1)..(386): Homolog of NCBI NO: 32482941 NR Description: OSJNBb0072M01.6 [Oryza sativa (japonica
  misc_feature (1)..(351): Homolog of NCBI NO: 15240091 NR Description: casein kinase I; protein id: At5g44100.1, by cDNA: gi_18087639 [Arabidopsis thaliana]
MLLQGGTGVPHIKWFGVEGNYNCMAIDLLGPSLEDLFNYCTRSFSLKTVLMLADQLINRVEYMHSRGFLHRDIKPDNFLMGLGRKANQVYIIDYGLAKKYRDLQTHKHIPYRENKNLTGTARYASVNTHLGIEQSRRDDLESLGYVLMYFIRGSLPWQGLKAGTKKQKYEKISEKKMLTPVEVLCKSYPSEFTSYFHYCRSLRFEDKPDYSYLKRLFRDLFIREGYQFDYVFDWTILKYPQSGSISKPRPNPKPALDPPGPSAERNEKPIVGQDLRERFSGAVEAFARRNVPSHGIRPKHIFSDDASKEVQVSEKTRNEIATKMAVMSSSQPGSSGELSENRSSKLFSSSAQKIQPVQETKLSARLGRDDGLRSFDMLTIGSGKRK

SEQ ID NO: 95745 - protein, 363 aa, Arabidopsis thaliana
  peptide (1)..(363): Ceres Seq. ID no. 12730179
  misc_feature (1)..(363): Homolog of NCBI NO: 15229427 NR Description: putative casein kinase I; protein id: supported by cDNA: gi_15809823, supported by cDNA: gi_18377818 thaliana] >gi|11994319|dbj|BAB02278.1| casein kinase [Arabidopsis
  misc_feature (1)..(363): Homolog of NCBI NO: 1197461 NR Description: casein kinase I [Arabidopsis thaliana]
  misc_feature (1)..(363): Homolog of NCBI NO: 15236471 NR Description: casein kinase I; protein id: At4g14340.1, by cDNA: gi_15450524, supported by cDNA: gi_16974430, supported cDNA: gi_9965744 [Arabidopsis thaliana] >gi|7488072|pir||C71405
  misc_feature (1)..(327): Homolog of NCBI NO: 15219733 NR Description: putative casein kinase I; protein id: At1g04440.1
  misc_feature (1)..(327): Homolog of NCBI NO: 27754653 NR Description: putative casein kinase I [Arabidopsis thaliana]
  misc_feature (1)..(327): Homolog of NCBI NO: 15239840 NR Description: casein kinase I; protein id: At5g43320.1, by cDNA: gi_13430689, supported by cDNA: gi_14532893 [Arabidopsis >gi|8843885|dbj|BAA97411.1| casein kinase I [Arabidopsis
  misc_feature (1)..(341): Homolog of NCBI NO: 18417216 NR Description: protein kinase ADK1-like protein; protein id: supported by cDNA: 113439., supported by cDNA: gi_20466497
  misc_feature (1)..(341): Homolog of NCBI NO: 21536851 NR Description: protein kinase ADK1-like protein [Arabidopsis
  misc_feature (1)..(363): Homolog of NCBI NO: 32482941 NR Description: OSJNBb0072M01.6 [Oryza sativa (japonica
  misc_feature (1)..(328): Homolog of NCBI NO: 15240091 NR Description: casein kinase I; protein id: At5g44100.1, by cDNA: gi_18087639 [Arabidopsis thaliana]
MAIDLLGPSLEDLFNYCTRSFSLKTVLMLADQLINRVEYMHSRGFLHRDIKPDNFLMGLGRKANQVYIIDYGLAKKYRDLQTHKHIPYRENKNLTGTARYASVNTHLGIEQSRRDDLESLGYVLMYFIRGSLPWQGLKAGTKKQKYEKISEKKMLTPVEVLCKSYPSEFTSYFHYCRSLRFEDKPDYSYLKRLFRDLFIREGYQFDYVFDWTILKYPQSGSISKPRPNPKPALDPPGPSAERNEKPIVGQDLRERFSGAVEAFARRNVPSHGIRPKHIFSDDASKEVQVSEKTRNEIATKMAVMSSSQPGSSGELSENRSSKLFSSSAQKIQPVQETKLSARLGRDDGLRSFDMLTIGSGKRK

SEQ ID NO: 95746 - DNA, 1574 bp, Arabidopsis thaliana
  misc_feature (1)..(1574): Ceres Seq. ID no. 12730201
  misc_feature: MA Experiment ID: 20000327 Result: Down-regulated in Transcription
  misc_feature: MA Experiment 20000327 PARAMETER Experiment Name: At_42deg_Heat_Sub_P Parameter: Age (day) Value: 14
  misc_feature: MA Experiment 20000327 PARAMETER Experiment Name: At_42deg_Heat_Sub_P Parameter: Organism Value: A. thaliana
  misc_feature: MA Experiment 20000327 PARAMETER Experiment Name: At_42deg_Heat_Sub_P Parameter: Plant Line Value: WS
  misc_feature: MA Experiment 20000327 PARAMETER Experiment Name: At_42deg_Heat_Sub_P Parameter: Temperature (deg C) Value: 42 vs. 22
  misc_feature: MA Experiment 20000327 PARAMETER Experiment Name: At_42deg_Heat_Sub_P Parameter: Timepoint (hr) Value: 1
  misc_feature: MA Experiment 20000327 PARAMETER Experiment Name: At_42deg_Heat_Sub_P Parameter: Tissue Value: Aerial
  misc_feature: MA Experiment ID: 20000328 Result: Down-regulated in Transcription
  misc_feature: MA Experiment 20000328 PARAMETER Experiment Name: At_42deg_Heat_Sub_P Parameter: Age (day) Value: 14
  misc_feature: MA Experiment 20000328 PARAMETER Experiment Name: At_42deg_Heat_Sub_P Parameter: Organism Value: A. thaliana
  misc_feature: MA Experiment 20000328 PARAMETER Experiment Name: At_42deg_Heat_Sub_P Parameter: Plant Line Value: WS
  misc_feature: MA Experiment 20000328 PARAMETER Experiment Name: At_42deg_Heat_Sub_P Parameter: Temperature (deg C) Value: 42 vs. 22
  misc_feature: MA Experiment 20000328 PARAMETER Experiment Name: At_42deg_Heat_Sub_P Parameter: Timepoint (hr) Value: 6
  misc_feature: MA Experiment 20000328 PARAMETER Experiment Name: At_42deg_Heat_Sub_P Parameter: Tissue Value: Aerial
  misc_feature: MA Experiment ID: 20000347 Result: Up-regulated in Transcription
  misc_feature: MA Experiment 20000347 PARAMETER Experiment Name: At_2mM_SA_Sub_P Parameter: Age (day) Value: 14
  misc_feature: MA Experiment 20000347 PARAMETER Experiment Name: At_2mM_SA_Sub_P Parameter: Organism Value: A. thaliana
  misc_feature: MA Experiment 20000347 PARAMETER Experiment Name: At_2mM_SA_Sub_P Parameter: Plant Line Value: WS
  misc_feature: MA Experiment 20000347 PARAMETER Experiment Name: At_2mM_SA_Sub_P Parameter: Timepoint (hr) Value: 6
  misc_feature: MA Experiment 20000347 PARAMETER Experiment Name: At_2mM_SA_Sub_P Parameter: Tissue Value: Aerial
  misc_feature: MA Experiment 20000347 PARAMETER Experiment Name: At_2mM_SA_Sub_P Parameter: Treatment Value: 2mM SA vs. No Treatment
  misc_feature: MA Experiment ID: 20000348 Result: Down-regulated in Transcription
  misc_feature: MA Experiment 20000348 PARAMETER Experiment Name: At_100uM_ABA_Sub_P Parameter: Age (day) Value: 14
  misc_feature: MA Experiment 20000348 PARAMETER Experiment Name: At_100uM_ABA_Sub_P Parameter: Organism Value: A. thaliana
  misc_feature: MA Experiment 20000348 PARAMETER Experiment Name: At_100uM_ABA_Sub_P Parameter: Plant Line Value: WS
  misc_feature: MA Experiment 20000348 PARAMETER Experiment Name: At_100uM_ABA_Sub_P Parameter: Timepoint (hr) Value: 1
  misc_feature: MA Experiment 20000348 PARAMETER Experiment Name: At_100uM_ABA_Sub_P Parameter: Tissue Value: Aerial
  misc_feature: MA Experiment 20000348 PARAMETER Experiment Name: At_100uM_ABA_Sub_P Parameter: Treatment Value: 100uM ABA vs. No Treatment
  misc_feature: MA Experiment ID: 20000355 Result: Down-regulated in Transcription
  misc_feature: MA Experiment 20000355 PARAMETER Experiment Name: At_Siliques_Sub_P Parameter: Age (day) Value: 21
  misc_feature: MA Experiment 20000355 PARAMETER Experiment Name: At_Siliques_Sub_P Parameter: Organism Value: A. thaliana
  misc_feature: MA Experiment 20000355 PARAMETER Experiment Name: At_Siliques_Sub_P Parameter: Plant Line Value: WS
  misc_feature: MA Experiment 20000355 PARAMETER Experiment Name: At_Siliques_Sub_P Parameter: Tissue Value: Less Than 5mm Siliques vs. Whole Plant
gtctagcttctcctactcttcgccagatccaaattccttgaagatacaatggctgatcccacgtccaaagatgaccatgatggtgaaggaggaagagacaaatcatcaacttttgttcaaaaacttattgacgttgaagaagcaaagactcaaatcatttactctctaccaatgatattcaccaatcttttctattattgtatccctttaacctctgtgatgttcgcttctcaactcggccaactcgagctcgccggtgctaccctagccaattcttgggctaccgtcaccggttttgccttcatgacagggttaagtggagcacttgagacattgtgtggacaaggctttggtgcaaaaagctatagaatgttggggattcatctacaatcatcttgcattgtttcattagtcttcaccattctcatcaccatcttatggttcttcacggaatcggttttcttacttcttagacaagatcctagcatctcaaaacaagctgcactctacatgaagtacctagctcccggtttactcgcttacgggttcttacaaaacattttgagattttgccaaacacaatgcatcgttactccgctagttttattctcgtttcttcccttggtgattaatatcggtactacatatgctctggtgcatttagctgggcttggattcatcggtgctccaatagctacatctatttcattgtggatagctttcgtttctctcgggttttatgtgatttgttcggacaagtttaaggaaacatggaccggattttcgatggaatcatttcatcatgtagtactaaacttgacattaagcatcccttctgctgctatggtatgtttggaatattgggcgttcgagattctagtgttcttagcaggattgatgcgaaatccggaaatcaccacttctttggtagctatatgcgtcaacacggaatcaataagttacatgttaacatgcggacttagtgcagctacaagtacgcgtgtgtccaacgaacttggagcaggaaatgtaaaaggcgcaaagaaggcgacttcggtctccgttaagttgtctttagttctagctctcggtgtagtcattgctatacttgtaggtcatgatgcctgggttggtttattcagcaatagccatgtgattaaagagggatttgcatcactaaggtttttccttgctgcatctataacacttgattcaatccaaggtgttttatcaggagttgcgagaggatgcggatggcagcggttagccacggttataaatttgggaacattctacttaatcggaatgcctatttcagtcctttgtggtttcaagttgaagcttcatgccaagggtttatggatcggtctgatatgtgggatgttttgccagtccgcatctcttttgcttatgacaattttccggaagtggacaaagctgactgctgccactgtctgaaacctatagttcaattttccgattattataggaagaagattgttgttgtggacgagatcaatgtaaagattgtgtccaagaaaagacattattaagtgaacttttaggaattattg

SEQ ID NO: 95747 - protein, 469 aa, Arabidopsis thaliana
  peptide (1)..(469): Ceres Seq. ID no. 12730202
  misc_feature (1)..(469): Homolog of NCBI NO: 15229468 NR Description: unknown protein; protein id: At3g23550.1, by cDNA: gi_17979042, supported by cDNA: gi_20465840 [Arabidopsis >gi|9294511|dbj|BAB02773.1| gb|AAF24840.1~gene_id:MDB19.3~similar
  misc_feature (1)..(469): Homolog of NCBI NO: 18403810 NR Description: expressed protein; protein id: At3g23560.1, by cDNA: gi_13384113, supported by cDNA: gi_17064869 [Arabidopsis >gi|9294512|dbj|BAB02774.1| gb|AAF24840.1~gene_id:MDB19.4~similar
  misc_feature (3)..(467): Homolog of NCBI NO: 34394668 NR Description: putative MATE efflux protein family protein
  misc_feature (87)..(435): Homolog of NCBI NO: 34899388 NR Description: putative integral membrane protein [Oryza sativa
  misc_feature (1)..(90): Homolog of NCBI NO: 34899388 NR Description: putative integral membrane protein [Oryza sativa
  misc_feature (4)..(464): Homolog of NCBI NO: 16797803 NR Description: hypothetical membrane protein-1 [Marchantia
  misc_feature (7)..(461): Homolog of NCBI NO: 15237158 NR Description: MATE efflux family protein, putative; protein id: supported by cDNA: gi_15028278, supported by cDNA: gi_19310632 thaliana] >gi|10177411|dbj|BAB10542.1|
  misc_feature (1)..(463): Homolog of NCBI NO: 38346676 NR Description: OSJNBa0069D17.7 [Oryza sativa (japonica
  misc_feature (30)..(463): Homolog of NCBI NO: 15219524 NR Description: putative integral membrane protein; protein id: supported by cDNA: 125771. [Arabidopsis thaliana]
  misc_feature (14)..(463): Homolog of NCBI NO: 22138480 NR Description: hypothetical protein [Oryza sativa (japonica
MADPTSKDDHDGEGGRDKSSTFVQKLIDVEEAKTQIIYSLPMIFTNLFYYCIPLTSVMFASQLGQLELAGATLANSWATVTGFAFMTGLSGALETLCGQGFGAKSYRMLGIHLQSSCIVSLVFTILITILWFFTESVFLLLRQDPSISKQAALYMKYLAPGLLAYGFLQNILRFCQTQCIVTPLVLFSFLPLVINIGTTYALVHLAGLGFIGAPIATSISLWIAFVSLGFYVICSDKFKETWTGFSMESFHHVVLNLTLSIPSAAMVCLEYWAFEILVFLAGLMRNPEITTSLVAICVNTESISYMLTCGLSAATSTRVSNELGAGNVKGAKKATSVSVKLSLVLALGVVIAILVGHDAWVGLFSNSHVIKEGFASLRFFLAASITLDSIQGVLSGVARGCGWQRLATVINLGTFYLIGMPISVLCGFKLKLHAKGLWIGLICGMFCQSASLLLMTIFRKWTKLTAATV

SEQ ID NO: 95748 - protein, 428 aa, Arabidopsis thaliana
  peptide (1)..(428): Ceres Seq. ID no. 12730203
  misc_feature (1)..(428): Homolog of NCBI NO: 15229468 NR Description: unknown protein; protein id: At3g23550.1, by cDNA: gi_17979042, supported by cDNA: gi_20465840 [Arabidopsis >gi|9294511|dbj|BAB02773.1| gb|AAF24840.1~gene_id:MDB19.3~similar
  misc_feature (1)..(428): Homolog of NCBI NO: 18403810 NR Description: expressed protein; protein id: At3g23560.1, by cDNA: gi_13384113, supported by cDNA: gi_17064869 [Arabidopsis >gi|9294512|dbj|BAB02774.1| gb|AAF24840.1~gene_id:MDB19.4~similar
  misc_feature (1)..(426): Homolog of NCBI NO: 34394668 NR Description: putative MATE efflux protein family protein
  misc_feature (46)..(394): Homolog of NCBI NO: 34899388 NR Description: putative integral membrane protein [Oryza sativa
  misc_feature (1)..(49): Homolog of NCBI NO: 34899388 NR Description: putative integral membrane protein [Oryza sativa
  misc_feature (1)..(423): Homolog of NCBI NO: 16797803 NR Description: hypothetical membrane protein-1 [Marchantia
  misc_feature (1)..(420): Homolog of NCBI NO: 15237158 NR Description: MATE efflux family protein, putative; protein id: supported by cDNA: gi_15028278, supported by cDNA: gi_19310632 thaliana] >gi|10177411|dbj|BAB10542.1|
  misc_feature (1)..(422): Homolog of NCBI NO: 38346676 NR Description: OSJNBa0069D17.7 [Oryza sativa (japonica
  misc_feature (1)..(422): Homolog of NCBI NO: 15219524 NR Description: putative integral membrane protein; protein id: supported by cDNA: 125771. [Arabidopsis thaliana]
  misc_feature (1)..(422): Homolog of NCBI NO: 22138480 NR Description: hypothetical protein [Oryza sativa (japonica
MIFTNLFYYCIPLTSVMFASQLGQLELAGATLANSWATVTGFAFMTGLSGALETLCGQGFGAKSYRMLGIHLQSSCIVSLVFTILITILWFFTESVFLLLRQDPSISKQAALYMKYLAPGLLAYGFLQNILRFCQTQCIVTPLVLFSFLPLVINIGTTYALVHLAGLGFIGAPIATSISLWIAFVSLGFYVICSDKFKETWTGFSMESFHHVVLNLTLSIPSAAMVCLEYWAFEILVFLAGLMRNPEITTSLVAICVNTESISYMLTCGLSAATSTRVSNELGAGNVKGAKKATSVSVKLSLVLALGVVIAILVGHDAWVGLFSNSHVIKEGFASLRFFLAASITLDSIQGVLSGVARGCGWQRLATVINLGTFYLIGMPISVLCGFKLKLHAKGLWIGLICGMFCQSASLLLMTIFRKWTKLTAATV

SEQ ID NO: 95749 - protein, 412 aa, Arabidopsis thaliana
  peptide (1)..(412): Ceres Seq. ID no. 12730204
  misc_feature (1)..(412): Homolog of NCBI NO: 15229468 NR Description: unknown protein; protein id: At3g23550.1, by cDNA: gi_17979042, supported by cDNA: gi_20465840 [Arabidopsis >gi|9294511|dbj|BAB02773.1| gb|AAF24840.1~gene_id:MDB19.3~similar
  misc_feature (1)..(412): Homolog of NCBI NO: 18403810 NR Description: expressed protein; protein id: At3g23560.1, by cDNA: gi_13384113, supported by cDNA: gi_17064869 [Arabidopsis >gi|9294512|dbj|BAB02774.1| gb|AAF24840.1~gene_id:MDB19.4~similar
  misc_feature (1)..(410): Homolog of NCBI NO: 34394668 NR Description: putative MATE efflux protein family protein
  misc_feature (30)..(378): Homolog of NCBI NO: 34899388 NR Description: putative integral membrane protein [Oryza sativa
  misc_feature (1)..(33): Homolog of NCBI NO: 34899388 NR Description: putative integral membrane protein [Oryza sativa
  misc_feature (1)..(407): Homolog of NCBI NO: 16797803 NR Description: hypothetical membrane protein-1 [Marchantia
  misc_feature (1)..(404): Homolog of NCBI NO: 15237158 NR Description: MATE efflux family protein, putative; protein id: supported by cDNA: gi_15028278, supported by cDNA: gi_19310632 thaliana] >gi|10177411|dbj|BAB10542.1|
  misc_feature (1)..(406): Homolog of NCBI NO: 38346676 NR Description: OSJNBa0069D17.7 [Oryza sativa (japonica
  misc_feature (1)..(406): Homolog of NCBI NO: 15219524 NR Description: putative integral membrane protein; protein id: supported by cDNA: 125771. [Arabidopsis thaliana]
  misc_feature (1)..(406): Homolog of NCBI NO: 22138480 NR Description: hypothetical protein [Oryza sativa (japonica
MFASQLGQLELAGATLANSWATVTGFAFMTGLSGALETLCGQGFGAKSYRMLGIHLQSSCIVSLVFTILITILWFFTESVFLLLRQDPSISKQAALYMKYLAPGLLAYGFLQNILRFCQTQCIVTPLVLFSFLPLVINIGTTYALVHLAGLGFIGAPIATSISLWIAFVSLGFYVICSDKFKETWTGFSMESFHHVVLNLTLSIPSAAMVCLEYWAFEILVFLAGLMRNPEITTSLVAICVNTESISYMLTCGLSAATSTRVSNELGAGNVKGAKKATSVSVKLSLVLALGVVIAILVGHDAWVGLFSNSHVIKEGFASLRFFLAASITLDSIQGVLSGVARGCGWQRLATVINLGTFYLIGMPISVLCGFKLKLHAKGLWIGLICGMFCQSASLLLMTIFRKWTKLTAATV

SEQ ID NO: 95750 - DNA, 950 bp, Arabidopsis thaliana
  misc_feature (1)..(950): Ceres Seq. ID no. 12730229
  misc_feature: MA Experiment ID: 20000173 Result: Up-regulated in Transcription
  misc_feature: MA Experiment 20000173 PARAMETER Experiment Name: At_42deg_Heat_P Parameter: Age (day) Value: 14
  misc_feature: MA Experiment 20000173 PARAMETER Experiment Name: At_42deg_Heat_P Parameter: Organism Value: A. thaliana
  misc_feature: MA Experiment 20000173 PARAMETER Experiment Name: At_42deg_Heat_P Parameter: Plant Line Value: WS
  misc_feature: MA Experiment 20000173 PARAMETER Experiment Name: At_42deg_Heat_P Parameter: Temperature (deg C) Value: 42 vs. 22
  misc_feature: MA Experiment 20000173 PARAMETER Experiment Name: At_42deg_Heat_P Parameter: Timepoint (hr) Value: 6
  misc_feature: MA Experiment 20000173 PARAMETER Experiment Name: At_42deg_Heat_P Parameter: Tissue Value: Aerial
  misc_feature: MA Experiment ID: 20000185 Result: Up-regulated in Transcription
  misc_feature: MA Experiment 20000185 PARAMETER Experiment Name: At_Roots__P Parameter: Age (day) Value: 7 vs. 21
  misc_feature: MA Experiment 20000185 PARAMETER Experiment Name: At_Roots__P Parameter: Organism Value: A. thaliana
  misc_feature: MA Experiment 20000185 PARAMETER Experiment Name: At_Roots__P Parameter: Tissue Value: Roots vs. Whole Plant
  misc_feature: MA Experiment ID: 20000264 Result: Up-regulated in Transcription
  misc_feature: MA Experiment 20000264 PARAMETER Experiment Name: At_Open_Flower_P Parameter: Age (day) Value: 21
  misc_feature: MA Experiment 20000264 PARAMETER Experiment Name: At_Open_Flower_P Parameter: Plant Line Value: WS
  misc_feature: MA Experiment 20000264 PARAMETER Experiment Name: At_Open_Flower_P Parameter: Tissue Value: Open Flower vs. Whole Plant
  misc_feature: MA Experiment ID: 20000439 Result: Up-regulated in Transcription
  misc_feature: MA Experiment 20000439 PARAMETER Experiment Name: At_Roots__P Parameter: Age (day) Value: 14 vs. 21
  misc_feature: MA Experiment 20000439 PARAMETER Experiment Name: At_Roots__P Parameter: Organism Value: A. thaliana
  misc_feature: MA Experiment 20000439 PARAMETER Experiment Name: At_Roots__P Parameter: Tissue Value: Roots vs. Whole Plant
  misc_feature: MA Experiment ID: 20000527 Result: Down-regulated in Transcription
  misc_feature: MA Experiment 20000527 PARAMETER Experiment Name: At_10percent_PEG_P Parameter: Age (day) Value: 20
  misc_feature: MA Experiment 20000527 PARAMETER Experiment Name: At_10percent_PEG_P Parameter: Organism Value: A. thaliana
  misc_feature: MA Experiment 20000527 PARAMETER Experiment Name: At_10percent_PEG_P Parameter: Plant Line Value: WS
  misc_feature: MA Experiment 20000527 PARAMETER Experiment Name: At_10percent_PEG_P Parameter: Timepoint (day) Value: 20
  misc_feature: MA Experiment 20000527 PARAMETER Experiment Name: At_10percent_PEG_P Parameter: Tissue Value: Whole Plant
  misc_feature: MA Experiment 20000527 PARAMETER Experiment Name: At_10percent_PEG_P Parameter: Treatment Value: 10percent PEG vs. No Treatment
  misc_feature: MA Experiment ID: 20000794 Result: Up-regulated in Transcription
  misc_feature: MA Experiment 20000794 PARAMETER Experiment Name: At_Petals_P Parameter: Age (day) Value: 23-25 days
  misc_feature: MA Experiment 20000794 PARAMETER Experiment Name: At_Petals_P Parameter: Plant Line Value: WS
  misc_feature: MA Experiment 20000794 PARAMETER Experiment Name: At_Petals_P Parameter: Tissue Value: Petals vs. Whole plant
  misc_feature: MA Experiment ID: 20001554 Result: Up-regulated in Transcription
  misc_feature: MA Experiment 20001554 PARAMETER Experiment Name: At_Drought_Soil_Dry_P Parameter: Age (day) Value: 21
  misc_feature: MA Experiment 20001554 PARAMETER Experiment Name: At_Drought_Soil_Dry_P Parameter: Organism Value: A. thaliana
  misc_feature: MA Experiment 20001554 PARAMETER Experiment Name: At_Drought_Soil_Dry_P Parameter: Plant Line Value: WS
  misc_feature: MA Experiment 20001554 PARAMETER Experiment Name: At_Drought_Soil_Dry_P Parameter: Post Timepoint (hr) Value: None
  misc_feature: MA Experiment 20001554 PARAMETER Experiment Name: At_Drought_Soil_Dry_P Parameter: Post-Treatment Value: None
  misc_feature: MA Experiment 20001554 PARAMETER Experiment Name: At_Drought_Soil_Dry_P Parameter: Timepoint (day) Value: 7
  misc_feature: MA Experiment 20001554 PARAMETER Experiment Name: At_Drought_Soil_Dry_P Parameter: Treatment Value: Drought vs. No Drought
  misc_feature: MA Experiment ID: 20001555 Result: Up-regulated in Transcription
  misc_feature: MA Experiment 20001555 PARAMETER Experiment Name: At_Drought_Soil_Dry_P Parameter: Age (day) Value: 24
  misc_feature: MA Experiment 20001555 PARAMETER Experiment Name: At_Drought_Soil_Dry_P Parameter: Organism Value: A. thaliana
  misc_feature: MA Experiment 20001555 PARAMETER Experiment Name: At_Drought_Soil_Dry_P Parameter: Plant Line Value: WS
  misc_feature: MA Experiment 20001555 PARAMETER Experiment Name: At_Drought_Soil_Dry_P Parameter: Post Timepoint (hr) Value: None
  misc_feature: MA Experiment 20001555 PARAMETER Experiment Name: At_Drought_Soil_Dry_P Parameter: Post-Treatment Value: None
  misc_feature: MA Experiment 20001555 PARAMETER Experiment Name: At_Drought_Soil_Dry_P Parameter: Timepoint (day) Value: 10
  misc_feature: MA Experiment 20001555 PARAMETER Experiment Name: At_Drought_Soil_Dry_P Parameter: Treatment Value: Drought vs. No Drought
  misc_feature: MA Experiment ID: 20001558 Result: Down-regulated in Transcription
  misc_feature: MA Experiment 20001558 PARAMETER Experiment Name: At_Drought_Soil_Dry_P Parameter: Age (day) Value: 27
  misc_feature: MA Experiment 20001558 PARAMETER Experiment Name: At_Drought_Soil_Dry_P Parameter: Organism Value: A. thaliana
  misc_feature: MA Experiment 20001558 PARAMETER Experiment Name: At_Drought_Soil_Dry_P Parameter: Plant Line Value: WS
  misc_feature: MA Experiment 20001558 PARAMETER Experiment Name: At_Drought_Soil_Dry_P Parameter: Post Timepoint (hr) Value: 6
  misc_feature: MA Experiment 20001558 PARAMETER Experiment Name: At_Drought_Soil_Dry_P Parameter: Post-Treatment Value: Re-Water vs. No Drought
  misc_feature: MA Experiment 20001558 PARAMETER Experiment Name: At_Drought_Soil_Dry_P Parameter: Timepoint (day) Value: 13
  misc_feature: MA Experiment 20001558 PARAMETER Experiment Name: At_Drought_Soil_Dry_P Parameter: Treatment Value: Drought vs. No Drought
  misc_feature: MA Experiment ID: 20001904 Result: Up-regulated in Transcription
  misc_feature: MA Experiment 20001904 PARAMETER Experiment Name: At_Drought_Reproduction_P Parameter: Age (day) Value: 37
  misc_feature: MA Experiment 20001904 PARAMETER Experiment Name: At_Drought_Reproduction_P Parameter: Organism Value: A. thaliana
  misc_feature: MA Experiment 20001904 PARAMETER Experiment Name: At_Drought_Reproduction_P Parameter: Plant Line Value: WS
  misc_feature: MA Experiment 20001904 PARAMETER Experiment Name: At_Drought_Reproduction_P Parameter: Timepoint (day) Value: 7
  misc_feature: MA Experiment 20001904 PARAMETER Experiment Name: At_Drought_Reproduction_P Parameter: Tissue Value: Rosettes
  misc_feature: MA Experiment 20001904 PARAMETER Experiment Name: At_Drought_Reproduction_P Parameter: Treatment Value: Drought vs. No Drought
  misc_feature: MA Experiment ID: 20001906 Result: Up-regulated in Transcription
  misc_feature: MA Experiment 20001906 PARAMETER Experiment Name: At_Drought_Reproduction_P Parameter: Age (day) Value: 35
  misc_feature: MA Experiment 20001906 PARAMETER Experiment Name: At_Drought_Reproduction_P Parameter: Organism Value: A. thaliana
  misc_feature: MA Experiment 20001906 PARAMETER Experiment Name: At_Drought_Reproduction_P Parameter: Plant Line Value: WS
  misc_feature: MA Experiment 20001906 PARAMETER Experiment Name: At_Drought_Reproduction_P Parameter: Timepoint (day) Value: 5
  misc_feature: MA Experiment 20001906 PARAMETER Experiment Name: At_Drought_Reproduction_P Parameter: Tissue Value: Siliques
  misc_feature: MA Experiment 20001906 PARAMETER Experiment Name: At_Drought_Reproduction_P Parameter: Treatment Value: Drought vs. No Drought
atgaccagagaattcgaactggaaaacaactaccagctttgcgacgagatcggcagaggtagattcggaacaatcactcgctgtttctcacccgcgactaaagaattctacgcctgcaaaaccattgacaagcgcgtgctcatcgacgcattagatcgcgagtgtatagagacggagccgaggatcatggcgatgttaccgccgcatccgaatatcatcaggatcttcgatctctacgaaacagaggattctcttgcgatcgtcatggaattagtcgatccgccgatgacgatttacgatcggttaatctccgccggggggaggttatcagaatcagaatccgcctcatacgcgaaacagatcctcagtgcgcttgctcattgtcaccggtgcgacgtcgttcatcgggatgtgaaacctgacaacgtcttagtcgatctcgtaagcggcggtgttaagctctgtgatttcggatcagcggtgtggttaggcggagaaacggcggagggagttgtgggaacaccgtattacgtggcgccggaggtagtgatggggaggaagtacgacgagaaggttgatatatggagcgctggtgtagtgatatacacgatgctagctggagaaccgccgtttaacggtgagacggcggaagatatatttgaatcgatattgagagggaatttgaggtttccgccgaagaagtttgggtctgtatcatcggaagcgaaggatttgttgaggaaaatgatatgtcgtgatgtttctcggcgattttctgcagaggatgctcttcgacattcatggatgatgaacgttggaaacctccaaagcaattagtcgaagcttttcagatatgtgattagagagtgtaattagagaagtcgtaatatagatgtgagtgtgtaattgtttgattcgaatagtcaaacgtagttgtgtgtttcagcaat

SEQ ID NO: 95751 - protein, 278 aa, Arabidopsis thaliana
  peptide (1)..(278): Ceres Seq. ID no. 12730230
  misc_feature (1)..(278): Homolog of NCBI NO: 18396914 NR Description: phosphoenolpyruvate carboxylase kinase, putative; id: At3g04530.1, supported by cDNA: gi_13877127 [Arabidopsis
  misc_feature (1)..(278): Homolog of NCBI NO: 13877128 NR Description: phosphoenolpyruvate carboxylase kinase 2 thaliana] >gi|15192724|gb|AAK84668.1| phosphoenolpyruvate
  misc_feature (1)..(267): Homolog of NCBI NO: 7547112 NR Description: phosphoenolpyruvate carboxylase kinase, putative
  misc_feature (35)..(264): Homolog of NCBI NO: 6175181 NR Description: putative calmodulin-domain protein kinase, 5'
  misc_feature (9)..(276): Homolog of NCBI NO: 15223870 NR Description: putative calcium-dependent protein kinase protein id: At1g08650.1, supported by cDNA: gi_17644150, by cDNA: gi_6318612 [Arabidopsis thaliana]
  misc_feature (9)..(264): Homolog of NCBI NO: 7434322 NR Description: calcium-dependent protein kinase homolog - Arabidopsis thaliana >gi|9802556|gb|AAF99758.1|AC003981_8
MTREFELENNYQLCDEIGRGRFGTITRCFSPATKEFYACKTIDKRVLIDALDRECIETEPRIMAMLPPHPNIIRIFDLYETEDSLAIVMELVDPPMTIYDRLISAGGRLSESESASYAKQILSALAHCHRCDVVHRDVKPDNVLVDLVSGGVKLCDFGSAVWLGGETAEGVVGTPYYVAPEVVMGRKYDEKVDIWSAGVVIYTMLAGEPPFNGETAEDIFESILRGNLRFPPKKFGSVSSEAKDLLRKMICRDVSRRFSAEDALRHSWMMNVGNLQSN

SEQ ID NO: 95752 - protein, 216 aa, Arabidopsis thaliana
  peptide (1)..(216): Ceres Seq. ID no. 12730231
  misc_feature (1)..(216): Homolog of NCBI NO: 18396914 NR Description: phosphoenolpyruvate carboxylase kinase, putative; id: At3g04530.1, supported by cDNA: gi_13877127 [Arabidopsis
  misc_feature (1)..(216): Homolog of NCBI NO: 13877128 NR Description: phosphoenolpyruvate carboxylase kinase 2 thaliana] >gi|15192724|gb|AAK84668.1| phosphoenolpyruvate
  misc_feature (1)..(205): Homolog of NCBI NO: 7547112 NR Description: phosphoenolpyruvate carboxylase kinase, putative
  misc_feature (1)..(202): Homolog of NCBI NO: 6175181 NR Description: putative calmodulin-domain protein kinase, 5'
  misc_feature (1)..(214): Homolog of NCBI NO: 15223870 NR Description: putative calcium-dependent protein kinase protein id: At1g08650.1, supported by cDNA: gi_17644150, by cDNA: gi_6318612 [Arabidopsis thaliana]
  misc_feature (1)..(202): Homolog of NCBI NO: 7434322 NR Description: calcium-dependent protein kinase homolog - Arabidopsis thaliana >gi|9802556|gb|AAF99758.1|AC003981_8
MAMLPPHPNIIRIFDLYETEDSLAIVMELVDPPMTIYDRLISAGGRLSESESASYAKQILSALAHCHRCDVVHRDVKPDNVLVDLVSGGVKLCDFGSAVWLGGETAEGVVGTPYYVAPEVVMGRKYDEKVDIWSAGVVIYTMLAGEPPFNGETAEDIFESILRGNLRFPPKKFGSVSSEAKDLLRKMICRDVSRRFSAEDALRHSWMMNVGNLQSN

SEQ ID NO: 95753 - protein, 214 aa, Arabidopsis thaliana
  peptide (1)..(214): Ceres Seq. ID no. 12730232
  misc_feature (1)..(214): Homolog of NCBI NO: 18396914 NR Description: phosphoenolpyruvate carboxylase kinase, putative; id: At3g04530.1, supported by cDNA: gi_13877127 [Arabidopsis
  misc_feature (1)..(214): Homolog of NCBI NO: 13877128 NR Description: phosphoenolpyruvate carboxylase kinase 2 thaliana] >gi|15192724|gb|AAK84668.1| phosphoenolpyruvate
  misc_feature (1)..(203): Homolog of NCBI NO: 7547112 NR Description: phosphoenolpyruvate carboxylase kinase, putative
  misc_feature (1)..(200): Homolog of NCBI NO: 6175181 NR Description: putative calmodulin-domain protein kinase, 5'
  misc_feature (1)..(212): Homolog of NCBI NO: 15223870 NR Description: putative calcium-dependent protein kinase protein id: At1g08650.1, supported by cDNA: gi_17644150, by cDNA: gi_6318612 [Arabidopsis thaliana]
  misc_feature (1)..(200): Homolog of NCBI NO: 7434322 NR Description: calcium-dependent protein kinase homolog - Arabidopsis thaliana >gi|9802556|gb|AAF99758.1|AC003981_8
MLPPHPNIIRIFDLYETEDSLAIVMELVDPPMTIYDRLISAGGRLSESESASYAKQILSALAHCHRCDVVHRDVKPDNVLVDLVSGGVKLCDFGSAVWLGGETAEGVVGTPYYVAPEVVMGRKYDEKVDIWSAGVVIYTMLAGEPPFNGETAEDIFESILRGNLRFPPKKFGSVSSEAKDLLRKMICRDVSRRFSAEDALRHSWMMNVGNLQSN

SEQ ID NO: 95754 - DNA, 2553 bp, Arabidopsis thaliana
  misc_feature (1)..(2553): Ceres Seq. ID no. 12730245
  misc_feature: MA Experiment ID: 20000264 Result: Up-regulated in Transcription
  misc_feature: MA Experiment 20000264 PARAMETER Experiment Name: At_Open_Flower_P Parameter: Age (day) Value: 21
  misc_feature: MA Experiment 20000264 PARAMETER Experiment Name: At_Open_Flower_P Parameter: Plant Line Value: WS
  misc_feature: MA Experiment 20000264 PARAMETER Experiment Name: At_Open_Flower_P Parameter: Tissue Value: Open Flower vs. Whole Plant
  misc_feature: MA Experiment ID: 20000794 Result: Up-regulated in Transcription
  misc_feature: MA Experiment 20000794 PARAMETER Experiment Name: At_Petals_P Parameter: Age (day) Value: 23-25 days
  misc_feature: MA Experiment 20000794 PARAMETER Experiment Name: At_Petals_P Parameter: Plant Line Value: WS
  misc_feature: MA Experiment 20000794 PARAMETER Experiment Name: At_Petals_P Parameter: Tissue Value: Petals vs. Whole plant
  misc_feature: MA Experiment ID: 20001910 Result: Up-regulated in Transcription
  misc_feature: MA Experiment 20001910 PARAMETER Experiment Name: At_Drought_Reproduction_P Parameter: Age (day) Value: 37
  misc_feature: MA Experiment 20001910 PARAMETER Experiment Name: At_Drought_Reproduction_P Parameter: Organism Value: A. thaliana
  misc_feature: MA Experiment 20001910 PARAMETER Experiment Name: At_Drought_Reproduction_P Parameter: Plant Line Value: WS
  misc_feature: MA Experiment 20001910 PARAMETER Experiment Name: At_Drought_Reproduction_P Parameter: Timepoint (day) Value: 7
  misc_feature: MA Experiment 20001910 PARAMETER Experiment Name: At_Drought_Reproduction_P Parameter: Tissue Value: Flowers
  misc_feature: MA Experiment 20001910 PARAMETER Experiment Name: At_Drought_Reproduction_P Parameter: Treatment Value: Drought vs. No Drought
atgagcgggaaaactcggattctctttttcctcacatgtctctcctttctattggtttttccaactagatctaacggacaagatttagctctgagctgcgggacatcagaagcttctgctgaccaagataagaaaaaatgggaaccagatacaaagtttttaaagactggaaactcaattcacgcaacggctacatatcaagacccttcacttctctcaacagttccttatatgacagccagaatctttacagctccagcaacttatgaaatcccgattaaaggagataaaagacatttgcttcggttatatttctacccatcaacatacaccggtctcaacatttccaactcgtatttcactgtggaagctaacgatgttaccttactgagcaatttcagcgccgcgattacgtgtcaagctttgactcaagcttatctggttaaagaatactctcttgcacccactgacaaagatgttttgagcatcaagtttaccccttcagataaataccgagacgcatttgcctttataaacggtatcgaggtgattcagatgccggaattgtttgacacggcggctcttgttggtttcacagaccaaacaatggatgccaagactgcgaatcttcagtcaatgtttagacttaatgttggtggtcaggacatccctggaagccaagactccggtgggttgacaagaacttggtataatgatgcaccttacatctttagtgcgggtcttggtgttacacttcaagcaagcaacaattttaggatcaactaccagaacatgccggtgtctatagctccagccgatatatacaaaaccgcaagatctcaaggcccaaacggagatatcaacctcaaatccaatcttacatggatgttccaaatcgataagaacttcacctacattttgagactccatttctgcgaattccagctttccaagatcaaccagaaggttttcaacatttacatcaataacagaacagcgcaggcagatactactcctgcagatataatagggtggacaggagagaaaggaatcccgatgtacaaagactacgcgatatatgttgatgccaacaacggaggcgaagagattacacttcagatgactccatcaacttttggtcaaccggaatattatgattcatctcttaacgggttagagattttcaagatggacaccatgaaaaatcttgcgggtccaaaccccgagccatcgcctatgcaagctgaggaagaggttaaaaaagaattcaagaacgaaaagagacacgctttcatcattggttcggccggaggagttttagcggttttaatcggtgccttgtgtttcacggcctacaagaagaaacaaggatatcaaggaggcgactctcacacatcaagttggcttcctatatatggaaactctaccacatcaggaaccaaatcaaccatctcagggaagagcaacaatggaagtcacctatccaatctcgcagcaggtttatgccgtagattctctttaccagaaatcaaacacggaacacaaaacttcgatgattccaacgtcattggagttggagggtttggtaaagtctacaaaggagttatagacggcacaactaaagtagcggtaaaaaaatcaaacccaaattcagaacaaggactcaacgaattcgagacagaaatcgaactcctctcaagactaagacacaaacacttagtctccttgataggatactgcgacgagggaggagaaatgtgtctcgtatacgattacatggcatttggaacactccgtgagcatctatacaacacaaagaaaccacaattaacttggaaacgaaggctagagatagctattggagcagcaagaggattacattaccttcacacaggagcaaagtacacgattatacacagagacgttaaaacaactaacatcctcgtagatgagaactgggtagccaaagtttcagactttgggttatccaaaactggacctaacatgaatggaggccatgtaacaaccgtcgtcaaaggaagcttcggttatttagatcctgaatacttcagaagacaacaactgactgagaaatcagacgtttactcattcggagttgttctgttcgaaatcttatgcgcaagaccagcgttaaacccgagtttgcctaaggaacaagtgagtctcggagactgggcaatgaattgcaaacgaaaagggaatttagaggatataatcgatccgaatctgaaagggaagatcaatgcagagtgtttgaagaaatttgcagacacggcggagaagtgtcttaacgatagtggattagaacggccgacaatgggagatgttttgtggaatctcgaattcgcacttcagcttcaagagactgctgacgggactcgtcatcggactccgaataatggaggaagctctgaggatctcggtagaggaggcatggcggttaacgtcgccggtagagatgatgtgagtgatctctcctcagaggacaataccgaaatattctctcagattgtaaatcccaaaggacgataa

SEQ ID NO: 95755 - protein, 850 aa, Arabidopsis thaliana
  peptide (1)..(850): Ceres Seq. ID no. 12730246
  misc_feature (7)..(798): Homolog of NCBI NO: 15230520 NR Description: receptor-protein kinase-like protein; protein id:
  misc_feature (7)..(798): Homolog of NCBI NO: 14334760 NR Description: putative receptor-protein kinase [Arabidopsis
  misc_feature (28)..(838): Homolog of NCBI NO: 34909896 NR Description: putative receptor-protein kinase [Oryza sativa
  misc_feature (234)..(798): Homolog of NCBI NO: 17887381 NR Description: receptor protein kinase-like protein [Capsicum
  misc_feature (32)..(829): Homolog of NCBI NO: 15241606 NR Description: protein kinase - like protein; protein id:
  misc_feature (7)..(850): Homolog of NCBI NO: 15239630 NR Description: receptor-protein kinase-like protein; protein id:
  misc_feature (25)..(823): Homolog of NCBI NO: 5679841 NR Description: contains eukaryotic protein kinase domain
  misc_feature (426)..(850): Homolog of NCBI NO: 15238498 NR Description: receptor-like protein kinase precursor - like;
  misc_feature (77)..(499): Homolog of NCBI NO: 15238498 NR Description: receptor-like protein kinase precursor - like;
  misc_feature (24)..(848): Homolog of NCBI NO: 34393641 NR Description: putative PTH-2, resistance gene (PTO kinase)
MSGKTRILFFLTCLSFLLVFPTRSNGQDLALSCGTSEASADQDKKKWEPDTKFLKTGNSIHATATYQDPSLLSTVPYMTARIFTAPATYEIPIKGDKRHLLRLYFYPSTYTGLNISNSYFTVEANDVTLLSNFSAAITCQALTQAYLVKEYSLAPTDKDVLSIKFTPSDKYRDAFAFINGIEVIQMPELFDTAALVGFTDQTMDAKTANLQSMFRLNVGGQDIPGSQDSGGLTRTWYNDAPYIFSAGLGVTLQASNNFRINYQNMPVSIAPADIYKTARSQGPNGDINLKSNLTWMFQIDKNFTYILRLHFCEFQLSKINQKVFNIYINNRTAQADTTPADIIGWTGEKGIPMYKDYAIYVDANNGGEEITLQMTPSTFGQPEYYDSSLNGLEIFKMDTMKNLAGPNPEPSPMQAEEEVKKEFKNEKRHAFIIGSAGGVLAVLIGALCFTAYKKKQGYQGGDSHTSSWLPIYGNSTTSGTKSTISGKSNNGSHLSNLAAGLCRRFSLPEIKHGTQNFDDSNVIGVGGFGKVYKGVIDGTTKVAVKKSNPNSEQGLNEFETEIELLSRLRHKHLVSLIGYCDEGGEMCLVYDYMAFGTLREHLYNTKKPQLTWKRRLEIAIGAARGLHYLHTGAKYTIIHRDVKTTNILVDENWVAKVSDFGLSKTGPNMNGGHVTTVVKGSFGYLDPEYFRRQQLTEKSDVYSFGVVLFEILCARPALNPSLPKEQVSLGDWAMNCKRKGNLEDIIDPNLKGKINAECLKKFADTAEKCLNDSGLERPTMGDVLWNLEFALQLQETADGTRHRTPNNGGSSEDLGRGGMAVNVAGRDDVSDLSSEDNTEIFSQIVNPKGR

SEQ ID NO: 95756 - protein, 773 aa, Arabidopsis thaliana
  peptide (1)..(773): Ceres Seq. ID no. 12730247
  misc_feature (1)..(721): Homolog of NCBI NO: 15230520 NR Description: receptor-protein kinase-like protein; protein id:
  misc_feature (1)..(721): Homolog of NCBI NO: 14334760 NR Description: putative receptor-protein kinase [Arabidopsis
  misc_feature (1)..(761): Homolog of NCBI NO: 34909896 NR Description: putative receptor-protein kinase [Oryza sativa
  misc_feature (157)..(721): Homolog of NCBI NO: 17887381 NR Description: receptor protein kinase-like protein [Capsicum
  misc_feature (1)..(752): Homolog of NCBI NO: 15241606 NR Description: protein kinase - like protein; protein id:
  misc_feature (1)..(773): Homolog of NCBI NO: 15239630 NR Description: receptor-protein kinase-like protein; protein id:
  misc_feature (1)..(746): Homolog of NCBI NO: 5679841 NR Description: contains eukaryotic protein kinase domain
  misc_feature (349)..(773): Homolog of NCBI NO: 15238498 NR Description: receptor-like protein kinase precursor - like;
  misc_feature (1)..(422): Homolog of NCBI NO: 15238498 NR Description: receptor-like protein kinase precursor - like;
  misc_feature (1)..(771): Homolog of NCBI NO: 34393641 NR Description: putative PTH-2, resistance gene (PTO kinase)
MTARIFTAPATYEIPIKGDKRHLLRLYFYPSTYTGLNISNSYFTVEANDVTLLSNFSAAITCQALTQAYLVKEYSLAPTDKDVLSIKFTPSDKYRDAFAFINGIEVIQMPELFDTAALVGFTDQTMDAKTANLQSMFRLNVGGQDIPGSQDSGGLTRTWYNDAPYIFSAGLGVTLQASNNFRINYQNMPVSIAPADIYKTARSQGPNGDINLKSNLTWMFQIDKNFTYILRLHFCEFQLSKINQKVFNIYINNRTAQADTTPADIIGWTGEKGIPMYKDYAIYVDANNGGEEITLQMTPSTFGQPEYYDSSLNGLEIFKMDTMKNLAGPNPEPSPMQAEEEVKKEFKNEKRHAFIIGSAGGVLAVLIGALCFTAYKKKQGYQGGDSHTSSWLPIYGNSTTSGTKSTISGKSNNGSHLSNLAAGLCRRFSLPEIKHGTQNFDDSNVIGVGGFGKVYKGVIDGTTKVAVKKSNPNSEQGLNEFETEIELLSRLRHKHLVSLIGYCDEGGEMCLVYDYMAFGTLREHLYNTKKPQLTWKRRLEIAIGAARGLHYLHTGAKYTIIHRDVKTTNILVDENWVAKVSDFGLSKTGPNMNGGHVTTVVKGSFGYLDPEYFRRQQLTEKSDVYSFGVVLFEILCARPALNPSLPKEQVSLGDWAMNCKRKGNLEDIIDPNLKGKINAECLKKFADTAEKCLNDSGLERPTMGDVLWNLEFALQLQETADGTRHRTPNNGGSSEDLGRGGMAVNVAGRDDVSDLSSEDNTEIFSQIVNPKGR

SEQ ID NO: 95757 - protein, 665 aa, Arabidopsis thaliana
  peptide (1)..(665): Ceres Seq. ID no. 12730248
  misc_feature (1)..(613): Homolog of NCBI NO: 15230520 NR Description: receptor-protein kinase-like protein; protein id:
  misc_feature (1)..(613): Homolog of NCBI NO: 14334760 NR Description: putative receptor-protein kinase [Arabidopsis
  misc_feature (1)..(653): Homolog of NCBI NO: 34909896 NR Description: putative receptor-protein kinase [Oryza sativa
  misc_feature (49)..(613): Homolog of NCBI NO: 17887381 NR Description: receptor protein kinase-like protein [Capsicum
  misc_feature (1)..(644): Homolog of NCBI NO: 15241606 NR Description: protein kinase - like protein; protein id:
  misc_feature (1)..(665): Homolog of NCBI NO: 15239630 NR Description: receptor-protein kinase-like protein; protein id:
  misc_feature (1)..(638): Homolog of NCBI NO: 5679841 NR Description: contains eukaryotic protein kinase domain
  misc_feature (241)..(665): Homolog of NCBI NO: 15238498 NR Description: receptor-like protein kinase precursor - like;
  misc_feature (1)..(314): Homolog of NCBI NO: 15238498 NR Description: receptor-like protein kinase precursor - like;
  misc_feature (1)..(663): Homolog of NCBI NO: 34393641 NR Description: putative PTH-2, resistance gene (PTO kinase)
MPELFDTAALVGFTDQTMDAKTANLQSMFRLNVGGQDIPGSQDSGGLTRTWYNDAPYIFSAGLGVTLQASNNFRINYQNMPVSIAPADIYKTARSQGPNGDINLKSNLTWMFQIDKNFTYILRLHFCEFQLSKINQKVFNIYINNRTAQADTTPADIIGWTGEKGIPMYKDYAIYVDANNGGEEITLQMTPSTFGQPEYYDSSLNGLEIFKMDTMKNLAGPNPEPSPMQAEEEVKKEFKNEKRHAFIIGSAGGVLAVLIGALCFTAYKKKQGYQGGDSHTSSWLPIYGNSTTSGTKSTISGKSNNGSHLSNLAAGLCRRFSLPEIKHGTQNFDDSNVIGVGGFGKVYKGVIDGTTKVAVKKSNPNSEQGLNEFETEIELLSRLRHKHLVSLIGYCDEGGEMCLVYDYMAFGTLREHLYNTKKPQLTWKRRLEIAIGAARGLHYLHTGAKYTIIHRDVKTTNILVDENWVAKVSDFGLSKTGPNMNGGHVTTVVKGSFGYLDPEYFRRQQLTEKSDVYSFGVVLFEILCARPALNPSLPKEQVSLGDWAMNCKRKGNLEDIIDPNLKGKINAECLKKFADTAEKCLNDSGLERPTMGDVLWNLEFALQLQETADGTRHRTPNNGGSSEDLGRGGMAVNVAGRDDVSDLSSEDNTEIFSQIVNPKGR

SEQ ID NO: 95758 - DNA, 2303 bp, Arabidopsis thaliana
  misc_feature (1)..(2303): Ceres Seq. ID no. 12730257
  misc_feature: MA Experiment ID: 20000185 Result: Down-regulated in Transcription
  misc_feature: MA Experiment 20000185 PARAMETER Experiment Name: At_Roots__P Parameter: Age (day) Value: 7 vs. 21
  misc_feature: MA Experiment 20000185 PARAMETER Experiment Name: At_Roots__P Parameter: Organism Value: A. thaliana
  misc_feature: MA Experiment 20000185 PARAMETER Experiment Name: At_Roots__P Parameter: Tissue Value: Roots vs. Whole Plant
  misc_feature: MA Experiment ID: 20000437 Result: Down-regulated in Transcription
  misc_feature: MA Experiment 20000437 PARAMETER Experiment Name: At_Drought_P Parameter: Age (day) Value: 8
  misc_feature: MA Experiment 20000437 PARAMETER Experiment Name: At_Drought_P Parameter: Organism Value: A. thaliana
  misc_feature: MA Experiment 20000437 PARAMETER Experiment Name: At_Drought_P Parameter: Plant Line Value: WS
  misc_feature: MA Experiment 20000437 PARAMETER Experiment Name: At_Drought_P Parameter: Timepoint (hr) Value: 24
  misc_feature: MA Experiment 20000437 PARAMETER Experiment Name: At_Drought_P Parameter: Tissue Value: Whole Plant
  misc_feature: MA Experiment 20000437 PARAMETER Experiment Name: At_Drought_P Parameter: Treatment Value: Drought vs. No Drought
  misc_feature: MA Experiment ID: 20000439 Result: Down-regulated in Transcription
  misc_feature: MA Experiment 20000439 PARAMETER Experiment Name: At_Roots__P Parameter: Age (day) Value: 14 vs. 21
  misc_feature: MA Experiment 20000439 PARAMETER Experiment Name: At_Roots__P Parameter: Organism Value: A. thaliana
  misc_feature: MA Experiment 20000439 PARAMETER Experiment Name: At_Roots__P Parameter: Tissue Value: Roots vs. Whole Plant
gagattacaataaaacgagtggtgttgctctgttctgttcttcccacttctactccaaaaaatcctaacttttcgcattatcttcggttttgcgtttcgattttttgtctgaaaatcccaattcgacactctgtttctgcccacaaaactatcttccatgaaaaatcgaaactttgtctacaaataatgactccgttatcctctgaactcgttggtttcactatccctttctactccaaaactcagaaaccctattcaaattcttctcacggactcctactatctcacaatcgaagctccctcttaaccttctcaaactctaaccctaacaacgacaatggtagatccttttcatcttcaggagcaagaaaccttcaaaccactaccacaacagacgcaacactccccacagaacgaagacaacaacattcacaatctctcggatttagagatacacagatgctcaaaatcttccatcgatcatgccgttcagggaattacatcgaatctctacacttactcgagaccatggtacgcaaaggttacaatcctgatgtgatactctgcactaagctcattaaagggttcttcactctaagaaacatccctaaagctgttagggttatggagattctcgagaaattcggacagcctgatgtgtttgcttacaacgctctgattaatgggttttgtaagatgaatcgaatcgatgatgctacgagagttcttgataggatgagaagtaaagatttttcaccagataccgtgacttacaacataatgattggtagtttgtgtagtagaggtaaacttgatcttgctttgaaggttttaaatcagttgttaagtgataattgccaacctactgtcattacttacacgattttgatcgaagctacgatgctcgaaggcggagttgatgaagcgttgaagcttatggatgagatgttgtctagagggttaaaacctgatatgtttacttataacacaatcattagaggaatgtgtaaagaagggatggtggaccgcgcgtttgagatggttcggaatttggaattgaaaggttgtgagcctgatgtgatctcttataacatcttgcttcgtgctcttttgaatcaagggaaatgggaagaaggtgagaagctaatgactaagatgttttcagagaagtgtgatcctaatgttgtgacttatagcattttgattactactctatgtcgcgatggaaagatcgaagaagcgatgaatcttcttaagcttatgaaggaaaaagggttaactcctgatgcttatagctatgatcctttgatagctgcgttttgtagagaaggtaggttagatgttgctattgagttcttggaaactatgatctctgacggatgtttaccggacatagttaactacaacacggttttagctacgttgtgtaagaacgggaaagcagaccaagcgttggagatttttgggaaactaggagaagttggctgctcaccgaactctagttcttacaacacgatgtttagcgcgttatggagcagtggagataaaatcagagcgttacatatgatattagagatgatgagtaacgggatagatcctgatgagatcacatataactcgatgatatcgtgtctgtgcagagaaggaatggtagatgaagcttttgagttattggttgatatgaggagctgtgagtttcatccatcggttgttacatacaacattgttcttttgggattctgcaaagctcataggatcgaggacgcgatcaatgttttggaatcaatggtgggaaatggatgtaggcctaatgaaactacttatactgtgctcattgaagggattgggtttgctggatatagagcagaagcaatggagttagcaaatgatttggttcgcatcgatgccatttcggagtactcgttcaagaggttgcataggactttccctttacttaatgttttacagagatcttctcagacatttggttattaagtgaaagtcgagaacctagataactgatccaggttttcaagaaagggtgttcttaaaatacgatcacgtagttctcaaggtaccaatggaaagtgtaaggaaacctcacctgtgcaacaccaagatattgacagtccatagctgcaactgctacctgctgctcatacttggtcccggaagacgttttgccctctagttttatataccaaacataatgtgcaagcagctctttcattgtgtttctacgattcgtgtaaagttaaacacctattatctaagataattagaacaaatcgaaccaaattggc

SEQ ID NO: 95759 - protein, 664 aa, Arabidopsis thaliana
  peptide (1)..(664): Ceres Seq. ID no. 12730258
  misc_feature (326)..(360): Pfam Name: PPR repeat Pfam Description: PPR repeat
  misc_feature (144)..(631): Homolog of NCBI NO: 15218325 NR Description: hypothetical protein; protein id: At1g09900.1
  misc_feature (169)..(632): Homolog of NCBI NO: 34910106 NR Description: B1100D10.28 [Oryza sativa (japonica
  misc_feature (166)..(651): Homolog of NCBI NO: 7487907 NR Description: hypothetical protein YUP8H12R.30 - Arabidopsis >gi|3152594|gb|AAC17075.1| Contains repeats similar to RECA gb|L26100 from Acinetobacter calcoaceticus. [Arabidopsis
  misc_feature (166)..(651): Homolog of NCBI NO: 30699392 NR Description: pentatricopeptide (PPR) repeat-containing protein
  misc_feature (157)..(660): Homolog of NCBI NO: 34896658 NR Description: putative membrane-associated salt-inducible
  misc_feature (192)..(631): Homolog of NCBI NO: 15221635 NR Description: unknown protein; protein id: At1g62930.1
  misc_feature (192)..(631): Homolog of NCBI NO: 25404380 NR Description: hypothetical protein F16P17.7 [imported] - thaliana >gi|8493580|gb|AAF75803.1|AC011000_6 Contains weak to leaf protein from Ipomea nil gb|D85101 and contains a RepB
  misc_feature (171)..(631): Homolog of NCBI NO: 15221691 NR Description: unknown protein; protein id: At1g63130.1
  misc_feature (192)..(631): Homolog of NCBI NO: 15221549 NR Description: PPR-repeat protein; protein id: At1g62670.1
  misc_feature (192)..(631): Homolog of NCBI NO: 6630464 NR Description: F23N19.4 [Arabidopsis thaliana]
EITIKRVVLLCSVLPTSTPKNPNFSHYLRFCVSIFCLKIPIRHSVSAHKTIFHEKSKLCLQIMTPLSSELVGFTIPFYSKTQKPYSNSSHGLLLSHNRSSLLTFSNSNPNNDNGRSFSSSGARNLQTTTTTDATLPTERRQQHSQSLGFRDTQMLKIFHRSCRSGNYIESLHLLETMVRKGYNPDVILCTKLIKGFFTLRNIPKAVRVMEILEKFGQPDVFAYNALINGFCKMNRIDDATRVLDRMRSKDFSPDTVTYNIMIGSLCSRGKLDLALKVLNQLLSDNCQPTVITYTILIEATMLEGGVDEALKLMDEMLSRGLKPDMFTYNTIIRGMCKEGMVDRAFEMVRNLELKGCEPDVISYNILLRALLNQGKWEEGEKLMTKMFSEKCDPNVVTYSILITTLCRDGKIEEAMNLLKLMKEKGLTPDAYSYDPLIAAFCREGRLDVAIEFLETMISDGCLPDIVNYNTVLATLCKNGKADQALEIFGKLGEVGCSPNSSSYNTMFSALWSSGDKIRALHMILEMMSNGIDPDEITYNSMISCLCREGMVDEAFELLVDMRSCEFHPSVVTYNIVLLGFCKAHRIEDAINVLESMVGNGCRPNETTYTVLIEGIGFAGYRAEAMELANDLVRIDAISEYSFKRLHRTFPLLNVLQRSSQTFGY

SEQ ID NO: 95760 - protein, 602 aa, Arabidopsis thaliana
  peptide (1)..(602): Ceres Seq. ID no. 12730259
  misc_feature (264)..(298): Pfam Name: PPR repeat Pfam Description: PPR repeat
  misc_feature (82)..(569): Homolog of NCBI NO: 15218325 NR Description: hypothetical protein; protein id: At1g09900.1
  misc_feature (107)..(570): Homolog of NCBI NO: 34910106 NR Description: B1100D10.28 [Oryza sativa (japonica
  misc_feature (104)..(589): Homolog of NCBI NO: 7487907 NR Description: hypothetical protein YUP8H12R.30 - Arabidopsis >gi|3152594|gb|AAC17075.1| Contains repeats similar to RECA gb|L26100 from Acinetobacter calcoaceticus. [Arabidopsis
  misc_feature (104)..(589): Homolog of NCBI NO: 30699392 NR Description: pentatricopeptide (PPR) repeat-containing protein
  misc_feature (95)..(598): Homolog of NCBI NO: 34896658 NR Description: putative membrane-associated salt-inducible
  misc_feature (130)..(569): Homolog of NCBI NO: 15221635 NR Description: unknown protein; protein id: At1g62930.1
  misc_feature (130)..(569): Homolog of NCBI NO: 25404380 NR Description: hypothetical protein F16P17.7 [imported] - thaliana >gi|8493580|gb|AAF75803.1|AC011000_6 Contains weak to leaf protein from Ipomea nil gb|D85101 and contains a RepB
  misc_feature (109)..(569): Homolog of NCBI NO: 15221691 NR Description: unknown protein; protein id: At1g63130.1
  misc_feature (130)..(569): Homolog of NCBI NO: 15221549 NR Description: PPR-repeat protein; protein id: At1g62670.1
  misc_feature (130)..(569): Homolog of NCBI NO: 6630464 NR Description: F23N19.4 [Arabidopsis thaliana]
MTPLSSELVGFTIPFYSKTQKPYSNSSHGLLLSHNRSSLLTFSNSNPNNDNGRSFSSSGARNLQTTTTTDATLPTERRQQHSQSLGFRDTQMLKIFHRSCRSGNYIESLHLLETMVRKGYNPDVILCTKLIKGFFTLRNIPKAVRVMEILEKFGQPDVFAYNALINGFCKMNRIDDATRVLDRMRSKDFSPDTVTYNIMIGSLCSRGKLDLALKVLNQLLSDNCQPTVITYTILIEATMLEGGVDEALKLMDEMLSRGLKPDMFTYNTIIRGMCKEGMVDRAFEMVRNLELKGCEPDVISYNILLRALLNQGKWEEGEKLMTKMFSEKCDPNVVTYSILITTLCRDGKIEEAMNLLKLMKEKGLTPDAYSYDPLIAAFCREGRLDVAIEFLETMISDGCLPDIVNYNTVLATLCKNGKADQALEIFGKLGEVGCSPNSSSYNTMFSALWSSGDKIRALHMILEMMSNGIDPDEITYNSMISCLCREGMVDEAFELLVDMRSCEFHPSVVTYNIVLLGFCKAHRIEDAINVLESMVGNGCRPNETTYTVLIEGIGFAGYRAEAMELANDLVRIDAISEYSFKRLHRTFPLLNVLQRSSQTFGY

SEQ ID NO: 95761 - protein, 511 aa, Arabidopsis thaliana
  peptide (1)..(511): Ceres Seq. ID no. 12730260
  misc_feature (173)..(207): Pfam Name: PPR repeat Pfam Description: PPR repeat
  misc_feature (1)..(478): Homolog of NCBI NO: 15218325 NR Description: hypothetical protein; protein id: At1g09900.1
  misc_feature (16)..(479): Homolog of NCBI NO: 34910106 NR Description: B1100D10.28 [Oryza sativa (japonica
  misc_feature (13)..(498): Homolog of NCBI NO: 7487907 NR Description: hypothetical protein YUP8H12R.30 - Arabidopsis >gi|3152594|gb|AAC17075.1| Contains repeats similar to RECA gb|L26100 from Acinetobacter calcoaceticus. [Arabidopsis
  misc_feature (13)..(498): Homolog of NCBI NO: 30699392 NR Description: pentatricopeptide (PPR) repeat-containing protein
  misc_feature (4)..(507): Homolog of NCBI NO: 34896658 NR Description: putative membrane-associated salt-inducible
  misc_feature (39)..(478): Homolog of NCBI NO: 15221635 NR Description: unknown protein; protein id: At1g62930.1
  misc_feature (39)..(478): Homolog of NCBI NO: 25404380 NR Description: hypothetical protein F16P17.7 [imported] - thaliana >gi|8493580|gb|AAF75803.1|AC011000_6 Contains weak to leaf protein from Ipomea nil gb|D85101 and contains a RepB
  misc_feature (18)..(478): Homolog of NCBI NO: 15221691 NR Description: unknown protein; protein id: At1g63130.1
  misc_feature (39)..(478): Homolog of NCBI NO: 15221549 NR Description: PPR-repeat protein; protein id: At1g62670.1
  misc_feature (39)..(478): Homolog of NCBI NO: 6630464 NR Description: F23N19.4 [Arabidopsis thaliana]
MLKIFHRSCRSGNYIESLHLLETMVRKGYNPDVILCTKLIKGFFTLRNIPKAVRVMEILEKFGQPDVFAYNALINGFCKMNRIDDATRVLDRMRSKDFSPDTVTYNIMIGSLCSRGKLDLALKVLNQLLSDNCQPTVITYTILIEATMLEGGVDEALKLMDEMLSRGLKPDMFTYNTIIRGMCKEGMVDRAFEMVRNLELKGCEPDVISYNILLRALLNQGKWEEGEKLMTKMFSEKCDPNVVTYSILITTLCRDGKIEEAMNLLKLMKEKGLTPDAYSYDPLIAAFCREGRLDVAIEFLETMISDGCLPDIVNYNTVLATLCKNGKADQALEIFGKLGEVGCSPNSSSYNTMFSALWSSGDKIRALHMILEMMSNGIDPDEITYNSMISCLCREGMVDEAFELLVDMRSCEFHPSVVTYNIVLLGFCKAHRIEDAINVLESMVGNGCRPNETTYTVLIEGIGFAGYRAEAMELANDLVRIDAISEYSFKRLHRTFPLLNVLQRSSQTFGY

SEQ ID NO: 95762 - DNA, 567 bp, Arabidopsis thaliana
  misc_feature (1)..(567): Ceres Seq. ID no. 12730261
  misc_feature: MA Experiment ID: 20000171 Result: Up-regulated in Transcription
  misc_feature: MA Experiment 20000171 PARAMETER Experiment Name: At_42deg_Heat_P Parameter: Age (day) Value: 14
  misc_feature: MA Experiment 20000171 PARAMETER Experiment Name: At_42deg_Heat_P Parameter: Organism Value: A. thaliana
  misc_feature: MA Experiment 20000171 PARAMETER Experiment Name: At_42deg_Heat_P Parameter: Plant Line Value: WS
  misc_feature: MA Experiment 20000171 PARAMETER Experiment Name: At_42deg_Heat_P Parameter: Temperature (deg C) Value: 42 vs. 22
  misc_feature: MA Experiment 20000171 PARAMETER Experiment Name: At_42deg_Heat_P Parameter: Timepoint (hr) Value: 1
  misc_feature: MA Experiment 20000171 PARAMETER Experiment Name: At_42deg_Heat_P Parameter: Tissue Value: Aerial
  misc_feature: MA Experiment ID: 20000180 Result: Down-regulated in Transcription
  misc_feature: MA Experiment 20000180 PARAMETER Experiment Name: At_Germinating_Seeds_P Parameter: Age (hr) Value: 24 vs. 0
  misc_feature: MA Experiment 20000180 PARAMETER Experiment Name: At_Germinating_Seeds_P Parameter: Tissue Value: Germinating Seeds
atggcggatccgatgaaccatagcaccgggcatcaacaacagcagaagtaccgtcagtacaatccttaccaacaagtcaatcttccgtaccgtaagctctacgaactcccaacttctcctgagtttctcttcgaagaagaagctacgaaaaaacgcttaacatggggagagaacctcaccttcttcaccggttggggttattgcactggatctgttctcggagccttcaagggtacaattgcggggatgcgagccgccgaacgaggcgaatccctaaagatccgaactaatcggattttgaactccggtggactcgttgcaagacgcggcgggaattgcttaggatccgtagggttgatgtttgctgctatggagagcggtgttacgtatatgagagacggagacgacggttcgttgacaactgtgatcgctggtttagccactggtgtgctttacagagctgcttctggacctagatccgctgtggttgccggagctgtcggaggagttgcggctttggctgcagttgctggaagacgcatcgtcaagcgattcgttccaatctaa

SEQ ID NO: 95763 - protein, 188 aa, Arabidopsis thaliana
  peptide (1)..(188): Ceres Seq. ID no. 12730262
  misc_feature (48)..(182): Pfam Name: Tim17/Tim22/Tim23 family Pfam Description: Tim17/Tim22/Tim23 family
  misc_feature (1)..(188): Homolog of NCBI NO: 15229350 NR Description: putative inner mitochondrial membrane protein; id: At3g04800.1 [Arabidopsis thaliana] putative inner mitochondrial membrane protein [Arabidopsis
  misc_feature (1)..(187): Homolog of NCBI NO: 34902184 NR Description: Putative mitochondrial inner membrane protein
  misc_feature (6)..(188): Homolog of NCBI NO: 15218593 NR Description: inner mitochondrial membrane protein; protein id: supported by cDNA: 6793., supported by cDNA: gi_14596208, by cDNA: gi_18377493, supported by cDNA: gi_603055 [Arabidopsis
  misc_feature (5)..(188): Homolog of NCBI NO: 18394498 NR Description: inner mitochondrial membrane protein, putative; id: At1g17530.1, supported by cDNA: gi_13641345, supported by gi_15010569, supported by cDNA: gi_20147386 [Arabidopsis
  misc_feature (1)..(187): Homolog of NCBI NO: 37536126 NR Description: putaive mitochondrial inner membrane protein
  misc_feature (5)..(188): Homolog of NCBI NO: 13641346 NR Description: translocase of inner mitochondrial membrane TIM23
  misc_feature (124)..(187): Homolog of NCBI NO: 12039278 NR Description: putative inner mitochondrial membrane protein
  misc_feature (7)..(56): Homolog of NCBI NO: 12039278 NR Description: putative inner mitochondrial membrane protein
  misc_feature (86)..(187): Homolog of NCBI NO: 34394286 NR Description: hypothetical protein [Oryza sativa (japonica
  misc_feature (18)..(95): Homolog of NCBI NO: 38344267 NR Description: OSJNBa0005N02.5 [Oryza sativa (japonica
MADPMNHSTGHQQQQKYRQYNPYQQVNLPYRKLYELPTSPEFLFEEEATKKRLTWGENLTFFTGWGYCTGSVLGAFKGTIAGMRAAERGESLKIRTNRILNSGGLVARRGGNCLGSVGLMFAAMESGVTYMRDGDDGSLTTVIAGLATGVLYRAASGPRSAVVAGAVGGVAALAAVAGRRIVKRFVPI

SEQ ID NO: 95764 - protein, 184 aa, Arabidopsis thaliana
  peptide (1)..(184): Ceres Seq. ID no. 12730263
  misc_feature (44)..(178): Pfam Name: Tim17/Tim22/Tim23 family Pfam Description: Tim17/Tim22/Tim23 family
  misc_feature (1)..(184): Homolog of NCBI NO: 15229350 NR Description: putative inner mitochondrial membrane protein; id: At3g04800.1 [Arabidopsis thaliana] putative inner mitochondrial membrane protein [Arabidopsis
  misc_feature (1)..(183): Homolog of NCBI NO: 34902184 NR Description: Putative mitochondrial inner membrane protein
  misc_feature (2)..(184): Homolog of NCBI NO: 15218593 NR Description: inner mitochondrial membrane protein; protein id: supported by cDNA: 6793., supported by cDNA: gi_14596208, by cDNA: gi_18377493, supported by cDNA: gi_603055 [Arabidopsis
  misc_feature (1)..(184): Homolog of NCBI NO: 18394498 NR Description: inner mitochondrial membrane protein, putative; id: At1g17530.1, supported by cDNA: gi_13641345, supported by gi_15010569, supported by cDNA: gi_20147386 [Arabidopsis
  misc_feature (1)..(183): Homolog of NCBI NO: 37536126 NR Description: putaive mitochondrial inner membrane protein
  misc_feature (1)..(184): Homolog of NCBI NO: 13641346 NR Description: translocase of inner mitochondrial membrane TIM23
  misc_feature (120)..(183): Homolog of NCBI NO: 12039278 NR Description: putative inner mitochondrial membrane protein
  misc_feature (3)..(52): Homolog of NCBI NO: 12039278 NR Description: putative inner mitochondrial membrane protein
  misc_feature (82)..(183): Homolog of NCBI NO: 34394286 NR Description: hypothetical protein [Oryza sativa (japonica
  misc_feature (14)..(91): Homolog of NCBI NO: 38344267 NR Description: OSJNBa0005N02.5 [Oryza sativa (japonica
MNHSTGHQQQQKYRQYNPYQQVNLPYRKLYELPTSPEFLFEEEATKKRLTWGENLTFFTGWGYCTGSVLGAFKGTIAGMRAAERGESLKIRTNRILNSGGLVARRGGNCLGSVGLMFAAMESGVTYMRDGDDGSLTTVIAGLATGVLYRAASGPRSAVVAGAVGGVAALAAVAGRRIVKRFVPI

SEQ ID NO: 95765 - protein, 106 aa, Arabidopsis thaliana
  peptide (1)..(106): Ceres Seq. ID no. 12730264
  misc_feature (1)..(100): Pfam Name: Tim17/Tim22/Tim23 family Pfam Description: Tim17/Tim22/Tim23 family
  misc_feature (1)..(106): Homolog of NCBI NO: 15229350 NR Description: putative inner mitochondrial membrane protein; id: At3g04800.1 [Arabidopsis thaliana] putative inner mitochondrial membrane protein [Arabidopsis
  misc_feature (1)..(105): Homolog of NCBI NO: 34902184 NR Description: Putative mitochondrial inner membrane protein
  misc_feature (1)..(106): Homolog of NCBI NO: 15218593 NR Description: inner mitochondrial membrane protein; protein id: supported by cDNA: 6793., supported by cDNA: gi_14596208, by cDNA: gi_18377493, supported by cDNA: gi_603055 [Arabidopsis
  misc_feature (1)..(106): Homolog of NCBI NO: 18394498 NR Description: inner mitochondrial membrane protein, putative; id: At1g17530.1, supported by cDNA: gi_13641345, supported by gi_15010569, supported by cDNA: gi_20147386 [Arabidopsis
  misc_feature (1)..(105): Homolog of NCBI NO: 37536126 NR Description: putaive mitochondrial inner membrane protein
  misc_feature (1)..(106): Homolog of NCBI NO: 13641346 NR Description: translocase of inner mitochondrial membrane TIM23
  misc_feature (42)..(105): Homolog of NCBI NO: 12039278 NR Description: putative inner mitochondrial membrane protein
  misc_feature (4)..(105): Homolog of NCBI NO: 34394286 NR Description: hypothetical protein [Oryza sativa (japonica
  misc_feature (1)..(13): Homolog of NCBI NO: 38344267 NR Description: OSJNBa0005N02.5 [Oryza sativa (japonica
  misc_feature (1)..(91): Homolog of NCBI NO: 21430836 NR Description: SD19278p [Drosophila melanogaster]
MRAAERGESLKIRTNRILNSGGLVARRGGNCLGSVGLMFAAMESGVTYMRDGDDGSLTTVIAGLATGVLYRAASGPRSAVVAGAVGGVAALAAVAGRRIVKRFVPI

SEQ ID NO: 95766 - DNA, 2418 bp, Arabidopsis thaliana
  misc_feature (1)..(2418): Ceres Seq. ID no. 12730300
  misc_feature: MA Experiment ID: 20000171 Result: Down-regulated in Transcription
  misc_feature: MA Experiment 20000171 PARAMETER Experiment Name: At_42deg_Heat_P Parameter: Age (day) Value: 14
  misc_feature: MA Experiment 20000171 PARAMETER Experiment Name: At_42deg_Heat_P Parameter: Organism Value: A. thaliana
  misc_feature: MA Experiment 20000171 PARAMETER Experiment Name: At_42deg_Heat_P Parameter: Plant Line Value: WS
  misc_feature: MA Experiment 20000171 PARAMETER Experiment Name: At_42deg_Heat_P Parameter: Temperature (deg C) Value: 42 vs. 22
  misc_feature: MA Experiment 20000171 PARAMETER Experiment Name: At_42deg_Heat_P Parameter: Timepoint (hr) Value: 1
  misc_feature: MA Experiment 20000171 PARAMETER Experiment Name: At_42deg_Heat_P Parameter: Tissue Value: Aerial
  misc_feature: MA Experiment ID: 20000173 Result: Down-regulated in Transcription
  misc_feature: MA Experiment 20000173 PARAMETER Experiment Name: At_42deg_Heat_P Parameter: Age (day) Value: 14
  misc_feature: MA Experiment 20000173 PARAMETER Experiment Name: At_42deg_Heat_P Parameter: Organism Value: A. thaliana
  misc_feature: MA Experiment 20000173 PARAMETER Experiment Name: At_42deg_Heat_P Parameter: Plant Line Value: WS
  misc_feature: MA Experiment 20000173 PARAMETER Experiment Name: At_42deg_Heat_P Parameter: Temperature (deg C) Value: 42 vs. 22
  misc_feature: MA Experiment 20000173 PARAMETER Experiment Name: At_42deg_Heat_P Parameter: Timepoint (hr) Value: 6
  misc_feature: MA Experiment 20000173 PARAMETER Experiment Name: At_42deg_Heat_P Parameter: Tissue Value: Aerial
  misc_feature: MA Experiment ID: 20000184 Result: Down-regulated in Transcription
  misc_feature: MA Experiment 20000184 PARAMETER Experiment Name: At_Shoots__P Parameter: Age (day) Value: 7
  misc_feature: MA Experiment 20000184 PARAMETER Experiment Name: At_Shoots__P Parameter: Tissue Value: Shoots vs. Whole Plant
  misc_feature: MA Experiment ID: 20000185 Result: Up-regulated in Transcription
  misc_feature: MA Experiment 20000185 PARAMETER Experiment Name: At_Roots__P Parameter: Age (day) Value: 7 vs. 21
  misc_feature: MA Experiment 20000185 PARAMETER Experiment Name: At_Roots__P Parameter: Organism Value: A. thaliana
  misc_feature: MA Experiment 20000185 PARAMETER Experiment Name: At_Roots__P Parameter: Tissue Value: Roots vs. Whole Plant
  misc_feature: MA Experiment ID: 20000439 Result: Up-regulated in Transcription
  misc_feature: MA Experiment 20000439 PARAMETER Experiment Name: At_Roots__P Parameter: Age (day) Value: 14 vs. 21
  misc_feature: MA Experiment 20000439 PARAMETER Experiment Name: At_Roots__P Parameter: Organism Value: A. thaliana
  misc_feature: MA Experiment 20000439 PARAMETER Experiment Name: At_Roots__P Parameter: Tissue Value: Roots vs. Whole Plant
acgactctgttgtatatgtgtatgtatcaccttgccttttctccaaagccctaattgatttttctttcttctttttttgtgtatgctttaaaggtttcatttttaaaatcttcttggactccatttcttttccttttcctttatctttttgcctctctttgtggagtttttgaaatcatccctcatttcattcctattttcgttgtctctttgagtttgagtcagctttgtgttgtgtctaaattctaaacaagtttcagatctttaccttcctttgacttgtctcctgtcttaaaactagggtttaattttctttctctgttcaagtctcagatttgaccagcttggtccagaatttcgcttctcctcgatcataaatcaaagttgattcaaagaggtttgattgagtcagagatctctcttttagaaacatgttgagcaaatgaaggtttgtttgatgagatgggttgtgtattgggtcgacccggatcatcaggatcagtttctgggtctagagacgaagttagtactaggattgagtctaatcgacatcaagttaacaatgtgtctgtgaccaaaaccgaaacaacagagagcactagtgctgttgttgttgcttctgcttctaatggtgaggaagttaggaatcatgaagatgttgtggatcagaagaaagagaatggctttgttgtgactgaggccaaggagaggaaatcgaaaggcgaaagaaaaaggtctaagcctcctgacccgagacggagcaacccgccaaagaatttgctcggtgagcaagttgctgctggatggccctcgtggttgtctgaagtttgtggggaagcgttaagcggatggcttccaagaaaagcggattcctttgagaagattgataagattggatcaggaacgtatagtaatgtgtacaaggcgaaagattcgctgacaggaaacattgtggctttaaagaaagtgcggtgtgatgttaatgaacgggagagtttaaaatttatggctagagagattctgattttgaggagattggatcatcctaatgtcattaaattggaaggtttggttacttcgaggatgtcgagtagtttatacttggttttccgttatatggatcatgatttagctggtctcgccgctagcccggagataaaattcactgagcaacaggttaaatgctatatgaagcaactactttcagggctcgagcattgccataaccgaggagttctacaccgtgatattaaaggatcaaaccttcttatagatgacggtggagttcttagaataggtgatttcgggcttgcaacgttttttgatgcgagtaagaggcaagagatgacgaatcgggttgttactttatggtacagatcaccagagcttcttcatggtgttgttgagtacagtgtcggagttgatttgtggagtgctggttgcattttagctgagttattagctggtagagcgataatgccaggtcgtaacgaggtcgagcagttgcataggatatataagttatgtggatcgccttcagaagaatattggaagaagattagacttccttctactcataagcatgctcatcacaagcctttaccacagtataagagaagaataagagaggtttacaaagatttctctcctgaggcgctttctctactcgatacgcttctagcgctcgatccagctgaacgccagacagctacagatgtgttgatgagtgatttcttcacgacggagccattggcatgtcaaccttctgatctcccgaaatatcctccaagtaaagagattgatgccaagagacgagacgaagagtatcggagacaaagagaagcgcgcaaggcccaaggagagagcggaagaagaatgagaccccgagaacgagccccaagagcaatgccggctcctgaagccaacgccgagaaccagtctaacattgataggatgcgtatgatcacacacgcgaatgcaaagagcaagagcgagaagtttcctccaccgcatcaagacgggtcactcggttttcaggtgggatcttcaaggcgactggatccatcagagataccgtatagcacaaactcattcacatcatcatactccaaagagccatttcaaacttggtcaggccctttggctcccattggagcacctgactcaaccacaaggagaagaaacgatattaacaaagagagaagaatggcttctaaggtcaaaggcaaaagaatcgttgtttgagataataattattattcatctccaaatttcaaaagtttcctttttgatagattgagaaaaaaacaaaattccaaattttatctttttggtgggttatatgttctttatttggttgttatgtgtattgtacaagagaattgacaaaacacagaaatgagaggaattaatttacat

SEQ ID NO: 95767 - protein, 593 aa, Arabidopsis thaliana
  peptide (1)..(593): Ceres Seq. ID no. 12730301
  misc_feature (138)..(425): Pfam Name: Protein kinase domain Pfam Description: Protein kinase domain
  misc_feature (1)..(574): Homolog of NCBI NO: 7671528 NR Description: CRK1 protein [Beta vulgaris]
  misc_feature (39)..(593): Homolog of NCBI NO: 15221868 NR Description: CRK1 protein, putative; protein id: At1g54610.1, by cDNA: gi_13877618 [Arabidopsis thaliana]
  misc_feature (1)..(573): Homolog of NCBI NO: 34899282 NR Description: putative CRK1 protein(cdc2-related kinase 1)
  misc_feature (59)..(524): Homolog of NCBI NO: 15241289 NR Description: cyclin-dependent protein kinase-like; protein id:
  misc_feature (59)..(524): Homolog of NCBI NO: 26449319 NR Description: putative cyclin-dependent protein kinase thaliana] >gi|29028978|gb|AAO64868.1| At5g50860 [Arabidopsis
  misc_feature (79)..(577): Homolog of NCBI NO: 34903662 NR Description: putative CRK1 protein [Oryza sativa (japonica group)] >gi|20804521|dbj|BAB92215.1| putative CRK1 protein [Oryza
  misc_feature (1)..(583): Homolog of NCBI NO: 15219169 NR Description: cell division-related protein, putative; protein At1g53050.1 [Arabidopsis thaliana] >gi|25405618|pir||A96571
  misc_feature (1)..(583): Homolog of NCBI NO: 28393523 NR Description: putative cell division-related protein
  misc_feature (108)..(543): Homolog of NCBI NO: 15217565 NR Description: putative protein kinase; protein id: At1g09600.1
  misc_feature (108)..(543): Homolog of NCBI NO: 25402555 NR Description: hypothetical protein [imported] - Arabidopsis >gi|3482933|gb|AAC33218.1| Similar to cdc2 protein kinases
MGCVLGRPGSSGSVSGSRDEVSTRIESNRHQVNNVSVTKTETTESTSAVVVASASNGEEVRNHEDVVDQKKENGFVVTEAKERKSKGERKRSKPPDPRRSNPPKNLLGEQVAAGWPSWLSEVCGEALSGWLPRKADSFEKIDKIGSGTYSNVYKAKDSLTGNIVALKKVRCDVNERESLKFMAREILILRRLDHPNVIKLEGLVTSRMSSSLYLVFRYMDHDLAGLAASPEIKFTEQQVKCYMKQLLSGLEHCHNRGVLHRDIKGSNLLIDDGGVLRIGDFGLATFFDASKRQEMTNRVVTLWYRSPELLHGVVEYSVGVDLWSAGCILAELLAGRAIMPGRNEVEQLHRIYKLCGSPSEEYWKKIRLPSTHKHAHHKPLPQYKRRIREVYKDFSPEALSLLDTLLALDPAERQTATDVLMSDFFTTEPLACQPSDLPKYPPSKEIDAKRRDEEYRRQREARKAQGESGRRMRPRERAPRAMPAPEANAENQSNIDRMRMITHANAKSKSEKFPPPHQDGSLGFQVGSSRRLDPSEIPYSTNSFTSSYSKEPFQTWSGPLAPIGAPDSTTRRRNDINKERRMASKVKGKRIVV

SEQ ID NO: 95768 - protein, 412 aa, Arabidopsis thaliana
  peptide (1)..(412): Ceres Seq. ID no. 12730302
  misc_feature (1)..(244): Pfam Name: Protein kinase domain Pfam Description: Protein kinase domain
  misc_feature (1)..(393): Homolog of NCBI NO: 7671528 NR Description: CRK1 protein [Beta vulgaris]
  misc_feature (1)..(412): Homolog of NCBI NO: 15221868 NR Description: CRK1 protein, putative; protein id: At1g54610.1, by cDNA: gi_13877618 [Arabidopsis thaliana]
  misc_feature (1)..(392): Homolog of NCBI NO: 34899282 NR Description: putative CRK1 protein(cdc2-related kinase 1)
  misc_feature (1)..(343): Homolog of NCBI NO: 15241289 NR Description: cyclin-dependent protein kinase-like; protein id:
  misc_feature (1)..(343): Homolog of NCBI NO: 26449319 NR Description: putative cyclin-dependent protein kinase thaliana] >gi|29028978|gb|AAO64868.1| At5g50860 [Arabidopsis
  misc_feature (1)..(396): Homolog of NCBI NO: 34903662 NR Description: putative CRK1 protein [Oryza sativa (japonica group)] >gi|20804521|dbj|BAB92215.1| putative CRK1 protein [Oryza
  misc_feature (1)..(402): Homolog of NCBI NO: 15219169 NR Description: cell division-related protein, putative; protein At1g53050.1 [Arabidopsis thaliana] >gi|25405618|pir||A96571
  misc_feature (1)..(402): Homolog of NCBI NO: 28393523 NR Description: putative cell division-related protein
  misc_feature (1)..(362): Homolog of NCBI NO: 15217565 NR Description: putative protein kinase; protein id: At1g09600.1
  misc_feature (1)..(362): Homolog of NCBI NO: 25402555 NR Description: hypothetical protein [imported] - Arabidopsis >gi|3482933|gb|AAC33218.1| Similar to cdc2 protein kinases
MAREILILRRLDHPNVIKLEGLVTSRMSSSLYLVFRYMDHDLAGLAASPEIKFTEQQVKCYMKQLLSGLEHCHNRGVLHRDIKGSNLLIDDGGVLRIGDFGLATFFDASKRQEMTNRVVTLWYRSPELLHGVVEYSVGVDLWSAGCILAELLAGRAIMPGRNEVEQLHRIYKLCGSPSEEYWKKIRLPSTHKHAHHKPLPQYKRRIREVYKDFSPEALSLLDTLLALDPAERQTATDVLMSDFFTTEPLACQPSDLPKYPPSKEIDAKRRDEEYRRQREARKAQGESGRRMRPRERAPRAMPAPEANAENQSNIDRMRMITHANAKSKSEKFPPPHQDGSLGFQVGSSRRLDPSEIPYSTNSFTSSYSKEPFQTWSGPLAPIGAPDSTTRRRNDINKERRMASKVKGKRIVV

SEQ ID NO: 95769 - protein, 386 aa, Arabidopsis thaliana
  peptide (1)..(386): Ceres Seq. ID no. 12730303
  misc_feature (1)..(218): Pfam Name: Protein kinase domain Pfam Description: Protein kinase domain
  misc_feature (1)..(367): Homolog of NCBI NO: 7671528 NR Description: CRK1 protein [Beta vulgaris]
  misc_feature (1)..(386): Homolog of NCBI NO: 15221868 NR Description: CRK1 protein, putative; protein id: At1g54610.1, by cDNA: gi_13877618 [Arabidopsis thaliana]
  misc_feature (1)..(366): Homolog of NCBI NO: 34899282 NR Description: putative CRK1 protein(cdc2-related kinase 1)
  misc_feature (1)..(317): Homolog of NCBI NO: 15241289 NR Description: cyclin-dependent protein kinase-like; protein id:
  misc_feature (1)..(317): Homolog of NCBI NO: 26449319 NR Description: putative cyclin-dependent protein kinase thaliana] >gi|29028978|gb|AAO64868.1| At5g50860 [Arabidopsis
  misc_feature (1)..(370): Homolog of NCBI NO: 34903662 NR Description: putative CRK1 protein [Oryza sativa (japonica group)] >gi|20804521|dbj|BAB92215.1| putative CRK1 protein [Oryza
  misc_feature (1)..(376): Homolog of NCBI NO: 15219169 NR Description: cell division-related protein, putative; protein At1g53050.1 [Arabidopsis thaliana] >gi|25405618|pir||A96571
  misc_feature (1)..(376): Homolog of NCBI NO: 28393523 NR Description: putative cell division-related protein
  misc_feature (1)..(336): Homolog of NCBI NO: 15217565 NR Description: putative protein kinase; protein id: At1g09600.1
  misc_feature (1)..(336): Homolog of NCBI NO: 25402555 NR Description: hypothetical protein [imported] - Arabidopsis >gi|3482933|gb|AAC33218.1| Similar to cdc2 protein kinases
MSSSLYLVFRYMDHDLAGLAASPEIKFTEQQVKCYMKQLLSGLEHCHNRGVLHRDIKGSNLLIDDGGVLRIGDFGLATFFDASKRQEMTNRVVTLWYRSPELLHGVVEYSVGVDLWSAGCILAELLAGRAIMPGRNEVEQLHRIYKLCGSPSEEYWKKIRLPSTHKHAHHKPLPQYKRRIREVYKDFSPEALSLLDTLLALDPAERQTATDVLMSDFFTTEPLACQPSDLPKYPPSKEIDAKRRDEEYRRQREARKAQGESGRRMRPRERAPRAMPAPEANAENQSNIDRMRMITHANAKSKSEKFPPPHQDGSLGFQVGSSRRLDPSEIPYSTNSFTSSYSKEPFQTWSGPLAPIGAPDSTTRRRNDINKERRMASKVKGKRIVV

SEQ ID NO: 95770 - DNA, 2041 bp, Arabidopsis thaliana
  misc_feature (1)..(2041): Ceres Seq. ID no. 12730311
  misc_feature: MA Experiment ID: 20000180 Result: Down-regulated in Transcription
  misc_feature: MA Experiment 20000180 PARAMETER Experiment Name: At_Germinating_Seeds_P Parameter: Age (hr) Value: 24 vs. 0
  misc_feature: MA Experiment 20000180 PARAMETER Experiment Name: At_Germinating_Seeds_P Parameter: Tissue Value: Germinating Seeds
  misc_feature: MA Experiment ID: 20000184 Result: Up-regulated in Transcription
  misc_feature: MA Experiment 20000184 PARAMETER Experiment Name: At_Shoots__P Parameter: Age (day) Value: 7
  misc_feature: MA Experiment 20000184 PARAMETER Experiment Name: At_Shoots__P Parameter: Tissue Value: Shoots vs. Whole Plant
  misc_feature: MA Experiment ID: 20000495 Result: Up-regulated in Transcription
  misc_feature: MA Experiment 20000495 PARAMETER Experiment Name: At_Guard_Cells_P Parameter: Harvest Date Value: 8/2/2002
  misc_feature: MA Experiment 20000495 PARAMETER Experiment Name: At_Guard_Cells_P Parameter: Organism Value: A. thaliana
  misc_feature: MA Experiment 20000495 PARAMETER Experiment Name: At_Guard_Cells_P Parameter: Tissue Value: Guard Cells vs. Leaves
  misc_feature: MA Experiment ID: 20000794 Result: Up-regulated in Transcription
  misc_feature: MA Experiment 20000794 PARAMETER Experiment Name: At_Petals_P Parameter: Age (day) Value: 23-25 days
  misc_feature: MA Experiment 20000794 PARAMETER Experiment Name: At_Petals_P Parameter: Plant Line Value: WS
  misc_feature: MA Experiment 20000794 PARAMETER Experiment Name: At_Petals_P Parameter: Tissue Value: Petals vs. Whole plant
  misc_feature: MA Experiment ID: 20001910 Result: Up-regulated in Transcription
  misc_feature: MA Experiment 20001910 PARAMETER Experiment Name: At_Drought_Reproduction_P Parameter: Age (day) Value: 37
  misc_feature: MA Experiment 20001910 PARAMETER Experiment Name: At_Drought_Reproduction_P Parameter: Organism Value: A. thaliana
  misc_feature: MA Experiment 20001910 PARAMETER Experiment Name: At_Drought_Reproduction_P Parameter: Plant Line Value: WS
  misc_feature: MA Experiment 20001910 PARAMETER Experiment Name: At_Drought_Reproduction_P Parameter: Timepoint (day) Value: 7
  misc_feature: MA Experiment 20001910 PARAMETER Experiment Name: At_Drought_Reproduction_P Parameter: Tissue Value: Flowers
  misc_feature: MA Experiment 20001910 PARAMETER Experiment Name: At_Drought_Reproduction_P Parameter: Treatment Value: Drought vs. No Drought
aacttcaaaacttctttctatttttatttatttttggtttaaatgttaacttctttctatttcctttctatgatcctcttctctatttttaggttttcaggtttctgagaaaatcttaaaagtgtcctaccaacactctttcatggcggtagaccaaagcaaagaagcttctcccgtgtgttgtgctcttccaatgtaatcattcaatcaaatcacttttttctctgtttgttcttatatttgatttgagtttttttttggtagacatgatattaatgtctagaagtttatcttctgttctgttatgattttcattgatacttaacgaacgtttaagcagaattaacgaactttccctgaattttcaccgattttctcttaatttcccgcaaaatttacataagaacgacatgtttagtctgttcttttcttttgaatctcccgaggcaggtacaactctaaatattcaagttatgtcactgaagaagatccaaacgacataaatcatacgtcaaaacataaaagaaccaacgcgtttcttatgaattctgcttcagctcatgatctaagattactagaggtagataaagagaagcaagaccccaaatcaccaagaggagccctcgaagcctgcttaactcgttgctcaatctcttccgcttcatcttcatctgacgatcctcctccaaacagagaagctatcgacaatgcagatgcagacacagacgtacagtgcaagaatcacagagcatcttctaattggggaaaattcttcaagctatggaaacgcagatccatgaaacgcctctcttcctttcctccattaagtggcgccgccccaccgatcatcaaacaaaacaaaagtgcagatccaaacatgaatggcatggtccttcacgatatctacgatttccaatcatctctccaaaacttctcaatatctgacatcgaaattgcaactgacaatttcagtccagaaaacattatcggtagaggcggttacgccgatgtataccagggaattctaccggaaggaaagctaatcgctgtgaaacgtttgacaaaaggcacaccggacgagcaaacagctgagtttctatcggaacttgggattattgctcatgttgatcatcctaacactgccaaattcatcggttgttgcatcgagggtggaatgcatctcgtgttccggctatctcctcttggaagcttaggctctctcctccatggaccatcaaaatataagctgacttggagcagacgttacaatgtagcgttaggaacagcagatggactagtgtatcttcatgagggttgtcaaagacgaatcattcatcgagacatcaaagctgataatattcttctcaccgaagattttcaaccgcagatttgcgacttcgggttagccaaatggcttcccaagcaattgacacaccataacgtatccaaatttgagggaacattcgggtactttgcacctgaatatttcatgcacggaatcgtggacgagaagactgatgttttcgcttttggagttctcctcttggagctcataaccggacatcctgcccttgacgagtctcagcagagccttgtcttatgggctaagccgttgctagagagaaaagctataaaagaattggtggatccatctcttggagatgagtataaccgagaagagcttatccggttaacttccacggcttctttatgcatcgatcaatcttctcttctacgaccccggatgagccaggttgtggaattattactaggccacgaagatgtcgtaatgactccaagagaagcgaagataaagatgatgcaacgaacgtattccgaagaattattagatagtgtagaatataactccactaagtacttgggagatcttgatcgcattcgagaggttgctttagcctcttgaaatcgatccaaattattattatgtaaaactattttggtttctttcattggtgaatgtaaatcgttggaaaaaattaccaaaaaaaactattatgtgatcaaaatagctgaaatttgt

SEQ ID NO: 95771 - protein, 460 aa, Arabidopsis thaliana
  peptide (1)..(460): Ceres Seq. ID no. 12730312
  misc_feature (1)..(460): Homolog of NCBI NO: 22330852 NR Description: putative serine/threonine protein kinase; protein At3g05140.1, supported by cDNA: gi_19698986 [Arabidopsis >gi|19698987|gb|AAL91229.1| putative serine/threonine protein
  misc_feature (1)..(310): Homolog of NCBI NO: 6729024 NR Description: putative serine/threonine protein kinase
  misc_feature (308)..(460): Homolog of NCBI NO: 6729024 NR Description: putative serine/threonine protein kinase
  misc_feature (1)..(460): Homolog of NCBI NO: 30687061 NR Description: protein kinase family [Arabidopsis thaliana] putative protein kinase [Arabidopsis thaliana]
  misc_feature (56)..(435): Homolog of NCBI NO: 15239245 NR Description: serine/threonine protein kinase-like; protein id: [Arabidopsis thaliana] >gi|9758799|dbj|BAB09252.1|
  misc_feature (6)..(458): Homolog of NCBI NO: 26452369 NR Description: unknown protein [Arabidopsis thaliana]
  misc_feature (6)..(458): Homolog of NCBI NO: 30698132 NR Description: protein kinase, putative [Arabidopsis thaliana]
  misc_feature (3)..(458): Homolog of NCBI NO: 18416299 NR Description: Pto kinase interactor - like protein; protein id: supported by cDNA: gi_15810234 [Arabidopsis thaliana]
  misc_feature (3)..(458): Homolog of NCBI NO: 15810235 NR Description: putative Pto kinase interactor [Arabidopsis
  misc_feature (3)..(458): Homolog of NCBI NO: 11358733 NR Description: Pto kinase interactor-like protein - Arabidopsis
MNSASAHDLRLLEVDKEKQDPKSPRGALEACLTRCSISSASSSSDDPPPNREAIDNADADTDVQCKNHRASSNWGKFFKLWKRRSMKRLSSFPPLSGAAPPIIKQNKSADPNMNGMVLHDIYDFQSSLQNFSISDIEIATDNFSPENIIGRGGYADVYQGILPEGKLIAVKRLTKGTPDEQTAEFLSELGIIAHVDHPNTAKFIGCCIEGGMHLVFRLSPLGSLGSLLHGPSKYKLTWSRRYNVALGTADGLVYLHEGCQRRIIHRDIKADNILLTEDFQPQICDFGLAKWLPKQLTHHNVSKFEGTFGYFAPEYFMHGIVDEKTDVFAFGVLLLELITGHPALDESQQSLVLWAKPLLERKAIKELVDPSLGDEYNREELIRLTSTASLCIDQSSLLRPRMSQVVELLLGHEDVVMTPREAKIKMMQRTYSEELLDSVEYNSTKYLGDLDRIREVALAS

SEQ ID NO: 95772 - protein, 375 aa, Arabidopsis thaliana
  peptide (1)..(375): Ceres Seq. ID no. 12730313
  misc_feature (1)..(375): Homolog of NCBI NO: 22330852 NR Description: putative serine/threonine protein kinase; protein At3g05140.1, supported by cDNA: gi_19698986 [Arabidopsis >gi|19698987|gb|AAL91229.1| putative serine/threonine protein
  misc_feature (1)..(225): Homolog of NCBI NO: 6729024 NR Description: putative serine/threonine protein kinase
  misc_feature (223)..(375): Homolog of NCBI NO: 6729024 NR Description: putative serine/threonine protein kinase
  misc_feature (1)..(375): Homolog of NCBI NO: 30687061 NR Description: protein kinase family [Arabidopsis thaliana] putative protein kinase [Arabidopsis thaliana]
  misc_feature (1)..(350): Homolog of NCBI NO: 15239245 NR Description: serine/threonine protein kinase-like; protein id: [Arabidopsis thaliana] >gi|9758799|dbj|BAB09252.1|
  misc_feature (1)..(373): Homolog of NCBI NO: 26452369 NR Description: unknown protein [Arabidopsis thaliana]
  misc_feature (1)..(373): Homolog of NCBI NO: 30698132 NR Description: protein kinase, putative [Arabidopsis thaliana]
  misc_feature (1)..(373): Homolog of NCBI NO: 18416299 NR Description: Pto kinase interactor - like protein; protein id: supported by cDNA: gi_15810234 [Arabidopsis thaliana]
  misc_feature (1)..(373): Homolog of NCBI NO: 15810235 NR Description: putative Pto kinase interactor [Arabidopsis
  misc_feature (1)..(373): Homolog of NCBI NO: 11358733 NR Description: Pto kinase interactor-like protein - Arabidopsis
MKRLSSFPPLSGAAPPIIKQNKSADPNMNGMVLHDIYDFQSSLQNFSISDIEIATDNFSPENIIGRGGYADVYQGILPEGKLIAVKRLTKGTPDEQTAEFLSELGIIAHVDHPNTAKFIGCCIEGGMHLVFRLSPLGSLGSLLHGPSKYKLTWSRRYNVALGTADGLVYLHEGCQRRIIHRDIKADNILLTEDFQPQICDFGLAKWLPKQLTHHNVSKFEGTFGYFAPEYFMHGIVDEKTDVFAFGVLLLELITGHPALDESQQSLVLWAKPLLERKAIKELVDPSLGDEYNREELIRLTSTASLCIDQSSLLRPRMSQVVELLLGHEDVVMTPREAKIKMMQRTYSEELLDSVEYNSTKYLGDLDRIREVALAS

SEQ ID NO: 95773 - protein, 348 aa, Arabidopsis thaliana
  peptide (1)..(348): Ceres Seq. ID no. 12730314
  misc_feature (1)..(348): Homolog of NCBI NO: 22330852 NR Description: putative serine/threonine protein kinase; protein At3g05140.1, supported by cDNA: gi_19698986 [Arabidopsis >gi|19698987|gb|AAL91229.1| putative serine/threonine protein
  misc_feature (1)..(198): Homolog of NCBI NO: 6729024 NR Description: putative serine/threonine protein kinase
  misc_feature (196)..(348): Homolog of NCBI NO: 6729024 NR Description: putative serine/threonine protein kinase
  misc_feature (1)..(348): Homolog of NCBI NO: 30687061 NR Description: protein kinase family [Arabidopsis thaliana] putative protein kinase [Arabidopsis thaliana]
  misc_feature (1)..(323): Homolog of NCBI NO: 15239245 NR Description: serine/threonine protein kinase-like; protein id: [Arabidopsis thaliana] >gi|9758799|dbj|BAB09252.1|
  misc_feature (1)..(346): Homolog of NCBI NO: 26452369 NR Description: unknown protein [Arabidopsis thaliana]
  misc_feature (1)..(346): Homolog of NCBI NO: 30698132 NR Description: protein kinase, putative [Arabidopsis thaliana]
  misc_feature (1)..(346): Homolog of NCBI NO: 18416299 NR Description: Pto kinase interactor - like protein; protein id: supported by cDNA: gi_15810234 [Arabidopsis thaliana]
  misc_feature (1)..(346): Homolog of NCBI NO: 15810235 NR Description: putative Pto kinase interactor [Arabidopsis
  misc_feature (1)..(346): Homolog of NCBI NO: 11358733 NR Description: Pto kinase interactor-like protein - Arabidopsis
MNGMVLHDIYDFQSSLQNFSISDIEIATDNFSPENIIGRGGYADVYQGILPEGKLIAVKRLTKGTPDEQTAEFLSELGIIAHVDHPNTAKFIGCCIEGGMHLVFRLSPLGSLGSLLHGPSKYKLTWSRRYNVALGTADGLVYLHEGCQRRIIHRDIKADNILLTEDFQPQICDFGLAKWLPKQLTHHNVSKFEGTFGYFAPEYFMHGIVDEKTDVFAFGVLLLELITGHPALDESQQSLVLWAKPLLERKAIKELVDPSLGDEYNREELIRLTSTASLCIDQSSLLRPRMSQVVELLLGHEDVVMTPREAKIKMMQRTYSEELLDSVEYNSTKYLGDLDRIREVALAS

SEQ ID NO: 95774 - DNA, 1086 bp, Arabidopsis thaliana
  misc_feature (1)..(1086): Ceres Seq. ID no. 12730327
  misc_feature: MA Experiment ID: 20000171 Result: Up-regulated in Transcription
  misc_feature: MA Experiment 20000171 PARAMETER Experiment Name: At_42deg_Heat_P Parameter: Age (day) Value: 14
  misc_feature: MA Experiment 20000171 PARAMETER Experiment Name: At_42deg_Heat_P Parameter: Organism Value: A. thaliana
  misc_feature: MA Experiment 20000171 PARAMETER Experiment Name: At_42deg_Heat_P Parameter: Plant Line Value: WS
  misc_feature: MA Experiment 20000171 PARAMETER Experiment Name: At_42deg_Heat_P Parameter: Temperature (deg C) Value: 42 vs. 22
  misc_feature: MA Experiment 20000171 PARAMETER Experiment Name: At_42deg_Heat_P Parameter: Timepoint (hr) Value: 1
  misc_feature: MA Experiment 20000171 PARAMETER Experiment Name: At_42deg_Heat_P Parameter: Tissue Value: Aerial
  misc_feature: MA Experiment ID: 20000173 Result: Up-regulated in Transcription
  misc_feature: MA Experiment 20000173 PARAMETER Experiment Name: At_42deg_Heat_P Parameter: Age (day) Value: 14
  misc_feature: MA Experiment 20000173 PARAMETER Experiment Name: At_42deg_Heat_P Parameter: Organism Value: A. thaliana
  misc_feature: MA Experiment 20000173 PARAMETER Experiment Name: At_42deg_Heat_P Parameter: Plant Line Value: WS
  misc_feature: MA Experiment 20000173 PARAMETER Experiment Name: At_42deg_Heat_P Parameter: Temperature (deg C) Value: 42 vs. 22
  misc_feature: MA Experiment 20000173 PARAMETER Experiment Name: At_42deg_Heat_P Parameter: Timepoint (hr) Value: 6
  misc_feature: MA Experiment 20000173 PARAMETER Experiment Name: At_42deg_Heat_P Parameter: Tissue Value: Aerial
  misc_feature: MA Experiment ID: 20000179 Result: Down-regulated in Transcription
  misc_feature: MA Experiment 20000179 PARAMETER Experiment Name: At_Germinating_Seeds_P Parameter: Age (hr) Value: 6 vs. 0
  misc_feature: MA Experiment 20000179 PARAMETER Experiment Name: At_Germinating_Seeds_P Parameter: Tissue Value: Germinating Seeds
  misc_feature: MA Experiment ID: 20000180 Result: Down-regulated in Transcription
  misc_feature: MA Experiment 20000180 PARAMETER Experiment Name: At_Germinating_Seeds_P Parameter: Age (hr) Value: 24 vs. 0
  misc_feature: MA Experiment 20000180 PARAMETER Experiment Name: At_Germinating_Seeds_P Parameter: Tissue Value: Germinating Seeds
  misc_feature: MA Experiment ID: 20000182 Result: Up-regulated in Transcription
  misc_feature: MA Experiment 20000182 PARAMETER Experiment Name: At_2mM_SA_P Parameter: Age (day) Value: 14
  misc_feature: MA Experiment 20000182 PARAMETER Experiment Name: At_2mM_SA_P Parameter: Organism Value: A. thaliana
  misc_feature: MA Experiment 20000182 PARAMETER Experiment Name: At_2mM_SA_P Parameter: Plant Line Value: WS
  misc_feature: MA Experiment 20000182 PARAMETER Experiment Name: At_2mM_SA_P Parameter: Timepoint (hr) Value: 6
  misc_feature: MA Experiment 20000182 PARAMETER Experiment Name: At_2mM_SA_P Parameter: Tissue Value: Aerial
  misc_feature: MA Experiment 20000182 PARAMETER Experiment Name: At_2mM_SA_P Parameter: Treatment Value: 2mM SA vs. No Treatment
  misc_feature: MA Experiment ID: 20000437 Result: Up-regulated in Transcription
  misc_feature: MA Experiment 20000437 PARAMETER Experiment Name: At_Drought_P Parameter: Age (day) Value: 8
  misc_feature: MA Experiment 20000437 PARAMETER Experiment Name: At_Drought_P Parameter: Organism Value: A. thaliana
  misc_feature: MA Experiment 20000437 PARAMETER Experiment Name: At_Drought_P Parameter: Plant Line Value: WS
  misc_feature: MA Experiment 20000437 PARAMETER Experiment Name: At_Drought_P Parameter: Timepoint (hr) Value: 24
  misc_feature: MA Experiment 20000437 PARAMETER Experiment Name: At_Drought_P Parameter: Tissue Value: Whole Plant
  misc_feature: MA Experiment 20000437 PARAMETER Experiment Name: At_Drought_P Parameter: Treatment Value: Drought vs. No Drought
  misc_feature: MA Experiment ID: 20001904 Result: Up-regulated in Transcription
  misc_feature: MA Experiment 20001904 PARAMETER Experiment Name: At_Drought_Reproduction_P Parameter: Age (day) Value: 37
  misc_feature: MA Experiment 20001904 PARAMETER Experiment Name: At_Drought_Reproduction_P Parameter: Organism Value: A. thaliana
  misc_feature: MA Experiment 20001904 PARAMETER Experiment Name: At_Drought_Reproduction_P Parameter: Plant Line Value: WS
  misc_feature: MA Experiment 20001904 PARAMETER Experiment Name: At_Drought_Reproduction_P Parameter: Timepoint (day) Value: 7
  misc_feature: MA Experiment 20001904 PARAMETER Experiment Name: At_Drought_Reproduction_P Parameter: Tissue Value: Rosettes
  misc_feature: MA Experiment 20001904 PARAMETER Experiment Name: At_Drought_Reproduction_P Parameter: Treatment Value: Drought vs. No Drought
  misc_feature: MA Experiment ID: 20001910 Result: Up-regulated in Transcription
  misc_feature: MA Experiment 20001910 PARAMETER Experiment Name: At_Drought_Reproduction_P Parameter: Age (day) Value: 37
  misc_feature: MA Experiment 20001910 PARAMETER Experiment Name: At_Drought_Reproduction_P Parameter: Organism Value: A. thaliana
  misc_feature: MA Experiment 20001910 PARAMETER Experiment Name: At_Drought_Reproduction_P Parameter: Plant Line Value: WS
  misc_feature: MA Experiment 20001910 PARAMETER Experiment Name: At_Drought_Reproduction_P Parameter: Timepoint (day) Value: 7
  misc_feature: MA Experiment 20001910 PARAMETER Experiment Name: At_Drought_Reproduction_P Parameter: Tissue Value: Flowers
  misc_feature: MA Experiment 20001910 PARAMETER Experiment Name: At_Drought_Reproduction_P Parameter: Treatment Value: Drought vs. No Drought
tttcccggaaattttcgaatactctgaaaggaaaataggaaaatggcaagtgggtttccgccgcagaagcaagagacacaaccagggatacaacatgtcatggaaccaactcccgagttctctagttctaactataaaccttccaacaaacttcatggaaaagtggcactcgtgacaggaggagactcagggataggtaaagcagtgtgtcactgctatgcacttgaaggagcgagcgtggctttcacgtacgttaaaggtagagaggacaaagacgcagaagaaacgctgcgtttgcttcacgaggttaagacaagggaagctaaagagccgatcatgatcgctactgatttagggtttgaagagaattgcaagagggtcgttgaggaagttgtgaactcctttggacgcatcgatgtgcttgtgaattgtgcagctgagcagcatgaggtttccattgaggatatcgatgaggctaggcttgagagagtgttccgtaccaacatcttctcgcagtttttcttggttaaatatgcgttaaagcacatgaaggaagggagcagcatcatcaatacgacgtcggttgttgcatacgcaggaaactcaagcttactagagtacacagctacgaaaggagccatcgtttctttcacacgtgggttagctcttcagcttgcaccaaagggcattcgtgtgaacggtgtcgctcctggtccggtctggactccactgatacccgcatcgttctctgaagaagcgatcaaacagtttgggtcagagacaccgatgaaaagagcggctcagcctgtggaagtggctccttcctacgttttcttggcttgtaaccattgctcatcttactacaccggccaaatcctccatccaaacggtggtcttatcgtgaacgcttgagcttgcaataagtgcttatgtacatgactctgtttaggaagttcttacaaagagagtatatccagtagtatagtcgtgtgatgtaataaggtgatatgttgttttgtcgtttttttaaaagaagaataatatgaagaaaacaaaagagaacagaataaaatggtatggttggtt

SEQ ID NO: 95775 - protein, 289 aa, Arabidopsis thaliana
  peptide (1)..(289): Ceres Seq. ID no. 12730328
  misc_feature (1)..(289): Homolog of NCBI NO: 15229944 NR Description: putative glucose and ribitol dehydrogenase protein id: At3g05260.1, supported by cDNA: gi_16226574 thaliana] >gi|6729036|gb|AAF27032.1|AC009177_22 putative glucose
  misc_feature (1)..(289): Homolog of NCBI NO: 16226575 NR Description: AT3g05260/T12H1_23 [Arabidopsis thaliana]
  misc_feature (8)..(289): Homolog of NCBI NO: 18405090 NR Description: dormancy related protein, putative; protein id: [Arabidopsis thaliana] >gi|25283122|pir||C96590 hypothetical
  misc_feature (8)..(289): Homolog of NCBI NO: 12322163 NR Description: dormancy related protein, putative [Arabidopsis
MASGFPPQKQETQPGIQHVMEPTPEFSSSNYKPSNKLHGKVALVTGGDSGIGKAVCHCYALEGASVAFTYVKGREDKDAEETLRLLHEVKTREAKEPIMIATDLGFEENCKRVVEEVVNSFGRIDVLVNCAAEQHEVSIEDIDEARLERVFRTNIFSQFFLVKYALKHMKEGSSIINTTSVVAYAGNSSLLEYTATKGAIVSFTRGLALQLAPKGIRVNGVAPGPVWTPLIPASFSEEAIKQFGSETPMKRAAQPVEVAPSYVFLACNHCSSYYTGQILHPNGGLIVNA

SEQ ID NO: 95776 - protein, 270 aa, Arabidopsis thaliana
  peptide (1)..(270): Ceres Seq. ID no. 12730329
  misc_feature (1)..(270): Homolog of NCBI NO: 15229944 NR Description: putative glucose and ribitol dehydrogenase protein id: At3g05260.1, supported by cDNA: gi_16226574 thaliana] >gi|6729036|gb|AAF27032.1|AC009177_22 putative glucose
  misc_feature (1)..(270): Homolog of NCBI NO: 16226575 NR Description: AT3g05260/T12H1_23 [Arabidopsis thaliana]
  misc_feature (1)..(270): Homolog of NCBI NO: 18405090 NR Description: dormancy related protein, putative; protein id: [Arabidopsis thaliana] >gi|25283122|pir||C96590 hypothetical
  misc_feature (1)..(270): Homolog of NCBI NO: 12322163 NR Description: dormancy related protein, putative [Arabidopsis
MEPTPEFSSSNYKPSNKLHGKVALVTGGDSGIGKAVCHCYALEGASVAFTYVKGREDKDAEETLRLLHEVKTREAKEPIMIATDLGFEENCKRVVEEVVNSFGRIDVLVNCAAEQHEVSIEDIDEARLERVFRTNIFSQFFLVKYALKHMKEGSSIINTTSVVAYAGNSSLLEYTATKGAIVSFTRGLALQLAPKGIRVNGVAPGPVWTPLIPASFSEEAIKQFGSETPMKRAAQPVEVAPSYVFLACNHCSSYYTGQILHPNGGLIVNA

SEQ ID NO: 95777 - protein, 191 aa, Arabidopsis thaliana
  peptide (1)..(191): Ceres Seq. ID no. 12730330
  misc_feature (1)..(191): Homolog of NCBI NO: 15229944 NR Description: putative glucose and ribitol dehydrogenase protein id: At3g05260.1, supported by cDNA: gi_16226574 thaliana] >gi|6729036|gb|AAF27032.1|AC009177_22 putative glucose
  misc_feature (1)..(191): Homolog of NCBI NO: 16226575 NR Description: AT3g05260/T12H1_23 [Arabidopsis thaliana]
  misc_feature (1)..(191): Homolog of NCBI NO: 18405090 NR Description: dormancy related protein, putative; protein id: [Arabidopsis thaliana] >gi|25283122|pir||C96590 hypothetical
  misc_feature (1)..(191): Homolog of NCBI NO: 12322163 NR Description: dormancy related protein, putative [Arabidopsis
MIATDLGFEENCKRVVEEVVNSFGRIDVLVNCAAEQHEVSIEDIDEARLERVFRTNIFSQFFLVKYALKHMKEGSSIINTTSVVAYAGNSSLLEYTATKGAIVSFTRGLALQLAPKGIRVNGVAPGPVWTPLIPASFSEEAIKQFGSETPMKRAAQPVEVAPSYVFLACNHCSSYYTGQILHPNGGLIVNA

SEQ ID NO: 95778 - DNA, 3396 bp, Arabidopsis thaliana
  misc_feature (1)..(3396): Ceres Seq. ID no. 12730343
  misc_feature: MA Experiment ID: 20000173 Result: Down-regulated in Transcription
  misc_feature: MA Experiment 20000173 PARAMETER Experiment Name: At_42deg_Heat_P Parameter: Age (day) Value: 14
  misc_feature: MA Experiment 20000173 PARAMETER Experiment Name: At_42deg_Heat_P Parameter: Organism Value: A. thaliana
  misc_feature: MA Experiment 20000173 PARAMETER Experiment Name: At_42deg_Heat_P Parameter: Plant Line Value: WS
  misc_feature: MA Experiment 20000173 PARAMETER Experiment Name: At_42deg_Heat_P Parameter: Temperature (deg C) Value: 42 vs. 22
  misc_feature: MA Experiment 20000173 PARAMETER Experiment Name: At_42deg_Heat_P Parameter: Timepoint (hr) Value: 6
  misc_feature: MA Experiment 20000173 PARAMETER Experiment Name: At_42deg_Heat_P Parameter: Tissue Value: Aerial
  misc_feature: MA Experiment ID: 20000180 Result: Down-regulated in Transcription
  misc_feature: MA Experiment 20000180 PARAMETER Experiment Name: At_Germinating_Seeds_P Parameter: Age (hr) Value: 24 vs. 0
  misc_feature: MA Experiment 20000180 PARAMETER Experiment Name: At_Germinating_Seeds_P Parameter: Tissue Value: Germinating Seeds
  misc_feature: MA Experiment ID: 20001451 Result: Down-regulated in Transcription
  misc_feature: MA Experiment 20001451 PARAMETER Experiment Name: At_Far-red-induction_P Parameter: Age (day) Value: 7
  misc_feature: MA Experiment 20001451 PARAMETER Experiment Name: At_Far-red-induction_P Parameter: Light Value: Far-red vs. White
  misc_feature: MA Experiment 20001451 PARAMETER Experiment Name: At_Far-red-induction_P Parameter: Organism Value: A. thaliana
  misc_feature: MA Experiment 20001451 PARAMETER Experiment Name: At_Far-red-induction_P Parameter: Plant Line Value: Columbia
  misc_feature: MA Experiment 20001451 PARAMETER Experiment Name: At_Far-red-induction_P Parameter: Timepoint (hr) Value: 24
  misc_feature: MA Experiment 20001451 PARAMETER Experiment Name: At_Far-red-induction_P Parameter: Tissue Value: Whole Plant
atggcaccagttaggaagtcgaggagtgtgaacaagcgtttcaccaatgaaacttccccaagaaaagatgctgggaaatcgaaaaaaaataagctacgtaagaagaaattgtctgacaagctgggacctcagtggaccagattagaacttgagcgtttctatgatgcttaccgcaagcacggacaagagtggagaagggtggctgctgcaattcggaatagcaggtctgttgacatggtggaagctctatttaatatgaatcgggcgtatttatctctccccgagggaactgcctctgtagctggccttattgcgatgatgacagatcattacagtgtcatggaagggagtggcagtgaaggagaaggccatgatgcttcagaagtaccaaggaaacaacaaaagcgcaaacgtgctaaacctcaacgtagcgattctccagaggaagtggatatacaacagtcaattggttcaccagatggatgcctcacgtttttgaagcaagcacgagctaatgttcatgtaggaactcagcgacatgccactggaaaacgtacaccacgggttcctgtacaaacttcatttatgagggatgatagagaaggctctactccaccaaataaaagagccaggaagcaattcgatgccaatgatgatgtagcacattttttagcgttagcattaacagatgcatcgagaaggggagggtctccaaaagtttctgaatcaccaaatagaagaacagaacttagcgatagctcaccgataaagagctgggggaaaatgtcgcgaaccagaaaatctcagtctaagcactgtggcagctccattttcgaggagtggatggaaagtagccgagaaaggaaacttgactctgataaagatactaccttgttgatggatatggaaagggctggcgaaatggaggctccgcggaaggggaaaagagtctacaagaaaagagtgaaagtcgaagaagcagaatgtaatgattctgatgacaatggagaagcatgcagtgccacacaagggctcagaagtaaatcacaaagacgaaaggctgctattgaagcctcaagagagaaatactcaccgcgcagcccaaagaaaagagatgacaaacatacttccggagcttttgatgccctgcaagcattggccgaattgtcagcttcaatgcttccagcaaatttgatggagtcagaattatctgctcagttgaaggaagaaagaacagaatacgacatggacgagaaatctagcacaccagaagctacttccacaagcagtcatggggaaaaagcaaatgtagagccagatgatagtctccttcatgcaatttcttctgttgagaatgctaacaagagaaagtcaaaaccttcaaggctggtatccactgattgtgatgatgttcccacagggaagctacaaccacaaactagtggcagtttaagaaaacgtaaaccaaaggtactaggggatgaagctccagcagagtttagtcagaacaaatccataaacaagaaggaattgcctcaagatgagaataatatgaagtctttggttaaaacaaaacgcgctggtcaagttccggctcagtcaaaacagatgaaaactgttaaggcgttggaggaatctgctataacaagtgataagaaaagacctgggatggatatagtagcgtcacctaaacaagtttctgactcgggtccaaccagtttatcgcagaaacctccaaacaggcgaaagaagagtctgcagaaaagcttacaagaaaaggctaaatcttctgaaaccactcataaagctgcacgtagttccagatctctttcagaacaagagttgttgttaaaggataagcttgctacttctctgtcgtttccctttgcacgtcgaaggtgcatatttgaatggttttatagtgctatcgaccatccctggttttcaaagatggagtttgtcgattacctaaatcacgtggggcttggtcacattccaagacttactcgtcttgaatggagcgtcattaaaagttctcttggtagaccacgaagattctctgagagatttttacatgaagagcgggagaaacttaaacagtaccgcgaatctgtgcgaaagcattatacagagcttcgaacgggtgctagggaggggcttcctacagatttggctcggccattagcagttgggaacagagtcattgccatccatcccaaaacacgggagattcatgatggaaaaattctcactgttgatcataacaaatgcaatgttctcttcgatgacttgggcgttgagttggttatggacattgattgcatgcctttaaatccactggaatacatgccagagggtctaaggaggcaaattgataagtgcttgtctatgaagaaagaagcacagctaagcgggaatacaaaccttggtgtgtctgtgctattccctccttgcggacttgaaaatgtcagcttttccatgaatcctcctctgaatcagggtgatatgattgctcccattctgcatggtaaagtatcaagcaacactagtagtccacggcagactaatcattcatatatcacaacttataacaaagcaaaagaagctgagattcaacgggcacaagcgctacagcatgctttagatgaaaaggaaatggagccagagatgctagaaattgtcaagggttcaaaaacaagagcgcaagcaatggtggatgcagctataaaggctgcatcatctgtgaaggaaggggaagatgtgaacacaatgatccaagaagccttagagttggttggcaaaaatcagctattacgcagctctatggtcaaacatcacgagcatgtaaatggcagtatagagcatcatcacaacccatctccttcaaatggatcagagcctgtggctaacaacgatttaaactcacaagatggttcagagaaaaacgctcaaatgccttcagagcttatcacctcctgtgttgccacttggctcatgattcagatgtgcacggagagacagtaccctccagctgatgtcgcacagcttatagacgcagcagtcacaagcttgcagccacgatgcccacagaacctaccgatctacagagaaatccaaacgtgcatgggacggatcaagactcaaatcatgtcccttgtaccaacttgaaaagctaactcatttgggttggttttgttttgaatcttcgttaggtaagtctagtctcctttttactagagtagatgatgacatcttcacctgagaaaatggtgttataagttcacgaattcaagatagcttgaccagaggtattgtagttgctgaacaagcttttggcttattcaggggcttttggtagtgaaccattggttctgcaacgtaaaatgatgtttatgc

SEQ ID NO: 95779 - protein, 1055 aa, Arabidopsis thaliana
  peptide (1)..(1055): Ceres Seq. ID no. 12730344
  misc_feature (42)..(88): Pfam Name: Myb-like DNA-binding domain Pfam Description: Myb-like DNA-binding domain
  misc_feature (382)..(1055): Homolog of NCBI NO: 15240995 NR Description: putative protein; protein id: At5g27610.1
  misc_feature (1)..(573): Homolog of NCBI NO: 9294690 NR Description: gene_id:MHC9.11~unknown protein [Arabidopsis
  misc_feature (619)..(992): Homolog of NCBI NO: 9294690 NR Description: gene_id:MHC9.11~unknown protein [Arabidopsis
  misc_feature (678)..(1055): Homolog of NCBI NO: 9294690 NR Description: gene_id:MHC9.11~unknown protein [Arabidopsis
  misc_feature (1)..(486): Homolog of NCBI NO: 15240995 NR Description: putative protein; protein id: At5g27610.1
  misc_feature (448)..(992): Homolog of NCBI NO: 15233065 NR Description: unknown protein; protein id: At3g21430.1
  misc_feature (399)..(790): Homolog of NCBI NO: 34903510 NR Description: P0001B06.7 [Oryza sativa (japonica
  misc_feature (921)..(1055): Homolog of NCBI NO: 34903510 NR Description: P0001B06.7 [Oryza sativa (japonica
  misc_feature (181)..(653): Homolog of NCBI NO: 15233065 NR Description: unknown protein; protein id: At3g21430.1
  misc_feature (678)..(1055): Homolog of NCBI NO: 15233065 NR Description: unknown protein; protein id: At3g21430.1
MAPVRKSRSVNKRFTNETSPRKDAGKSKKNKLRKKKLSDKLGPQWTRLELERFYDAYRKHGQEWRRVAAAIRNSRSVDMVEALFNMNRAYLSLPEGTASVAGLIAMMTDHYSVMEGSGSEGEGHDASEVPRKQQKRKRAKPQRSDSPEEVDIQQSIGSPDGCLTFLKQARANVHVGTQRHATGKRTPRVPVQTSFMRDDREGSTPPNKRARKQFDANDDVAHFLALALTDASRRGGSPKVSESPNRRTELSDSSPIKSWGKMSRTRKSQSKHCGSSIFEEWMESSRERKLDSDKDTTLLMDMERAGEMEAPRKGKRVYKKRVKVEEAECNDSDDNGEACSATQGLRSKSQRRKAAIEASREKYSPRSPKKRDDKHTSGAFDALQALAELSASMLPANLMESELSAQLKEERTEYDMDEKSSTPEATSTSSHGEKANVEPDDSLLHAISSVENANKRKSKPSRLVSTDCDDVPTGKLQPQTSGSLRKRKPKVLGDEAPAEFSQNKSINKKELPQDENNMKSLVKTKRAGQVPAQSKQMKTVKALEESAITSDKKRPGMDIVASPKQVSDSGPTSLSQKPPNRRKKSLQKSLQEKAKSSETTHKAARSSRSLSEQELLLKDKLATSLSFPFARRRCIFEWFYSAIDHPWFSKMEFVDYLNHVGLGHIPRLTRLEWSVIKSSLGRPRRFSERFLHEEREKLKQYRESVRKHYTELRTGAREGLPTDLARPLAVGNRVIAIHPKTREIHDGKILTVDHNKCNVLFDDLGVELVMDIDCMPLNPLEYMPEGLRRQIDKCLSMKKEAQLSGNTNLGVSVLFPPCGLENVSFSMNPPLNQGDMIAPILHGKVSSNTSSPRQTNHSYITTYNKAKEAEIQRAQALQHALDEKEMEPEMLEIVKGSKTRAQAMVDAAIKAASSVKEGEDVNTMIQEALELVGKNQLLRSSMVKHHEHVNGSIEHHHNPSPSNGSEPVANNDLNSQDGSEKNAQMPSELITSCVATWLMIQMCTERQYPPADVAQLIDAAVTSLQPRCPQNLPIYREIQTCMGRIKTQIMSLVPT

SEQ ID NO: 95780 - protein, 977 aa, Arabidopsis thaliana
  peptide (1)..(977): Ceres Seq. ID no. 12730345
  misc_feature (304)..(977): Homolog of NCBI NO: 15240995 NR Description: putative protein; protein id: At5g27610.1
  misc_feature (1)..(495): Homolog of NCBI NO: 9294690 NR Description: gene_id:MHC9.11~unknown protein [Arabidopsis
  misc_feature (541)..(914): Homolog of NCBI NO: 9294690 NR Description: gene_id:MHC9.11~unknown protein [Arabidopsis
  misc_feature (600)..(977): Homolog of NCBI NO: 9294690 NR Description: gene_id:MHC9.11~unknown protein [Arabidopsis
  misc_feature (1)..(408): Homolog of NCBI NO: 15240995 NR Description: putative protein; protein id: At5g27610.1
  misc_feature (370)..(914): Homolog of NCBI NO: 15233065 NR Description: unknown protein; protein id: At3g21430.1
  misc_feature (321)..(712): Homolog of NCBI NO: 34903510 NR Description: P0001B06.7 [Oryza sativa (japonica
  misc_feature (843)..(977): Homolog of NCBI NO: 34903510 NR Description: P0001B06.7 [Oryza sativa (japonica
  misc_feature (103)..(575): Homolog of NCBI NO: 15233065 NR Description: unknown protein; protein id: At3g21430.1
  misc_feature (600)..(977): Homolog of NCBI NO: 15233065 NR Description: unknown protein; protein id: At3g21430.1
MVEALFNMNRAYLSLPEGTASVAGLIAMMTDHYSVMEGSGSEGEGHDASEVPRKQQKRKRAKPQRSDSPEEVDIQQSIGSPDGCLTFLKQARANVHVGTQRHATGKRTPRVPVQTSFMRDDREGSTPPNKRARKQFDANDDVAHFLALALTDASRRGGSPKVSESPNRRTELSDSSPIKSWGKMSRTRKSQSKHCGSSIFEEWMESSRERKLDSDKDTTLLMDMERAGEMEAPRKGKRVYKKRVKVEEAECNDSDDNGEACSATQGLRSKSQRRKAAIEASREKYSPRSPKKRDDKHTSGAFDALQALAELSASMLPANLMESELSAQLKEERTEYDMDEKSSTPEATSTSSHGEKANVEPDDSLLHAISSVENANKRKSKPSRLVSTDCDDVPTGKLQPQTSGSLRKRKPKVLGDEAPAEFSQNKSINKKELPQDENNMKSLVKTKRAGQVPAQSKQMKTVKALEESAITSDKKRPGMDIVASPKQVSDSGPTSLSQKPPNRRKKSLQKSLQEKAKSSETTHKAARSSRSLSEQELLLKDKLATSLSFPFARRRCIFEWFYSAIDHPWFSKMEFVDYLNHVGLGHIPRLTRLEWSVIKSSLGRPRRFSERFLHEEREKLKQYRESVRKHYTELRTGAREGLPTDLARPLAVGNRVIAIHPKTREIHDGKILTVDHNKCNVLFDDLGVELVMDIDCMPLNPLEYMPEGLRRQIDKCLSMKKEAQLSGNTNLGVSVLFPPCGLENVSFSMNPPLNQGDMIAPILHGKVSSNTSSPRQTNHSYITTYNKAKEAEIQRAQALQHALDEKEMEPEMLEIVKGSKTRAQAMVDAAIKAASSVKEGEDVNTMIQEALELVGKNQLLRSSMVKHHEHVNGSIEHHHNPSPSNGSEPVANNDLNSQDGSEKNAQMPSELITSCVATWLMIQMCTERQYPPADVAQLIDAAVTSLQPRCPQNLPIYREIQTCMGRIKTQIMSLVPT

SEQ ID NO: 95781 - protein, 970 aa, Arabidopsis thaliana
  peptide (1)..(970): Ceres Seq. ID no. 12730346
  misc_feature (297)..(970): Homolog of NCBI NO: 15240995 NR Description: putative protein; protein id: At5g27610.1
  misc_feature (1)..(488): Homolog of NCBI NO: 9294690 NR Description: gene_id:MHC9.11~unknown protein [Arabidopsis
  misc_feature (534)..(907): Homolog of NCBI NO: 9294690 NR Description: gene_id:MHC9.11~unknown protein [Arabidopsis
  misc_feature (593)..(970): Homolog of NCBI NO: 9294690 NR Description: gene_id:MHC9.11~unknown protein [Arabidopsis
  misc_feature (1)..(401): Homolog of NCBI NO: 15240995 NR Description: putative protein; protein id: At5g27610.1
  misc_feature (363)..(907): Homolog of NCBI NO: 15233065 NR Description: unknown protein; protein id: At3g21430.1
  misc_feature (314)..(705): Homolog of NCBI NO: 34903510 NR Description: P0001B06.7 [Oryza sativa (japonica
  misc_feature (836)..(970): Homolog of NCBI NO: 34903510 NR Description: P0001B06.7 [Oryza sativa (japonica
  misc_feature (96)..(568): Homolog of NCBI NO: 15233065 NR Description: unknown protein; protein id: At3g21430.1
  misc_feature (593)..(970): Homolog of NCBI NO: 15233065 NR Description: unknown protein; protein id: At3g21430.1
MNRAYLSLPEGTASVAGLIAMMTDHYSVMEGSGSEGEGHDASEVPRKQQKRKRAKPQRSDSPEEVDIQQSIGSPDGCLTFLKQARANVHVGTQRHATGKRTPRVPVQTSFMRDDREGSTPPNKRARKQFDANDDVAHFLALALTDASRRGGSPKVSESPNRRTELSDSSPIKSWGKMSRTRKSQSKHCGSSIFEEWMESSRERKLDSDKDTTLLMDMERAGEMEAPRKGKRVYKKRVKVEEAECNDSDDNGEACSATQGLRSKSQRRKAAIEASREKYSPRSPKKRDDKHTSGAFDALQALAELSASMLPANLMESELSAQLKEERTEYDMDEKSSTPEATSTSSHGEKANVEPDDSLLHAISSVENANKRKSKPSRLVSTDCDDVPTGKLQPQTSGSLRKRKPKVLGDEAPAEFSQNKSINKKELPQDENNMKSLVKTKRAGQVPAQSKQMKTVKALEESAITSDKKRPGMDIVASPKQVSDSGPTSLSQKPPNRRKKSLQKSLQEKAKSSETTHKAARSSRSLSEQELLLKDKLATSLSFPFARRRCIFEWFYSAIDHPWFSKMEFVDYLNHVGLGHIPRLTRLEWSVIKSSLGRPRRFSERFLHEEREKLKQYRESVRKHYTELRTGAREGLPTDLARPLAVGNRVIAIHPKTREIHDGKILTVDHNKCNVLFDDLGVELVMDIDCMPLNPLEYMPEGLRRQIDKCLSMKKEAQLSGNTNLGVSVLFPPCGLENVSFSMNPPLNQGDMIAPILHGKVSSNTSSPRQTNHSYITTYNKAKEAEIQRAQALQHALDEKEMEPEMLEIVKGSKTRAQAMVDAAIKAASSVKEGEDVNTMIQEALELVGKNQLLRSSMVKHHEHVNGSIEHHHNPSPSNGSEPVANNDLNSQDGSEKNAQMPSELITSCVATWLMIQMCTERQYPPADVAQLIDAAVTSLQPRCPQNLPIYREIQTCMGRIKTQIMSLVPT

SEQ ID NO: 95782 - DNA, 1709 bp, Arabidopsis thaliana
  misc_feature (1)..(1709): Ceres Seq. ID no. 12730351
  misc_feature: MA Experiment ID: 20000307 Result: Up-regulated in Transcription
  misc_feature: MA Experiment 20000307 PARAMETER Experiment Name: At_Germinating_Seeds_Sub_P Parameter: Age (hr) Value: 24 vs. 0
  misc_feature: MA Experiment 20000307 PARAMETER Experiment Name: At_Germinating_Seeds_Sub_P Parameter: Organism Value: A. thaliana
  misc_feature: MA Experiment 20000307 PARAMETER Experiment Name: At_Germinating_Seeds_Sub_P Parameter: Plant Line Value: WS
  misc_feature: MA Experiment 20000307 PARAMETER Experiment Name: At_Germinating_Seeds_Sub_P Parameter: Tissue Value: Germinating Seeds
  misc_feature: MA Experiment ID: 20000314 Result: Down-regulated in Transcription
  misc_feature: MA Experiment 20000314 PARAMETER Experiment Name: At_14day_Shoots-Roots_Sub_P Parameter: Age (day) Value: 14
  misc_feature: MA Experiment 20000314 PARAMETER Experiment Name: At_14day_Shoots-Roots_Sub_P Parameter: Organism Value: A. thaliana
  misc_feature: MA Experiment 20000314 PARAMETER Experiment Name: At_14day_Shoots-Roots_Sub_P Parameter: Plant Line Value: WS
  misc_feature: MA Experiment 20000314 PARAMETER Experiment Name: At_14day_Shoots-Roots_Sub_P Parameter: Tissue Value: Roots vs. Whole Plant
  misc_feature: MA Experiment ID: 20000355 Result: Up-regulated in Transcription
  misc_feature: MA Experiment 20000355 PARAMETER Experiment Name: At_Siliques_Sub_P Parameter: Age (day) Value: 21
  misc_feature: MA Experiment 20000355 PARAMETER Experiment Name: At_Siliques_Sub_P Parameter: Organism Value: A. thaliana
  misc_feature: MA Experiment 20000355 PARAMETER Experiment Name: At_Siliques_Sub_P Parameter: Plant Line Value: WS
  misc_feature: MA Experiment 20000355 PARAMETER Experiment Name: At_Siliques_Sub_P Parameter: Tissue Value: Less Than 5mm Siliques vs. Whole Plant
  misc_feature: MA Experiment ID: 20000440 Result: Up-regulated in Transcription
  misc_feature: MA Experiment 20000440 PARAMETER Experiment Name: At_Closed-Flower__Sub_P Parameter: Tissue Value: Closed Flower vs. Whole Plant
  misc_feature: MA Experiment ID: 20001807 Result: Down-regulated in Transcription
  misc_feature: MA Experiment 20001807 PARAMETER Experiment Name: At_50mM_NH4NO3_L-to-H_Sub_P Parameter: Timepoint (hr) Value: 6
  misc_feature: MA Experiment 20001807 PARAMETER Experiment Name: At_50mM_NH4NO3_L-to-H_Sub_P Parameter: Tissue Value: Leaf
  misc_feature: MA Experiment 20001807 PARAMETER Experiment Name: At_50mM_NH4NO3_L-to-H_Sub_P Parameter: Treatment Value: 50mM NH4NO3 vs 100mM Mannitol
attatactagctagctagtctatatatcatagggaagagaaagaaaaaacattctacttcacgcaaatattttatctctttgtttcttgttcttaattagggtttgattgaagaaaatggaaggagagaataatatggagaaaggattgttattggcaaaaaaggaagacagtgcaaatacaactccacttcttatcttctccaccttcatcattgtctctgcctccttcacctttggcgctgccataggttatactgcagatacaatgtcctccattatgtcagacttggatctttctctcgcacaattttcgctgtttggttcgttgtcgacgtttggaggaatgatcggtgcaatattcagcgccaaagctgcaagtgccttcggtcataaaatgacgttgtgggtggctgatttattctgcataactggttggcttgcaatttcactagccaaggatattatttggcttgacatggggcgatttttggtgggaattggagttggtctcattagctacgtggttcctgtatatattgcagaaataacacccaagcacgtaagaggggcttttacatttagcaatcagcttttgcaaaactgtggagttgcagtcgtatattactttggaaatttcttgtcatggagaactttagccataataggtagtattccatgttggatacaagttattggtttgttcttcatacctgagtctccaagatggctggcgaaaaaaggtcgtgataaagaatgtgaagaagttcttcaaaagttaagaggaagaaaatacgatattgtgcctgaagcttgcgaaatcaagatttcagttgaagcttcgaagaaaaattcgaatatcaacattcgtagtcttttcgaaaagagatatgctcatcaacttacaatcggcattggtttgatgcttctgcaacagttatgtggaactgcaggaataagttcttacggaagcactctatttaaacttgccgggtttcctgctcggattgggatgatggtgttatctcttatcgtcgtaccaaaatctttaatgggtctaatcctcgtggatcgatggggaagacgcccacttcttatgacttcagcgttggggttgtgtttaagctgtatcacattggcagtagcgtttggagttaaagatgtcccgggaattggaaaaattactccaattttctgtttcattggaatattgtcgtttacgatgatgttcgcaattggaatgggagcgttaccatggattataatgtctgagatatttccaatggatataaaggtattagctgggagtttagtgaccatagcaaattggttcactggttggatcgccaactatgctttcaattttatgttggtttggagcccaagcgggacttttataatatccgctataatctgtggagcaacaattgtattcacatggtgcttggtgccggagactcgaagattaacgttagaagaaatccaactgtcgtttgtcaatgtttagggttcatcggaagcattcatatatacatcataaaggttgatatactacatcatttgctacatataattcggcttcgatcgtatccataaattatttgattaattcaatataattaactaaagtttccattgtttagttgaactcattgaagattagtttatttgtatacatatatatatatatatactattgtttttcttcggt

SEQ ID NO: 95783 - protein, 462 aa, Arabidopsis thaliana
  peptide (1)..(462): Ceres Seq. ID no. 12730352
  misc_feature (29)..(424): Pfam Name: Sugar (and other) transporter Pfam Description: Sugar (and other) transporter
  misc_feature (1)..(462): Homolog of NCBI NO: 22330860 NR Description: sugar transporter, putative; protein id: supported by cDNA: gi_17380763, supported by cDNA: gi_20259596 thaliana] >gi|17380764|gb|AAL36212.1| putative sugar transporter
  misc_feature (1)..(424): Homolog of NCBI NO: 7596771 NR Description: sugar transporter, putative [Arabidopsis thaliana]
  misc_feature (124)..(462): Homolog of NCBI NO: 6686833 NR Description: putative sugar transporter [Arabidopsis thaliana]
  misc_feature (1)..(461): Homolog of NCBI NO: 18421106 NR Description: sugar transporter-like protein; protein id: supported by cDNA: gi_14585698, supported by cDNA: gi_15294181
  misc_feature (1)..(461): Homolog of NCBI NO: 14585699 NR Description: sugar-porter family protein 1 [Arabidopsis
  misc_feature (2)..(461): Homolog of NCBI NO: 18390957 NR Description: putative sugar transport protein, ERD6; protein At1g08920.1, supported by cDNA: gi_14194108 [Arabidopsis >gi|14194109|gb|AAK56249.1|AF367260_1 At1g08920/F7G19_20
  misc_feature (1)..(460): Homolog of NCBI NO: 18421108 NR Description: sugar transporter-like protein; protein id:
  misc_feature (1)..(458): Homolog of NCBI NO: 18397141 NR Description: Expressed protein; protein id: At3g05165.1
  misc_feature (7)..(458): Homolog of NCBI NO: 18397139 NR Description: putative sugar transporter; protein id: supported by cDNA: gi_16604315 [Arabidopsis thaliana] AT3g05160/T12H1_13 [Arabidopsis thaliana]
  misc_feature (1)..(408): Homolog of NCBI NO: 6729026 NR Description: putative sugar transporter [Arabidopsis thaliana]
MEGENNMEKGLLLAKKEDSANTTPLLIFSTFIIVSASFTFGAAIGYTADTMSSIMSDLDLSLAQFSLFGSLSTFGGMIGAIFSAKAASAFGHKMTLWVADLFCITGWLAISLAKDIIWLDMGRFLVGIGVGLISYVVPVYIAEITPKHVRGAFTFSNQLLQNCGVAVVYYFGNFLSWRTLAIIGSIPCWIQVIGLFFIPESPRWLAKKGRDKECEEVLQKLRGRKYDIVPEACEIKISVEASKKNSNINIRSLFEKRYAHQLTIGIGLMLLQQLCGTAGISSYGSTLFKLAGFPARIGMMVLSLIVVPKSLMGLILVDRWGRRPLLMTSALGLCLSCITLAVAFGVKDVPGIGKITPIFCFIGILSFTMMFAIGMGALPWIIMSEIFPMDIKVLAGSLVTIANWFTGWIANYAFNFMLVWSPSGTFIISAIICGATIVFTWCLVPETRRLTLEEIQLSFVNV

SEQ ID NO: 95784 - protein, 456 aa, Arabidopsis thaliana
  peptide (1)..(456): Ceres Seq. ID no. 12730353
  misc_feature (23)..(418): Pfam Name: Sugar (and other) transporter Pfam Description: Sugar (and other) transporter
  misc_feature (1)..(456): Homolog of NCBI NO: 22330860 NR Description: sugar transporter, putative; protein id: supported by cDNA: gi_17380763, supported by cDNA: gi_20259596 thaliana] >gi|17380764|gb|AAL36212.1| putative sugar transporter
  misc_feature (1)..(418): Homolog of NCBI NO: 7596771 NR Description: sugar transporter, putative [Arabidopsis thaliana]
  misc_feature (118)..(456): Homolog of NCBI NO: 6686833 NR Description: putative sugar transporter [Arabidopsis thaliana]
  misc_feature (1)..(455): Homolog of NCBI NO: 18421106 NR Description: sugar transporter-like protein; protein id: supported by cDNA: gi_14585698, supported by cDNA: gi_15294181
  misc_feature (1)..(455): Homolog of NCBI NO: 14585699 NR Description: sugar-porter family protein 1 [Arabidopsis
  misc_feature (1)..(455): Homolog of NCBI NO: 18390957 NR Description: putative sugar transport protein, ERD6; protein At1g08920.1, supported by cDNA: gi_14194108 [Arabidopsis >gi|14194109|gb|AAK56249.1|AF367260_1 At1g08920/F7G19_20
  misc_feature (1)..(454): Homolog of NCBI NO: 18421108 NR Description: sugar transporter-like protein; protein id:
  misc_feature (1)..(452): Homolog of NCBI NO: 18397141 NR Description: Expressed protein; protein id: At3g05165.1
  misc_feature (1)..(452): Homolog of NCBI NO: 18397139 NR Description: putative sugar transporter; protein id: supported by cDNA: gi_16604315 [Arabidopsis thaliana] AT3g05160/T12H1_13 [Arabidopsis thaliana]
  misc_feature (1)..(402): Homolog of NCBI NO: 6729026 NR Description: putative sugar transporter [Arabidopsis thaliana]
MEKGLLLAKKEDSANTTPLLIFSTFIIVSASFTFGAAIGYTADTMSSIMSDLDLSLAQFSLFGSLSTFGGMIGAIFSAKAASAFGHKMTLWVADLFCITGWLAISLAKDIIWLDMGRFLVGIGVGLISYVVPVYIAEITPKHVRGAFTFSNQLLQNCGVAVVYYFGNFLSWRTLAIIGSIPCWIQVIGLFFIPESPRWLAKKGRDKECEEVLQKLRGRKYDIVPEACEIKISVEASKKNSNINIRSLFEKRYAHQLTIGIGLMLLQQLCGTAGISSYGSTLFKLAGFPARIGMMVLSLIVVPKSLMGLILVDRWGRRPLLMTSALGLCLSCITLAVAFGVKDVPGIGKITPIFCFIGILSFTMMFAIGMGALPWIIMSEIFPMDIKVLAGSLVTIANWFTGWIANYAFNFMLVWSPSGTFIISAIICGATIVFTWCLVPETRRLTLEEIQLSFVNV

SEQ ID NO: 95785 - protein, 412 aa, Arabidopsis thaliana
  peptide (1)..(412): Ceres Seq. ID no. 12730354
  misc_feature (1)..(374): Pfam Name: Sugar (and other) transporter Pfam Description: Sugar (and other) transporter
  misc_feature (1)..(412): Homolog of NCBI NO: 22330860 NR Description: sugar transporter, putative; protein id: supported by cDNA: gi_17380763, supported by cDNA: gi_20259596 thaliana] >gi|17380764|gb|AAL36212.1| putative sugar transporter
  misc_feature (1)..(374): Homolog of NCBI NO: 7596771 NR Description: sugar transporter, putative [Arabidopsis thaliana]
  misc_feature (74)..(412): Homolog of NCBI NO: 6686833 NR Description: putative sugar transporter [Arabidopsis thaliana]
  misc_feature (1)..(411): Homolog of NCBI NO: 18421106 NR Description: sugar transporter-like protein; protein id: supported by cDNA: gi_14585698, supported by cDNA: gi_15294181
  misc_feature (1)..(411): Homolog of NCBI NO: 14585699 NR Description: sugar-porter family protein 1 [Arabidopsis
  misc_feature (1)..(411): Homolog of NCBI NO: 18390957 NR Description: putative sugar transport protein, ERD6; protein At1g08920.1, supported by cDNA: gi_14194108 [Arabidopsis >gi|14194109|gb|AAK56249.1|AF367260_1 At1g08920/F7G19_20
  misc_feature (1)..(410): Homolog of NCBI NO: 18421108 NR Description: sugar transporter-like protein; protein id:
  misc_feature (1)..(408): Homolog of NCBI NO: 18397141 NR Description: Expressed protein; protein id: At3g05165.1
  misc_feature (1)..(408): Homolog of NCBI NO: 18397139 NR Description: putative sugar transporter; protein id: supported by cDNA: gi_16604315 [Arabidopsis thaliana] AT3g05160/T12H1_13 [Arabidopsis thaliana]
  misc_feature (1)..(358): Homolog of NCBI NO: 6729026 NR Description: putative sugar transporter [Arabidopsis thaliana]
MSSIMSDLDLSLAQFSLFGSLSTFGGMIGAIFSAKAASAFGHKMTLWVADLFCITGWLAISLAKDIIWLDMGRFLVGIGVGLISYVVPVYIAEITPKHVRGAFTFSNQLLQNCGVAVVYYFGNFLSWRTLAIIGSIPCWIQVIGLFFIPESPRWLAKKGRDKECEEVLQKLRGRKYDIVPEACEIKISVEASKKNSNINIRSLFEKRYAHQLTIGIGLMLLQQLCGTAGISSYGSTLFKLAGFPARIGMMVLSLIVVPKSLMGLILVDRWGRRPLLMTSALGLCLSCITLAVAFGVKDVPGIGKITPIFCFIGILSFTMMFAIGMGALPWIIMSEIFPMDIKVLAGSLVTIANWFTGWIANYAFNFMLVWSPSGTFIISAIICGATIVFTWCLVPETRRLTLEEIQLSFVNV

SEQ ID NO: 95786 - DNA, 1632 bp, Arabidopsis thaliana
  misc_feature (1)..(1632): Ceres Seq. ID no. 12730382
  misc_feature: MA Experiment ID: 20000439 Result: Up-regulated in Transcription
  misc_feature: MA Experiment 20000439 PARAMETER Experiment Name: At_Roots__P Parameter: Age (day) Value: 14 vs. 21
  misc_feature: MA Experiment 20000439 PARAMETER Experiment Name: At_Roots__P Parameter: Organism Value: A. thaliana
  misc_feature: MA Experiment 20000439 PARAMETER Experiment Name: At_Roots__P Parameter: Tissue Value: Roots vs. Whole Plant
atggggattaccaccgctcttctcttagttatgcttatgtccgttcacacttcctcgtatgaaaccacaattttaaaaccatacaaagaagataactttcggtctcttgtcgcgaaagcatgccaatttatcgatgctcacgagttgtgcgtctctaacatctggacacacgtcaaggaatcgggtcacgggttaaacccgcattcggttttacgtgctgcggtaaaggaagcacatgacaaagccaagttagcaatggaaagaatcccaacggtaatgatgttatctatccgttcgcgtgagcaagttgccatagaggattgcaaagagcttgtaggcttctcggtaacagagctagcatggtcgatgctggagatgaacaaactccatggaggaggaggaatagatctagacgatggctctcacgatgctgctgcagcaggaggcaatcttaaaacctggcttagcgcggccatgagtaaccaagacacgtgtctagaagggtttgaaggaacagagaggaagtacgaggaattgatcaaaggtagcttaagacaagtcactcagcttgtgagcaatgtcttagacatgtacacgcagctcaatgccttgcctttcaaggcatctaggaacgagagcgtcatcgcaagtcctgagtggctcacggagaccgacgagagcctcatgatgcgtcatgaccccagtgtcatgcatccaaacacggttgtggcgatagatggaaaagggaagtatcggacaattaatgaggccatcaacgaggctcctaatcatagcacaaagcgatatgttatatatgttaagaaaggtgtgtataaagaaaatattgatttgaagaagaagaagacgaacattatgcttgttggtgacggaataggacagacgattattaccggtgaccggaatttcatgcagggtcttacgacattccgaactgcaaccgttgctgtttccggaagaggattcattgcaaaggacataacattcagaaacacggctggtccgcaaaaccgtcaagctgtcgcattgagggttgattctgaccaatccgccttctatcgatgtagcgtggaaggttatcaagacactctttacgcccattccctccgtcagttctatagagattgtgaaatttatggtacgattgatttcatattcggaaacggcgccgcggttttacaaaactgtaaaatctacactcgggtcccgctaccgctccagaaggtaacgataaccgcgcaaggaagaaaaagtccaaatcaaaatacagggttcgtaatccagaacagttacgtgctggctacacaacctacttatcttggccggccatggaaactttactcaagaacggtttacatgaacacttacatgagccagttggtccaacccagaggatggcttgagtggtttggtaattttgctttggacactttgtggtatggagaatacaataatattgggccaggttggcgatcatcaggtcgggttaaatggcctggttatcatatcatggacaaacggactgcattatcgttcaccgttggatcgttcattgacggtaggagatggcttccggcaacaggtgtcacattcaccgctggtctagctaactaa

SEQ ID NO: 95787 - protein, 543 aa, Arabidopsis thaliana
  peptide (1)..(543): Ceres Seq. ID no. 12730383
  misc_feature (240)..(527): Pfam Name: Pectinesterase Pfam Description: Pectinesterase
  misc_feature (1)..(543): Homolog of NCBI NO: 15230020 NR Description: pectinesterase family; protein id: At3g05620.1 thaliana] >gi|6714448|gb|AAF26135.1|AC011620_11 putative
  misc_feature (237)..(541): Homolog of NCBI NO: 34902864 NR Description: unnamed protein product [Oryza sativa (japonica group)] >gi|5922617|dbj|BAA84618.1| unnamed protein product
  misc_feature (50)..(201): Homolog of NCBI NO: 34902864 NR Description: unnamed protein product [Oryza sativa (japonica group)] >gi|5922617|dbj|BAA84618.1| unnamed protein product
  misc_feature (98)..(543): Homolog of NCBI NO: 30690925 NR Description: pectinesterase family [Arabidopsis thaliana]
  misc_feature (67)..(542): Homolog of NCBI NO: 15081598 NR Description: pectin methylesterase PME1 [Vitis vinifera]
  misc_feature (100)..(541): Homolog of NCBI NO: 7447375 NR Description: pectinesterase homolog F4I10.150 - Arabidopsis
  misc_feature (100)..(541): Homolog of NCBI NO: 14190429 NR Description: AT4g33220/F4I10_150 [Arabidopsis thaliana]
  misc_feature (150)..(539): Homolog of NCBI NO: 6093744 NR Description: Pectinesterase PPE8B precursor (Pectin
  misc_feature (104)..(540): Homolog of NCBI NO: 33520429 NR Description: pectinesterase [Fragaria x ananassa]
  misc_feature (81)..(542): Homolog of NCBI NO: 15238729 NR Description: pectinesterase; protein id: At5g53370.1, by cDNA: gi_13507548, supported by cDNA: gi_15293286 [Arabidopsis >gi|9759184|dbj|BAB09799.1| pectinesterase [Arabidopsis thaliana]
MGITTALLLVMLMSVHTSSYETTILKPYKEDNFRSLVAKACQFIDAHELCVSNIWTHVKESGHGLNPHSVLRAAVKEAHDKAKLAMERIPTVMMLSIRSREQVAIEDCKELVGFSVTELAWSMLEMNKLHGGGGIDLDDGSHDAAAAGGNLKTWLSAAMSNQDTCLEGFEGTERKYEELIKGSLRQVTQLVSNVLDMYTQLNALPFKASRNESVIASPEWLTETDESLMMRHDPSVMHPNTVVAIDGKGKYRTINEAINEAPNHSTKRYVIYVKKGVYKENIDLKKKKTNIMLVGDGIGQTIITGDRNFMQGLTTFRTATVAVSGRGFIAKDITFRNTAGPQNRQAVALRVDSDQSAFYRCSVEGYQDTLYAHSLRQFYRDCEIYGTIDFIFGNGAAVLQNCKIYTRVPLPLQKVTITAQGRKSPNQNTGFVIQNSYVLATQPTYLGRPWKLYSRTVYMNTYMSQLVQPRGWLEWFGNFALDTLWYGEYNNIGPGWRSSGRVKWPGYHIMDKRTALSFTVGSFIDGRRWLPATGVTFTAGLAN

SEQ ID NO: 95788 - protein, 533 aa, Arabidopsis thaliana
  peptide (1)..(533): Ceres Seq. ID no. 12730384
  misc_feature (230)..(517): Pfam Name: Pectinesterase Pfam Description: Pectinesterase
  misc_feature (1)..(533): Homolog of NCBI NO: 15230020 NR Description: pectinesterase family; protein id: At3g05620.1 thaliana] >gi|6714448|gb|AAF26135.1|AC011620_11 putative
  misc_feature (227)..(531): Homolog of NCBI NO: 34902864 NR Description: unnamed protein product [Oryza sativa (japonica group)] >gi|5922617|dbj|BAA84618.1| unnamed protein product
  misc_feature (40)..(191): Homolog of NCBI NO: 34902864 NR Description: unnamed protein product [Oryza sativa (japonica group)] >gi|5922617|dbj|BAA84618.1| unnamed protein product
  misc_feature (88)..(533): Homolog of NCBI NO: 30690925 NR Description: pectinesterase family [Arabidopsis thaliana]
  misc_feature (57)..(532): Homolog of NCBI NO: 15081598 NR Description: pectin methylesterase PME1 [Vitis vinifera]
  misc_feature (90)..(531): Homolog of NCBI NO: 7447375 NR Description: pectinesterase homolog F4I10.150 - Arabidopsis
  misc_feature (90)..(531): Homolog of NCBI NO: 14190429 NR Description: AT4g33220/F4I10_150 [Arabidopsis thaliana]
  misc_feature (140)..(529): Homolog of NCBI NO: 6093744 NR Description: Pectinesterase PPE8B precursor (Pectin
  misc_feature (94)..(530): Homolog of NCBI NO: 33520429 NR Description: pectinesterase [Fragaria x ananassa]
  misc_feature (71)..(532): Homolog of NCBI NO: 15238729 NR Description: pectinesterase; protein id: At5g53370.1, by cDNA: gi_13507548, supported by cDNA: gi_15293286 [Arabidopsis >gi|9759184|dbj|BAB09799.1| pectinesterase [Arabidopsis thaliana]
MLMSVHTSSYETTILKPYKEDNFRSLVAKACQFIDAHELCVSNIWTHVKESGHGLNPHSVLRAAVKEAHDKAKLAMERIPTVMMLSIRSREQVAIEDCKELVGFSVTELAWSMLEMNKLHGGGGIDLDDGSHDAAAAGGNLKTWLSAAMSNQDTCLEGFEGTERKYEELIKGSLRQVTQLVSNVLDMYTQLNALPFKASRNESVIASPEWLTETDESLMMRHDPSVMHPNTVVAIDGKGKYRTINEAINEAPNHSTKRYVIYVKKGVYKENIDLKKKKTNIMLVGDGIGQTIITGDRNFMQGLTTFRTATVAVSGRGFIAKDITFRNTAGPQNRQAVALRVDSDQSAFYRCSVEGYQDTLYAHSLRQFYRDCEIYGTIDFIFGNGAAVLQNCKIYTRVPLPLQKVTITAQGRKSPNQNTGFVIQNSYVLATQPTYLGRPWKLYSRTVYMNTYMSQLVQPRGWLEWFGNFALDTLWYGEYNNIGPGWRSSGRVKWPGYHIMDKRTALSFTVGSFIDGRRWLPATGVTFTAGLAN

SEQ ID NO: 95789 - protein, 531 aa, Arabidopsis thaliana
  peptide (1)..(531): Ceres Seq. ID no. 12730385
  misc_feature (228)..(515): Pfam Name: Pectinesterase Pfam Description: Pectinesterase
  misc_feature (1)..(531): Homolog of NCBI NO: 15230020 NR Description: pectinesterase family; protein id: At3g05620.1 thaliana] >gi|6714448|gb|AAF26135.1|AC011620_11 putative
  misc_feature (225)..(529): Homolog of NCBI NO: 34902864 NR Description: unnamed protein product [Oryza sativa (japonica group)] >gi|5922617|dbj|BAA84618.1| unnamed protein product
  misc_feature (38)..(189): Homolog of NCBI NO: 34902864 NR Description: unnamed protein product [Oryza sativa (japonica group)] >gi|5922617|dbj|BAA84618.1| unnamed protein product
  misc_feature (86)..(531): Homolog of NCBI NO: 30690925 NR Description: pectinesterase family [Arabidopsis thaliana]
  misc_feature (55)..(530): Homolog of NCBI NO: 15081598 NR Description: pectin methylesterase PME1 [Vitis vinifera]
  misc_feature (88)..(529): Homolog of NCBI NO: 7447375 NR Description: pectinesterase homolog F4I10.150 - Arabidopsis
  misc_feature (88)..(529): Homolog of NCBI NO: 14190429 NR Description: AT4g33220/F4I10_150 [Arabidopsis thaliana]
  misc_feature (138)..(527): Homolog of NCBI NO: 6093744 NR Description: Pectinesterase PPE8B precursor (Pectin
  misc_feature (92)..(528): Homolog of NCBI NO: 33520429 NR Description: pectinesterase [Fragaria x ananassa]
  misc_feature (69)..(530): Homolog of NCBI NO: 15238729 NR Description: pectinesterase; protein id: At5g53370.1, by cDNA: gi_13507548, supported by cDNA: gi_15293286 [Arabidopsis >gi|9759184|dbj|BAB09799.1| pectinesterase [Arabidopsis thaliana]
MSVHTSSYETTILKPYKEDNFRSLVAKACQFIDAHELCVSNIWTHVKESGHGLNPHSVLRAAVKEAHDKAKLAMERIPTVMMLSIRSREQVAIEDCKELVGFSVTELAWSMLEMNKLHGGGGIDLDDGSHDAAAAGGNLKTWLSAAMSNQDTCLEGFEGTERKYEELIKGSLRQVTQLVSNVLDMYTQLNALPFKASRNESVIASPEWLTETDESLMMRHDPSVMHPNTVVAIDGKGKYRTINEAINEAPNHSTKRYVIYVKKGVYKENIDLKKKKTNIMLVGDGIGQTIITGDRNFMQGLTTFRTATVAVSGRGFIAKDITFRNTAGPQNRQAVALRVDSDQSAFYRCSVEGYQDTLYAHSLRQFYRDCEIYGTIDFIFGNGAAVLQNCKIYTRVPLPLQKVTITAQGRKSPNQNTGFVIQNSYVLATQPTYLGRPWKLYSRTVYMNTYMSQLVQPRGWLEWFGNFALDTLWYGEYNNIGPGWRSSGRVKWPGYHIMDKRTALSFTVGSFIDGRRWLPATGVTFTAGLAN

SEQ ID NO: 95790 - DNA, 1587 bp, Arabidopsis thaliana
  misc_feature (1)..(1587): Ceres Seq. ID no. 12730419
  misc_feature: MA Experiment ID: 20000307 Result: Up-regulated in Transcription
  misc_feature: MA Experiment 20000307 PARAMETER Experiment Name: At_Germinating_Seeds_Sub_P Parameter: Age (hr) Value: 24 vs. 0
  misc_feature: MA Experiment 20000307 PARAMETER Experiment Name: At_Germinating_Seeds_Sub_P Parameter: Organism Value: A. thaliana
  misc_feature: MA Experiment 20000307 PARAMETER Experiment Name: At_Germinating_Seeds_Sub_P Parameter: Plant Line Value: WS
  misc_feature: MA Experiment 20000307 PARAMETER Experiment Name: At_Germinating_Seeds_Sub_P Parameter: Tissue Value: Germinating Seeds
  misc_feature: MA Experiment ID: 20000355 Result: Up-regulated in Transcription
  misc_feature: MA Experiment 20000355 PARAMETER Experiment Name: At_Siliques_Sub_P Parameter: Age (day) Value: 21
  misc_feature: MA Experiment 20000355 PARAMETER Experiment Name: At_Siliques_Sub_P Parameter: Organism Value: A. thaliana
  misc_feature: MA Experiment 20000355 PARAMETER Experiment Name: At_Siliques_Sub_P Parameter: Plant Line Value: WS
  misc_feature: MA Experiment 20000355 PARAMETER Experiment Name: At_Siliques_Sub_P Parameter: Tissue Value: Less Than 5mm Siliques vs. Whole Plant
  misc_feature: MA Experiment ID: 20000440 Result: Up-regulated in Transcription
  misc_feature: MA Experiment 20000440 PARAMETER Experiment Name: At_Closed-Flower__Sub_P Parameter: Tissue Value: Closed Flower vs. Whole Plant
atgaagggaggagagacaatgtcagtacggaggagcgggtacaaggcggtggttgacggagttggtggacggcggcgaagagaggacgacatggttgagatccgcaaagctaagagagaagagagcttgcttaagaagcgtcgcgaggctcttcctcattctccttccgccgattctcttgaccagaagttgataagctgtatttggtctgacgagagggatctgttgattgaggctactacacagatcagaacgttactttgtggtgaaatgtttaacgtacgtgttgaagaagttatacaggccggtttggttccacgctttgtggagttcctaacatgggatgactccccccagcttcagtttgaagcggcttgggctttaacaaatattgcatctggaacatctgagaatactgaagtggtgattgatcatggagctgttgcaatactagtgagacttctcaactcgccatatgatgtggtccgtgagcaggttgtttgggcattaggaaatatttctggagactctccgagatgccgtgatatagtccttggacatgcagctctaccttctctgctgttgcagttaaaccatggagccaaactttctatgcttgtaaacgccgcttggactttatctaatctttgcagaggaaagcctcagcctccatttgatcaggtgagtgctgcattaccagctcttgcacaactcattcggttagacgacaaggaactcttggcttacacgtgttgggcgctggtgtatctttctgatggttcaaatgaaaaaatacaagccgtgattgaagccaatgtttgtgcgcgacttattggtctttcgatccaccgttcgccttcagttatcactcccgctcttcgcaccattggaaatattgtaactggaaacgatagtcaaactcagcatataattgatcttcaagcgctcccatgcttggtaaatcttctaaggggatcctataacaagaccatcaggaaagaagcttgttggacagtctctaatatcacagctggttgtcagtcacagattcaggctgtgtttgatgctgatatatgtcctgcacttgttaatctgctccaaaactctgagggcgacgttaagaaggaagctgcctgggctatctgcaacgccatagctggaggctcttacaagcaaatcatgtttctagtaaagcaagaatgcatcaaaccgttgtgcgatcttcttacatgctcagatactcaactcgtcatggtttgtttagaagcactcaaaaaaatattaaaggtgggagaagttttcagctcaagacacgctgaaggtatttaccaatgtcctcaaacaaatgtaaacccacatgctcagctaatagaagaggcagagggactggagaaaatcgagggcctgcaatctcatgagaacaatgacatctacgaaactgcggtgaagattcttgaaacatactggatggaagaagaagaagaagaagatcaagaacaacaagacatgatatatttcccagttgacaactttgcaaacatgccaacatcctcaggcactctcagtgagatgcactgcggaccttaa

SEQ ID NO: 95791 - protein, 528 aa, Arabidopsis thaliana
  peptide (1)..(528): Ceres Seq. ID no. 12730420
  misc_feature (2)..(82): Pfam Name: Importin beta binding domain Pfam Description: Importin beta binding domain
  misc_feature (1)..(528): Homolog of NCBI NO: 15230038 NR Description: putative importin alpha; protein id: At3g05720.1 thaliana] >gi|6714438|gb|AAF26125.1|AC011620_1 putative importin
  misc_feature (10)..(506): Homolog of NCBI NO: 3915737 NR Description: Importin alpha subunit (Karyopherin alpha
  misc_feature (1)..(495): Homolog of NCBI NO: 34902832 NR Description: unnamed protein product [Oryza sativa (japonica
  misc_feature (9)..(495): Homolog of NCBI NO: 13752562 NR Description: importin alpha 2 [Capsicum annuum]
  misc_feature (9)..(499): Homolog of NCBI NO: 15230778 NR Description: importin alpha; protein id: At3g06720.2, by cDNA: 9351., supported by cDNA: gi_13699776, supported by gi_15809793, supported by cDNA: gi_20453047, supported by cDNA:
  misc_feature (9)..(499): Homolog of NCBI NO: 25314876 NR Description: probable nuclear transport factor importin
  misc_feature (9)..(499): Homolog of NCBI NO: 15809794 NR Description: AT3g06720/F3E22_14 [Arabidopsis thaliana]
  misc_feature (9)..(499): Homolog of NCBI NO: 13699777 NR Description: AtKAP alpha [Arabidopsis thaliana]
  misc_feature (9)..(495): Homolog of NCBI NO: 13605661 NR Description: AT3g06720/F3E22_14 [Arabidopsis thaliana]
  misc_feature (9)..(495): Homolog of NCBI NO: 25314870 NR Description: probable nuclear transport factor importin alpha
MKGGETMSVRRSGYKAVVDGVGGRRRREDDMVEIRKAKREESLLKKRREALPHSPSADSLDQKLISCIWSDERDLLIEATTQIRTLLCGEMFNVRVEEVIQAGLVPRFVEFLTWDDSPQLQFEAAWALTNIASGTSENTEVVIDHGAVAILVRLLNSPYDVVREQVVWALGNISGDSPRCRDIVLGHAALPSLLLQLNHGAKLSMLVNAAWTLSNLCRGKPQPPFDQVSAALPALAQLIRLDDKELLAYTCWALVYLSDGSNEKIQAVIEANVCARLIGLSIHRSPSVITPALRTIGNIVTGNDSQTQHIIDLQALPCLVNLLRGSYNKTIRKEACWTVSNITAGCQSQIQAVFDADICPALVNLLQNSEGDVKKEAAWAICNAIAGGSYKQIMFLVKQECIKPLCDLLTCSDTQLVMVCLEALKKILKVGEVFSSRHAEGIYQCPQTNVNPHAQLIEEAEGLEKIEGLQSHENNDIYETAVKILETYWMEEEEEEDQEQQDMIYFPVDNFANMPTSSGTLSEMHCGP

SEQ ID NO: 95792 - protein, 522 aa, Arabidopsis thaliana
  peptide (1)..(522): Ceres Seq. ID no. 12730421
  misc_feature (1)..(76): Pfam Name: Importin beta binding domain Pfam Description: Importin beta binding domain
  misc_feature (1)..(522): Homolog of NCBI NO: 15230038 NR Description: putative importin alpha; protein id: At3g05720.1 thaliana] >gi|6714438|gb|AAF26125.1|AC011620_1 putative importin
  misc_feature (4)..(500): Homolog of NCBI NO: 3915737 NR Description: Importin alpha subunit (Karyopherin alpha
  misc_feature (1)..(489): Homolog of NCBI NO: 34902832 NR Description: unnamed protein product [Oryza sativa (japonica
  misc_feature (3)..(489): Homolog of NCBI NO: 13752562 NR Description: importin alpha 2 [Capsicum annuum]
  misc_feature (3)..(493): Homolog of NCBI NO: 15230778 NR Description: importin alpha; protein id: At3g06720.2, by cDNA: 9351., supported by cDNA: gi_13699776, supported by gi_15809793, supported by cDNA: gi_20453047, supported by cDNA:
  misc_feature (3)..(493): Homolog of NCBI NO: 25314876 NR Description: probable nuclear transport factor importin
  misc_feature (3)..(493): Homolog of NCBI NO: 15809794 NR Description: AT3g06720/F3E22_14 [Arabidopsis thaliana]
  misc_feature (3)..(493): Homolog of NCBI NO: 13699777 NR Description: AtKAP alpha [Arabidopsis thaliana]
  misc_feature (3)..(489): Homolog of NCBI NO: 13605661 NR Description: AT3g06720/F3E22_14 [Arabidopsis thaliana]
  misc_feature (3)..(489): Homolog of NCBI NO: 25314870 NR Description: probable nuclear transport factor importin alpha
MSVRRSGYKAVVDGVGGRRRREDDMVEIRKAKREESLLKKRREALPHSPSADSLDQKLISCIWSDERDLLIEATTQIRTLLCGEMFNVRVEEVIQAGLVPRFVEFLTWDDSPQLQFEAAWALTNIASGTSENTEVVIDHGAVAILVRLLNSPYDVVREQVVWALGNISGDSPRCRDIVLGHAALPSLLLQLNHGAKLSMLVNAAWTLSNLCRGKPQPPFDQVSAALPALAQLIRLDDKELLAYTCWALVYLSDGSNEKIQAVIEANVCARLIGLSIHRSPSVITPALRTIGNIVTGNDSQTQHIIDLQALPCLVNLLRGSYNKTIRKEACWTVSNITAGCQSQIQAVFDADICPALVNLLQNSEGDVKKEAAWAICNAIAGGSYKQIMFLVKQECIKPLCDLLTCSDTQLVMVCLEALKKILKVGEVFSSRHAEGIYQCPQTNVNPHAQLIEEAEGLEKIEGLQSHENNDIYETAVKILETYWMEEEEEEDQEQQDMIYFPVDNFANMPTSSGTLSEMHCGP

SEQ ID NO: 95793 - protein, 498 aa, Arabidopsis thaliana
  peptide (1)..(498): Ceres Seq. ID no. 12730422
  misc_feature (1)..(52): Pfam Name: Importin beta binding domain Pfam Description: Importin beta binding domain
  misc_feature (1)..(498): Homolog of NCBI NO: 15230038 NR Description: putative importin alpha; protein id: At3g05720.1 thaliana] >gi|6714438|gb|AAF26125.1|AC011620_1 putative importin
  misc_feature (1)..(476): Homolog of NCBI NO: 3915737 NR Description: Importin alpha subunit (Karyopherin alpha
  misc_feature (1)..(465): Homolog of NCBI NO: 34902832 NR Description: unnamed protein product [Oryza sativa (japonica
  misc_feature (1)..(465): Homolog of NCBI NO: 13752562 NR Description: importin alpha 2 [Capsicum annuum]
  misc_feature (1)..(469): Homolog of NCBI NO: 15230778 NR Description: importin alpha; protein id: At3g06720.2, by cDNA: 9351., supported by cDNA: gi_13699776, supported by gi_15809793, supported by cDNA: gi_20453047, supported by cDNA:
  misc_feature (1)..(469): Homolog of NCBI NO: 25314876 NR Description: probable nuclear transport factor importin
  misc_feature (1)..(469): Homolog of NCBI NO: 15809794 NR Description: AT3g06720/F3E22_14 [Arabidopsis thaliana]
  misc_feature (1)..(469): Homolog of NCBI NO: 13699777 NR Description: AtKAP alpha [Arabidopsis thaliana]
  misc_feature (1)..(465): Homolog of NCBI NO: 13605661 NR Description: AT3g06720/F3E22_14 [Arabidopsis thaliana]
  misc_feature (1)..(465): Homolog of NCBI NO: 25314870 NR Description: probable nuclear transport factor importin alpha
MVEIRKAKREESLLKKRREALPHSPSADSLDQKLISCIWSDERDLLIEATTQIRTLLCGEMFNVRVEEVIQAGLVPRFVEFLTWDDSPQLQFEAAWALTNIASGTSENTEVVIDHGAVAILVRLLNSPYDVVREQVVWALGNISGDSPRCRDIVLGHAALPSLLLQLNHGAKLSMLVNAAWTLSNLCRGKPQPPFDQVSAALPALAQLIRLDDKELLAYTCWALVYLSDGSNEKIQAVIEANVCARLIGLSIHRSPSVITPALRTIGNIVTGNDSQTQHIIDLQALPCLVNLLRGSYNKTIRKEACWTVSNITAGCQSQIQAVFDADICPALVNLLQNSEGDVKKEAAWAICNAIAGGSYKQIMFLVKQECIKPLCDLLTCSDTQLVMVCLEALKKILKVGEVFSSRHAEGIYQCPQTNVNPHAQLIEEAEGLEKIEGLQSHENNDIYETAVKILETYWMEEEEEEDQEQQDMIYFPVDNFANMPTSSGTLSEMHCGP

SEQ ID NO: 95794 - DNA, 2240 bp, Arabidopsis thaliana
  misc_feature (1)..(2240): Ceres Seq. ID no. 12730455
  misc_feature: MA Experiment ID: 20000180 Result: Up-regulated in Transcription
  misc_feature: MA Experiment 20000180 PARAMETER Experiment Name: At_Germinating_Seeds_P Parameter: Age (hr) Value: 24 vs. 0
  misc_feature: MA Experiment 20000180 PARAMETER Experiment Name: At_Germinating_Seeds_P Parameter: Tissue Value: Germinating Seeds
  misc_feature: MA Experiment ID: 20000286 Result: Up-regulated in Transcription
  misc_feature: MA Experiment 20000286 PARAMETER Experiment Name: At_Open_Flower_P Parameter: Age (day) Value: 21
  misc_feature: MA Experiment 20000286 PARAMETER Experiment Name: At_Open_Flower_P Parameter: Plant Line Value: WS
  misc_feature: MA Experiment 20000286 PARAMETER Experiment Name: At_Open_Flower_P Parameter: Tissue Value: Half Open vs. Whole Plant
  misc_feature: MA Experiment ID: 20000495 Result: Up-regulated in Transcription
  misc_feature: MA Experiment 20000495 PARAMETER Experiment Name: At_Guard_Cells_P Parameter: Harvest Date Value: 8/2/2002
  misc_feature: MA Experiment 20000495 PARAMETER Experiment Name: At_Guard_Cells_P Parameter: Organism Value: A. thaliana
  misc_feature: MA Experiment 20000495 PARAMETER Experiment Name: At_Guard_Cells_P Parameter: Tissue Value: Guard Cells vs. Leaves
aagcttttaattttgaaaaacagatcgagtttctctttccctcctcgaaatttcctaaatccacacatcacgaagccgaagcagccatgagtaatcttcactgatctctctacacattcaccgtcggcttctcaaatgcaggatattctcggatcggttcgccgatccttggttttccggtcgtctttggccggagacgatggtactagcggcggaggtcttagcggattcgtcgggaagattaactctagtatccgtagctctcgaattgggctcttttctaagccgcctccaggccttcctgctcctagaaaagaagaagcgccgtcgattcggtggaggaaaggggaattaatcggttgcggtgcttttggaagagtttacatgggaatgaacctcgattccggcgagcttcttgcaattaaacaggttttaatcgctccaagcagtgcttcaaaggagaagactcagggtcacatccgagagcttgaggaagaagtacaacttcttaagaatctttcacatccgaacatcgttagatacttgggtactgtaagagagagtgattcgttgaatattttgatggagtttgttcctggtggatcaatatcatctttgttggagaagtttggatcttttcctgagcctgtgattattatgtacacaaagcaacttctgcttggtctggaatatcttcacaacaatgggatcatgcatcgagatattaagggggcaaatattttggtcgataacaaaggttgcatcagactcgcagattttggtgcttccaagaaagttgtagagctagctactgtaaatggtgccaaatctatgaaggggacgccttattggatggctcctgaagtcattctccagactggtcatagcttctctgctgatatatggagtgttgggtgcactgtgattgagatggctacggggaagcctccctggagcgagcagtatcagcagtttgctgctgtccttcatattggtagaacaaaagctcatcctccaattccagaagacctctcaccagaggctaaagactttctaatgaaatgcttacacaaagaaccaagcttgagactctctgcaaccgaattgcttcagcacccgtttgtcactggaaagcgccaggaaccttatccagcttaccgtaattctcttacggaatgtggaaacccaataactactcaaggaatgaatgttcggagttcaataaattcgttgatcaggaggtcgacatgttcaggcttgaaggatgtctgtgaactgggaagcttgaggagttccattatatacccacagaagtcaaataactcaggatttggttggcgagatggagactctgatgacctttgtcagaccgatatggatgatctctgcaacattgaatcagtcagaaacaatgttttgtcacagtccaccgatttaaacaagagttttaatcccatgtgtgattccacggataactggtcttgcaagtttgatgaaagcccaaaagtgatgaaaagcaaatctaacctgctttcttaccaagcttctcaactccaaactggagttccatgtgatgaggaaaccagcttaacatttgctggtggctcttccgttgcagaggatgattataaaggcacagagttgaaaataaaatcatttttggatgagaaggctcaggatttgaaaaggttgcagacccctctgcttgaagaattccacaatgctatgaatccaggaataccccaaggtgcacttggagacaccaatatctacaatttaccaaacttaccaagtataagcaagacacctaaacgacttccgagtagacgactctcagcaatcagtgatgctatgcccagcccactcaaaagctccaaacgtacactgaacacaagcagagtgatgcagtcaggaactgaaccaactcaagtcaacgagtcgaccaagaagggagtaaataatagccgttgtttctcagagatacgtcggaagtgggaagaagaactctatgaagagcttgagaggcatcgagagaatctgcgacacgctggtgcaggagggaagactccattatcaggccacaaaggatagtgaacggctaaagagaaactgtatgtttctttcttatgtttcaaaattacttcttcgtatttttttttgttggtggggtaatttcatgactagtatgatatatgtagatagttcttcaacggttcatagtattattatttattattatt

SEQ ID NO: 95795 - protein, 651 aa, Arabidopsis thaliana
  peptide (1)..(651): Ceres Seq. ID no. 12730456
  misc_feature (68)..(330): Pfam Name: Protein kinase domain Pfam Description: Protein kinase domain
  misc_feature (1)..(638): Homolog of NCBI NO: 477094 NR Description: STE11 protein kinase homolog NPK1 - common tobacco
  misc_feature (1)..(638): Homolog of NCBI NO: 456309 NR Description: protein kinase [Nicotiana tabacum]
  misc_feature (1)..(650): Homolog of NCBI NO: 25387090 NR Description: NPK1-related protein kinase 2 [imported] -
  misc_feature (10)..(650): Homolog of NCBI NO: 2342425 NR Description: NPK1-related protein kinase 2 [Arabidopsis
  misc_feature (1)..(641): Homolog of NCBI NO: 30680907 NR Description: protein kinase, putative [Arabidopsis thaliana]
  misc_feature (6)..(641): Homolog of NCBI NO: 2342421 NR Description: NPK1-related protein kinase 1L [Arabidopsis
  misc_feature (1)..(455): Homolog of NCBI NO: 15221948 NR Description: NPK1-related protein kinase, putative; protein id:
  misc_feature (552)..(650): Homolog of NCBI NO: 15221948 NR Description: NPK1-related protein kinase, putative; protein id:
  misc_feature (54)..(332): Homolog of NCBI NO: 37573087 NR Description: putative protein kinase [Oryza sativa (japonica
  misc_feature (415)..(651): Homolog of NCBI NO: 37573087 NR Description: putative protein kinase [Oryza sativa (japonica
MQDILGSVRRSLVFRSSLAGDDGTSGGGLSGFVGKINSSIRSSRIGLFSKPPPGLPAPRKEEAPSIRWRKGELIGCGAFGRVYMGMNLDSGELLAIKQVLIAPSSASKEKTQGHIRELEEEVQLLKNLSHPNIVRYLGTVRESDSLNILMEFVPGGSISSLLEKFGSFPEPVIIMYTKQLLLGLEYLHNNGIMHRDIKGANILVDNKGCIRLADFGASKKVVELATVNGAKSMKGTPYWMAPEVILQTGHSFSADIWSVGCTVIEMATGKPPWSEQYQQFAAVLHIGRTKAHPPIPEDLSPEAKDFLMKCLHKEPSLRLSATELLQHPFVTGKRQEPYPAYRNSLTECGNPITTQGMNVRSSINSLIRRSTCSGLKDVCELGSLRSSIIYPQKSNNSGFGWRDGDSDDLCQTDMDDLCNIESVRNNVLSQSTDLNKSFNPMCDSTDNWSCKFDESPKVMKSKSNLLSYQASQLQTGVPCDEETSLTFAGGSSVAEDDYKGTELKIKSFLDEKAQDLKRLQTPLLEEFHNAMNPGIPQGALGDTNIYNLPNLPSISKTPKRLPSRRLSAISDAMPSPLKSSKRTLNTSRVMQSGTEPTQVNESTKKGVNNSRCFSEIRRKWEEELYEELERHRENLRHAGAGGKTPLSGHKG

SEQ ID NO: 95796 - protein, 568 aa, Arabidopsis thaliana
  peptide (1)..(568): Ceres Seq. ID no. 12730457
  misc_feature (1)..(247): Pfam Name: Protein kinase domain Pfam Description: Protein kinase domain
  misc_feature (1)..(555): Homolog of NCBI NO: 477094 NR Description: STE11 protein kinase homolog NPK1 - common tobacco
  misc_feature (1)..(555): Homolog of NCBI NO: 456309 NR Description: protein kinase [Nicotiana tabacum]
  misc_feature (1)..(567): Homolog of NCBI NO: 25387090 NR Description: NPK1-related protein kinase 2 [imported] -
  misc_feature (1)..(567): Homolog of NCBI NO: 2342425 NR Description: NPK1-related protein kinase 2 [Arabidopsis
  misc_feature (1)..(558): Homolog of NCBI NO: 30680907 NR Description: protein kinase, putative [Arabidopsis thaliana]
  misc_feature (1)..(558): Homolog of NCBI NO: 2342421 NR Description: NPK1-related protein kinase 1L [Arabidopsis
  misc_feature (1)..(372): Homolog of NCBI NO: 15221948 NR Description: NPK1-related protein kinase, putative; protein id:
  misc_feature (469)..(567): Homolog of NCBI NO: 15221948 NR Description: NPK1-related protein kinase, putative; protein id:
  misc_feature (1)..(249): Homolog of NCBI NO: 37573087 NR Description: putative protein kinase [Oryza sativa (japonica
  misc_feature (332)..(568): Homolog of NCBI NO: 37573087 NR Description: putative protein kinase [Oryza sativa (japonica
MGMNLDSGELLAIKQVLIAPSSASKEKTQGHIRELEEEVQLLKNLSHPNIVRYLGTVRESDSLNILMEFVPGGSISSLLEKFGSFPEPVIIMYTKQLLLGLEYLHNNGIMHRDIKGANILVDNKGCIRLADFGASKKVVELATVNGAKSMKGTPYWMAPEVILQTGHSFSADIWSVGCTVIEMATGKPPWSEQYQQFAAVLHIGRTKAHPPIPEDLSPEAKDFLMKCLHKEPSLRLSATELLQHPFVTGKRQEPYPAYRNSLTECGNPITTQGMNVRSSINSLIRRSTCSGLKDVCELGSLRSSIIYPQKSNNSGFGWRDGDSDDLCQTDMDDLCNIESVRNNVLSQSTDLNKSFNPMCDSTDNWSCKFDESPKVMKSKSNLLSYQASQLQTGVPCDEETSLTFAGGSSVAEDDYKGTELKIKSFLDEKAQDLKRLQTPLLEEFHNAMNPGIPQGALGDTNIYNLPNLPSISKTPKRLPSRRLSAISDAMPSPLKSSKRTLNTSRVMQSGTEPTQVNESTKKGVNNSRCFSEIRRKWEEELYEELERHRENLRHAGAGGKTPLSGHKG

SEQ ID NO: 95797 - protein, 566 aa, Arabidopsis thaliana
  peptide (1)..(566): Ceres Seq. ID no. 12730458
  misc_feature (1)..(245): Pfam Name: Protein kinase domain Pfam Description: Protein kinase domain
  misc_feature (1)..(553): Homolog of NCBI NO: 477094 NR Description: STE11 protein kinase homolog NPK1 - common tobacco
  misc_feature (1)..(553): Homolog of NCBI NO: 456309 NR Description: protein kinase [Nicotiana tabacum]
  misc_feature (1)..(565): Homolog of NCBI NO: 25387090 NR Description: NPK1-related protein kinase 2 [imported] -
  misc_feature (1)..(565): Homolog of NCBI NO: 2342425 NR Description: NPK1-related protein kinase 2 [Arabidopsis
  misc_feature (1)..(556): Homolog of NCBI NO: 30680907 NR Description: protein kinase, putative [Arabidopsis thaliana]
  misc_feature (1)..(556): Homolog of NCBI NO: 2342421 NR Description: NPK1-related protein kinase 1L [Arabidopsis
  misc_feature (1)..(370): Homolog of NCBI NO: 15221948 NR Description: NPK1-related protein kinase, putative; protein id:
  misc_feature (467)..(565): Homolog of NCBI NO: 15221948 NR Description: NPK1-related protein kinase, putative; protein id:
  misc_feature (1)..(247): Homolog of NCBI NO: 37573087 NR Description: putative protein kinase [Oryza sativa (japonica
  misc_feature (330)..(566): Homolog of NCBI NO: 37573087 NR Description: putative protein kinase [Oryza sativa (japonica
MNLDSGELLAIKQVLIAPSSASKEKTQGHIRELEEEVQLLKNLSHPNIVRYLGTVRESDSLNILMEFVPGGSISSLLEKFGSFPEPVIIMYTKQLLLGLEYLHNNGIMHRDIKGANILVDNKGCIRLADFGASKKVVELATVNGAKSMKGTPYWMAPEVILQTGHSFSADIWSVGCTVIEMATGKPPWSEQYQQFAAVLHIGRTKAHPPIPEDLSPEAKDFLMKCLHKEPSLRLSATELLQHPFVTGKRQEPYPAYRNSLTECGNPITTQGMNVRSSINSLIRRSTCSGLKDVCELGSLRSSIIYPQKSNNSGFGWRDGDSDDLCQTDMDDLCNIESVRNNVLSQSTDLNKSFNPMCDSTDNWSCKFDESPKVMKSKSNLLSYQASQLQTGVPCDEETSLTFAGGSSVAEDDYKGTELKIKSFLDEKAQDLKRLQTPLLEEFHNAMNPGIPQGALGDTNIYNLPNLPSISKTPKRLPSRRLSAISDAMPSPLKSSKRTLNTSRVMQSGTEPTQVNESTKKGVNNSRCFSEIRRKWEEELYEELERHRENLRHAGAGGKTPLSGHKG

SEQ ID NO: 95798 - DNA, 2219 bp, Arabidopsis thaliana
  misc_feature (1)..(2219): Ceres Seq. ID no. 12730462
  misc_feature: MA Experiment ID: 20000171 Result: Down-regulated in Transcription
  misc_feature: MA Experiment 20000171 PARAMETER Experiment Name: At_42deg_Heat_P Parameter: Age (day) Value: 14
  misc_feature: MA Experiment 20000171 PARAMETER Experiment Name: At_42deg_Heat_P Parameter: Organism Value: A. thaliana
  misc_feature: MA Experiment 20000171 PARAMETER Experiment Name: At_42deg_Heat_P Parameter: Plant Line Value: WS
  misc_feature: MA Experiment 20000171 PARAMETER Experiment Name: At_42deg_Heat_P Parameter: Temperature (deg C) Value: 42 vs. 22
  misc_feature: MA Experiment 20000171 PARAMETER Experiment Name: At_42deg_Heat_P Parameter: Timepoint (hr) Value: 1
  misc_feature: MA Experiment 20000171 PARAMETER Experiment Name: At_42deg_Heat_P Parameter: Tissue Value: Aerial
  misc_feature: MA Experiment ID: 20000184 Result: Down-regulated in Transcription
  misc_feature: MA Experiment 20000184 PARAMETER Experiment Name: At_Shoots__P Parameter: Age (day) Value: 7
  misc_feature: MA Experiment 20000184 PARAMETER Experiment Name: At_Shoots__P Parameter: Tissue Value: Shoots vs. Whole Plant
  misc_feature: MA Experiment ID: 20000234 Result: Down-regulated in Transcription
  misc_feature: MA Experiment 20000234 PARAMETER Experiment Name: At_Siliques_P Parameter: Age (day) Value: 21
  misc_feature: MA Experiment 20000234 PARAMETER Experiment Name: At_Siliques_P Parameter: Organism Value: A. thaliana
  misc_feature: MA Experiment 20000234 PARAMETER Experiment Name: At_Siliques_P Parameter: Plant Line Value: WS
  misc_feature: MA Experiment 20000234 PARAMETER Experiment Name: At_Siliques_P Parameter: Tissue Value: Less Than 5mm Siliques vs. Whole Plant
  misc_feature: MA Experiment ID: 20000235 Result: Down-regulated in Transcription
  misc_feature: MA Experiment 20000235 PARAMETER Experiment Name: At_Siliques_P Parameter: Age (day) Value: 21
  misc_feature: MA Experiment 20000235 PARAMETER Experiment Name: At_Siliques_P Parameter: Organism Value: A. thaliana
  misc_feature: MA Experiment 20000235 PARAMETER Experiment Name: At_Siliques_P Parameter: Plant Line Value: WS
  misc_feature: MA Experiment 20000235 PARAMETER Experiment Name: At_Siliques_P Parameter: Tissue Value: 5-10mm Siliques vs. Whole Plant
  misc_feature: MA Experiment ID: 20000264 Result: Down-regulated in Transcription
  misc_feature: MA Experiment 20000264 PARAMETER Experiment Name: At_Open_Flower_P Parameter: Age (day) Value: 21
  misc_feature: MA Experiment 20000264 PARAMETER Experiment Name: At_Open_Flower_P Parameter: Plant Line Value: WS
  misc_feature: MA Experiment 20000264 PARAMETER Experiment Name: At_Open_Flower_P Parameter: Tissue Value: Open Flower vs. Whole Plant
  misc_feature: MA Experiment ID: 20000265 Result: Down-regulated in Transcription
  misc_feature: MA Experiment 20000265 PARAMETER Experiment Name: At_Open_Flower_P Parameter: Age (day) Value: 21
  misc_feature: MA Experiment 20000265 PARAMETER Experiment Name: At_Open_Flower_P Parameter: Plant Line Value: WS
  misc_feature: MA Experiment 20000265 PARAMETER Experiment Name: At_Open_Flower_P Parameter: Tissue Value: Closed Flower vs. Whole Plant
  misc_feature: MA Experiment ID: 20000268 Result: Down-regulated in Transcription
  misc_feature: MA Experiment 20000268 PARAMETER Experiment Name: At_100mM_NaCl__P Parameter: Age (day) Value: 14
  misc_feature: MA Experiment 20000268 PARAMETER Experiment Name: At_100mM_NaCl__P Parameter: Organism Value: A. thaliana
  misc_feature: MA Experiment 20000268 PARAMETER Experiment Name: At_100mM_NaCl__P Parameter: Plant Line Value: WS
  misc_feature: MA Experiment 20000268 PARAMETER Experiment Name: At_100mM_NaCl__P Parameter: Timepoint (hr) Value: 6
  misc_feature: MA Experiment 20000268 PARAMETER Experiment Name: At_100mM_NaCl__P Parameter: Tissue Value: Whole Plant
  misc_feature: MA Experiment 20000268 PARAMETER Experiment Name: At_100mM_NaCl__P Parameter: Treatment Value: 100mM NaCl vs. No Treatment
  misc_feature: MA Experiment ID: 20000437 Result: Down-regulated in Transcription
  misc_feature: MA Experiment 20000437 PARAMETER Experiment Name: At_Drought_P Parameter: Age (day) Value: 8
  misc_feature: MA Experiment 20000437 PARAMETER Experiment Name: At_Drought_P Parameter: Organism Value: A. thaliana
  misc_feature: MA Experiment 20000437 PARAMETER Experiment Name: At_Drought_P Parameter: Plant Line Value: WS
  misc_feature: MA Experiment 20000437 PARAMETER Experiment Name: At_Drought_P Parameter: Timepoint (hr) Value: 24
  misc_feature: MA Experiment 20000437 PARAMETER Experiment Name: At_Drought_P Parameter: Tissue Value: Whole Plant
  misc_feature: MA Experiment 20000437 PARAMETER Experiment Name: At_Drought_P Parameter: Treatment Value: Drought vs. No Drought
  misc_feature: MA Experiment ID: 20000439 Result: Down-regulated in Transcription
  misc_feature: MA Experiment 20000439 PARAMETER Experiment Name: At_Roots__P Parameter: Age (day) Value: 14 vs. 21
  misc_feature: MA Experiment 20000439 PARAMETER Experiment Name: At_Roots__P Parameter: Organism Value: A. thaliana
  misc_feature: MA Experiment 20000439 PARAMETER Experiment Name: At_Roots__P Parameter: Tissue Value: Roots vs. Whole Plant
  misc_feature: MA Experiment ID: 20001247 Result: Up-regulated in Transcription
  misc_feature: MA Experiment 20001247 PARAMETER Experiment Name: At_Far-red-induction_P Parameter: Age (day) Value: 7
  misc_feature: MA Experiment 20001247 PARAMETER Experiment Name: At_Far-red-induction_P Parameter: Light Value: Far-red vs. White
  misc_feature: MA Experiment 20001247 PARAMETER Experiment Name: At_Far-red-induction_P Parameter: Organism Value: A. thaliana
  misc_feature: MA Experiment 20001247 PARAMETER Experiment Name: At_Far-red-induction_P Parameter: Plant Line Value: Columbia
  misc_feature: MA Experiment 20001247 PARAMETER Experiment Name: At_Far-red-induction_P Parameter: Timepoint (hr) Value: 1
  misc_feature: MA Experiment 20001247 PARAMETER Experiment Name: At_Far-red-induction_P Parameter: Tissue Value: Whole Plant
  misc_feature: MA Experiment ID: 20001248 Result: Up-regulated in Transcription
  misc_feature: MA Experiment 20001248 PARAMETER Experiment Name: At_Far-red-induction_P Parameter: Age (day) Value: 7
  misc_feature: MA Experiment 20001248 PARAMETER Experiment Name: At_Far-red-induction_P Parameter: Light Value: Far-red vs. White
  misc_feature: MA Experiment 20001248 PARAMETER Experiment Name: At_Far-red-induction_P Parameter: Organism Value: A. thaliana
  misc_feature: MA Experiment 20001248 PARAMETER Experiment Name: At_Far-red-induction_P Parameter: Plant Line Value: Columbia
  misc_feature: MA Experiment 20001248 PARAMETER Experiment Name: At_Far-red-induction_P Parameter: Timepoint (hr) Value: 4
  misc_feature: MA Experiment 20001248 PARAMETER Experiment Name: At_Far-red-induction_P Parameter: Tissue Value: Whole Plant
  misc_feature: MA Experiment ID: 20001450 Result: Up-regulated in Transcription
  misc_feature: MA Experiment 20001450 PARAMETER Experiment Name: At_Far-red-induction_P Parameter: Age (day) Value: 7
  misc_feature: MA Experiment 20001450 PARAMETER Experiment Name: At_Far-red-induction_P Parameter: Light Value: Far-red vs. White
  misc_feature: MA Experiment 20001450 PARAMETER Experiment Name: At_Far-red-induction_P Parameter: Organism Value: A. thaliana
  misc_feature: MA Experiment 20001450 PARAMETER Experiment Name: At_Far-red-induction_P Parameter: Plant Line Value: Columbia
  misc_feature: MA Experiment 20001450 PARAMETER Experiment Name: At_Far-red-induction_P Parameter: Timepoint (hr) Value: 8
  misc_feature: MA Experiment 20001450 PARAMETER Experiment Name: At_Far-red-induction_P Parameter: Tissue Value: Whole Plant
  misc_feature: MA Experiment ID: 20001451 Result: Up-regulated in Transcription
  misc_feature: MA Experiment 20001451 PARAMETER Experiment Name: At_Far-red-induction_P Parameter: Age (day) Value: 7
  misc_feature: MA Experiment 20001451 PARAMETER Experiment Name: At_Far-red-induction_P Parameter: Light Value: Far-red vs. White
  misc_feature: MA Experiment 20001451 PARAMETER Experiment Name: At_Far-red-induction_P Parameter: Organism Value: A. thaliana
  misc_feature: MA Experiment 20001451 PARAMETER Experiment Name: At_Far-red-induction_P Parameter: Plant Line Value: Columbia
  misc_feature: MA Experiment 20001451 PARAMETER Experiment Name: At_Far-red-induction_P Parameter: Timepoint (hr) Value: 24
  misc_feature: MA Experiment 20001451 PARAMETER Experiment Name: At_Far-red-induction_P Parameter: Tissue Value: Whole Plant
  misc_feature: MA Experiment ID: 20001554 Result: Down-regulated in Transcription
  misc_feature: MA Experiment 20001554 PARAMETER Experiment Name: At_Drought_Soil_Dry_P Parameter: Age (day) Value: 21
  misc_feature: MA Experiment 20001554 PARAMETER Experiment Name: At_Drought_Soil_Dry_P Parameter: Organism Value: A. thaliana
  misc_feature: MA Experiment 20001554 PARAMETER Experiment Name: At_Drought_Soil_Dry_P Parameter: Plant Line Value: WS
  misc_feature: MA Experiment 20001554 PARAMETER Experiment Name: At_Drought_Soil_Dry_P Parameter: Post Timepoint (hr) Value: None
  misc_feature: MA Experiment 20001554 PARAMETER Experiment Name: At_Drought_Soil_Dry_P Parameter: Post-Treatment Value: None
  misc_feature: MA Experiment 20001554 PARAMETER Experiment Name: At_Drought_Soil_Dry_P Parameter: Timepoint (day) Value: 7
  misc_feature: MA Experiment 20001554 PARAMETER Experiment Name: At_Drought_Soil_Dry_P Parameter: Treatment Value: Drought vs. No Drought
  misc_feature: MA Experiment ID: 20001556 Result: Down-regulated in Transcription
  misc_feature: MA Experiment 20001556 PARAMETER Experiment Name: At_Drought_Soil_Dry_P Parameter: Age (day) Value: 26
  misc_feature: MA Experiment 20001556 PARAMETER Experiment Name: At_Drought_Soil_Dry_P Parameter: Organism Value: A. thaliana
  misc_feature: MA Experiment 20001556 PARAMETER Experiment Name: At_Drought_Soil_Dry_P Parameter: Plant Line Value: WS
  misc_feature: MA Experiment 20001556 PARAMETER Experiment Name: At_Drought_Soil_Dry_P Parameter: Post Timepoint (hr) Value: None
  misc_feature: MA Experiment 20001556 PARAMETER Experiment Name: At_Drought_Soil_Dry_P Parameter: Post-Treatment Value: None
  misc_feature: MA Experiment 20001556 PARAMETER Experiment Name: At_Drought_Soil_Dry_P Parameter: Timepoint (day) Value: 12
  misc_feature: MA Experiment 20001556 PARAMETER Experiment Name: At_Drought_Soil_Dry_P Parameter: Treatment Value: Drought vs. No Drought
  misc_feature: MA Experiment ID: 20001904 Result: Down-regulated in Transcription
  misc_feature: MA Experiment 20001904 PARAMETER Experiment Name: At_Drought_Reproduction_P Parameter: Age (day) Value: 37
  misc_feature: MA Experiment 20001904 PARAMETER Experiment Name: At_Drought_Reproduction_P Parameter: Organism Value: A. thaliana
  misc_feature: MA Experiment 20001904 PARAMETER Experiment Name: At_Drought_Reproduction_P Parameter: Plant Line Value: WS
  misc_feature: MA Experiment 20001904 PARAMETER Experiment Name: At_Drought_Reproduction_P Parameter: Timepoint (day) Value: 7
  misc_feature: MA Experiment 20001904 PARAMETER Experiment Name: At_Drought_Reproduction_P Parameter: Tissue Value: Rosettes
  misc_feature: MA Experiment 20001904 PARAMETER Experiment Name: At_Drought_Reproduction_P Parameter: Treatment Value: Drought vs. No Drought
aaaaaccccacgattctcaaccaatagccactcctgcatctatctctctccttgtgaatgtgaacacaaaaggacaagaagagaaagttgagagttttcttttgattttcgcttgtctggattcgaaccgaatcgccattgttgttgttaccaatattcttctctcttcgtcttcttttgtctgaaaaaaatccaaacattatttcagtttctccattggaaaagcgcaacaaaacatccatccacgagtgtttcctcgtttccttgacacatgtttttcgcatcattcattcattcttcatcattttaaactaaaagaaacgaaactgacctaccaagcaaagttcctctacttgcttcatcttcattcgtcatgatttccctctttttttactttaccaatttcttgaattcttaaacccaaagacaaagcctttcgatttcctatagatactttcagatgtctaagaactcaaacgttgaagagaatggaggagcaaagccaatctgtgaagctttgaggagattcaaaaggtcgaggcttgtgttcgagccgtctttaggagtgttggggtttttcttggttggggtctgtttggtttgcagttttttcttctttgattacagaagcgttgctaaaagctatggcctttcggataaatctgagagattcgtttggctcaagtttgacaatatcagcagcagcagcagtagtagtagtaatagttcaaagagagttgggtttctggaagagagtggaagtgggtgtgatgtgttcgatggagattgggtttgggacgagtcttatccattgtatcaatccaaagattgcagatttctcgatgaagggtttaggtgtagtgactttggaaggtctgatttgttctatactcagtggcgttggcaacctagacactgtaatttgcccagatttgatgcaaaactgatgctggagaaactccgggacaagcggcttgtgtttgttggcgattcaataggaagaaaccagtgggagtctctactttgtctactatcttctgcagtcaagaacgagagcttgatttatgaaataaatggaagtccgatcacaaagcacaaagggttcttggtgttcaaatttgaggagtacaattgcacagtggagtactacagatctccatttttggttcctcaaagcagaccaccgattggatcacctggaaaggtcaagacaagtttgaaactggacactatggattggacttcaagcaaatggagagatgctgacgttttagtgctcaatactggacactggtggaacgaggggaaaactactagaacgggatgttactttcaagaaggagaagaagtaaaattgaagatgaatgtagatgatgcttataagcgagctctgaataccgttgtgaaatggatacataccgagctcgattcaaacaaaactcaagtcttctttcgcactttcgcccccgtgcatttcaggtttgtacggtattactcttgataaagactcaatcgtttgtaatattcagttgcttgattaggtttaggtcttatgatgtagaatgttctgcatttagtttcaatatatcttcgtcgttgtatgtatgaaacaggggaggagattggaaaacaggaggaacatgtcatatggagacattaccagagattggaacctcattggcttcatcagagacctgggaacagttaaagatcctcagagatgtgttgtcacataactcaaacagatcagagactgttaaagtgaaactgttgaacataacggcaatggctgctcaaagaaaagatggtcacccatcactctactatctcggtccgcatggtcctgcaccgcttcatcgccaagactgtagccactggtgccttcccggtgttcctgacacgtggaacgagctcttctatgcattatttatgaaacaagaagctccttcttcttctaaaagagttgaagaagcgaacagtacaggaaatgttacaatgtcgtgatgcctggacaggacaaggaaaccacaacaagctcttgtttcttaaagctgttggcgtttttcttaagatgccaagcttaaagatcaaaaagggttctggattttttgattgggtgattagattaattgggtgggggaatatatgtaattaggttggtaatcttaatctctggttgtaaagataaaaaaaaatcttaaaattatttttcgatgatt

SEQ ID NO: 95799 - protein, 346 aa, Arabidopsis thaliana
  peptide (1)..(346): Ceres Seq. ID no. 12730463
  misc_feature (278)..(340): Pfam Name: Arabidopsis proteins of unknown function Pfam Description: Arabidopsis proteins of unknown function
  misc_feature (1)..(340): Homolog of NCBI NO: 6862912 NR Description: unknown protein [Arabidopsis thaliana]
  misc_feature (1)..(346): Homolog of NCBI NO: 18397465 NR Description: expressed protein; protein id: At3g06080.1, by cDNA: gi_16648934 [Arabidopsis thaliana]
  misc_feature (1)..(340): Homolog of NCBI NO: 15239660 NR Description: putative protein; protein id: At5g19160.1
  misc_feature (57)..(340): Homolog of NCBI NO: 23617116 NR Description: leaf senescence related protein-like [Oryza
  misc_feature (90)..(340): Homolog of NCBI NO: 9759321 NR Description: gb|AAF00670.1~gene_id:MBL20.11~strong similarity
  misc_feature (90)..(340): Homolog of NCBI NO: 18415139 NR Description: putative protein; protein id: At5g06230.1, by cDNA: gi_13605530 [Arabidopsis thaliana] AT5g06230/MBL20_11 [Arabidopsis thaliana]
  misc_feature (103)..(340): Homolog of NCBI NO: 15229797 NR Description: hypothetical protein; protein id: At3g11570.1
  misc_feature (74)..(339): Homolog of NCBI NO: 15228743 NR Description: putative protein; protein id: At3g62390.1, by cDNA: 126100. [Arabidopsis thaliana] >gi|11357988|pir||T48031
  misc_feature (57)..(340): Homolog of NCBI NO: 22330347 NR Description: hypothetical protein; protein id: At1g60790.1, by cDNA: gi_17979148 [Arabidopsis thaliana] unknown protein [Arabidopsis thaliana]
  misc_feature (103)..(339): Homolog of NCBI NO: 15221991 NR Description: hypothetical protein; protein id: At1g48880.1
MSKNSNVEENGGAKPICEALRRFKRSRLVFEPSLGVLGFFLVGVCLVCSFFFFDYRSVAKSYGLSDKSERFVWLKFDNISSSSSSSSNSSKRVGFLEESGSGCDVFDGDWVWDESYPLYQSKDCRFLDEGFRCSDFGRSDLFYTQWRWQPRHCNLPRFDAKLMLEKLRDKRLVFVGDSIGRNQWESLLCLLSSAVKNESLIYEINGSPITKHKGFLVFKFEEYNCTVEYYRSPFLVPQSRPPIGSPGKVKTSLKLDTMDWTSSKWRDADVLVLNTGHWWNEGKTTRTGCYFQEGEEVKLKMNVDDAYKRALNTVVKWIHTELDSNKTQVFFRTFAPVHFRFVRYYS

SEQ ID NO: 95800 - protein, 184 aa, Arabidopsis thaliana
  peptide (1)..(184): Ceres Seq. ID no. 12730464
  misc_feature (116)..(178): Pfam Name: Arabidopsis proteins of unknown function Pfam Description: Arabidopsis proteins of unknown function
  misc_feature (1)..(178): Homolog of NCBI NO: 6862912 NR Description: unknown protein [Arabidopsis thaliana]
  misc_feature (1)..(184): Homolog of NCBI NO: 18397465 NR Description: expressed protein; protein id: At3g06080.1, by cDNA: gi_16648934 [Arabidopsis thaliana]
  misc_feature (1)..(178): Homolog of NCBI NO: 15239660 NR Description: putative protein; protein id: At5g19160.1
  misc_feature (1)..(178): Homolog of NCBI NO: 23617116 NR Description: leaf senescence related protein-like [Oryza
  misc_feature (1)..(178): Homolog of NCBI NO: 9759321 NR Description: gb|AAF00670.1~gene_id:MBL20.11~strong similarity
  misc_feature (1)..(178): Homolog of NCBI NO: 18415139 NR Description: putative protein; protein id: At5g06230.1, by cDNA: gi_13605530 [Arabidopsis thaliana] AT5g06230/MBL20_11 [Arabidopsis thaliana]
  misc_feature (1)..(178): Homolog of NCBI NO: 15229797 NR Description: hypothetical protein; protein id: At3g11570.1
  misc_feature (1)..(177): Homolog of NCBI NO: 15228743 NR Description: putative protein; protein id: At3g62390.1, by cDNA: 126100. [Arabidopsis thaliana] >gi|11357988|pir||T48031
  misc_feature (1)..(178): Homolog of NCBI NO: 22330347 NR Description: hypothetical protein; protein id: At1g60790.1, by cDNA: gi_17979148 [Arabidopsis thaliana] unknown protein [Arabidopsis thaliana]
  misc_feature (1)..(177): Homolog of NCBI NO: 15221991 NR Description: hypothetical protein; protein id: At1g48880.1
MLEKLRDKRLVFVGDSIGRNQWESLLCLLSSAVKNESLIYEINGSPITKHKGFLVFKFEEYNCTVEYYRSPFLVPQSRPPIGSPGKVKTSLKLDTMDWTSSKWRDADVLVLNTGHWWNEGKTTRTGCYFQEGEEVKLKMNVDDAYKRALNTVVKWIHTELDSNKTQVFFRTFAPVHFRFVRYYS

SEQ ID NO: 95801 - DNA, 827 bp, Arabidopsis thaliana
  misc_feature (1)..(827): Ceres Seq. ID no. 12730465
  misc_feature: MA Experiment ID: 20000436 Result: Down-regulated in Transcription
  misc_feature: MA Experiment 20000436 PARAMETER Experiment Name: At_Drought_P Parameter: Age (day) Value: 7
  misc_feature: MA Experiment 20000436 PARAMETER Experiment Name: At_Drought_P Parameter: Organism Value: A. thaliana
  misc_feature: MA Experiment 20000436 PARAMETER Experiment Name: At_Drought_P Parameter: Plant Line Value: WS
  misc_feature: MA Experiment 20000436 PARAMETER Experiment Name: At_Drought_P Parameter: Timepoint (hr) Value: 12
  misc_feature: MA Experiment 20000436 PARAMETER Experiment Name: At_Drought_P Parameter: Tissue Value: Whole Plant
  misc_feature: MA Experiment 20000436 PARAMETER Experiment Name: At_Drought_P Parameter: Treatment Value: Drought vs. No Drought
atgtctcacatcgctgttgaaaggaatcgaagaaggcaaatgaacgagcatcttaaatcccttcgttctttgactccttgtttctacatcaaaaggggagatcaagcttcgatcatcggaggagtgatagagttcatcaaagagttgcagcaattggttcaagttcttgagtccaagaaacgtcgaaagaccctaaaccgaccatctttcccttatgatcaccagacaatcgagccatccagtttaggagccgccactacccgagtaccgtttagtcgaatcgaaaatgtgatgaccacaagtactttcaaggaagtaggagcatgctgtaactcccctcatgctaacgtagaagcaaagatttcaggttctaatgttgtattgagagttgtctctaggcgaatcgtggggcagctcgtaaagatcatctctgtcttagagaagctatcttttcaagttcttcacctcaatattagtagcatggaggagactgtcttatactttttcgttgttaagataggattggagtgtcacttaagcttggaggagctaactcttgaagttcagaaaagctttgtgtctgatgaagtgatcgtctctaccaattaaaaacaaaattctacatgtactagagcgtgtatcgttttttgggattaataatcatataatcgttacatgagccttgatactttgctagaaataagctcctctaaacaaaaccttctttttaaaaaaacacacttatgttttacttagtttgttgttgtatccgaagttgatcaacgttgtaatttcccacaataaatcatgacaccccttatatgcgg

SEQ ID NO: 95802 - protein, 202 aa, Arabidopsis thaliana
  peptide (1)..(202): Ceres Seq. ID no. 12730466
  misc_feature (1)..(50): Pfam Name: Helix-loop-helix DNA-binding domain Pfam Description: Helix-loop-helix DNA-binding domain
  misc_feature (1)..(202): Homolog of NCBI NO: 15230639 NR Description: putative helix-loop-helix DNA-binding protein; id: At3g06120.1 [Arabidopsis thaliana]
  misc_feature (1)..(192): Homolog of NCBI NO: 15238680 NR Description: bHLH protein; protein id: At5g53210.1
  misc_feature (1)..(192): Homolog of NCBI NO: 30687365 NR Description: bHLH protein family [Arabidopsis thaliana]
  misc_feature (1)..(175): Homolog of NCBI NO: 11994233 NR Description: contains similarity to helix-loop-helix
  misc_feature (1)..(200): Homolog of NCBI NO: 15234187 NR Description: bHLH protein; protein id: At4g01460.1, supported cDNA: gi_20127053, supported by cDNA: gi_20466627 [Arabidopsis
  misc_feature (117)..(192): Homolog of NCBI NO: 30695519 NR Description: bHLH protein family [Arabidopsis thaliana] putative bHLH transcription factor bHLH067 [Arabidopsis thaliana]
  misc_feature (1)..(61): Homolog of NCBI NO: 30695519 NR Description: bHLH protein family [Arabidopsis thaliana] putative bHLH transcription factor bHLH067 [Arabidopsis thaliana]
  misc_feature (117)..(192): Homolog of NCBI NO: 18412203 NR Description: putative protein; protein id: At3g61950.1,
  misc_feature (117)..(192): Homolog of NCBI NO: 21618009 NR Description: unknown [Arabidopsis thaliana]
  misc_feature (1)..(61): Homolog of NCBI NO: 18412203 NR Description: putative protein; protein id: At3g61950.1,
MSHIAVERNRRRQMNEHLKSLRSLTPCFYIKRGDQASIIGGVIEFIKELQQLVQVLESKKRRKTLNRPSFPYDHQTIEPSSLGAATTRVPFSRIENVMTTSTFKEVGACCNSPHANVEAKISGSNVVLRVVSRRIVGQLVKIISVLEKLSFQVLHLNISSMEETVLYFFVVKIGLECHLSLEELTLEVQKSFVSDEVIVSTN

SEQ ID NO: 95803 - protein, 189 aa, Arabidopsis thaliana
  peptide (1)..(189): Ceres Seq. ID no. 12730467
  misc_feature (1)..(37): Pfam Name: Helix-loop-helix DNA-binding domain Pfam Description: Helix-loop-helix DNA-binding domain
  misc_feature (1)..(189): Homolog of NCBI NO: 15230639 NR Description: putative helix-loop-helix DNA-binding protein; id: At3g06120.1 [Arabidopsis thaliana]
  misc_feature (1)..(179): Homolog of NCBI NO: 15238680 NR Description: bHLH protein; protein id: At5g53210.1
  misc_feature (1)..(179): Homolog of NCBI NO: 30687365 NR Description: bHLH protein family [Arabidopsis thaliana]
  misc_feature (1)..(162): Homolog of NCBI NO: 11994233 NR Description: contains similarity to helix-loop-helix
  misc_feature (1)..(187): Homolog of NCBI NO: 15234187 NR Description: bHLH protein; protein id: At4g01460.1, supported cDNA: gi_20127053, supported by cDNA: gi_20466627 [Arabidopsis
  misc_feature (104)..(179): Homolog of NCBI NO: 30695519 NR Description: bHLH protein family [Arabidopsis thaliana] putative bHLH transcription factor bHLH067 [Arabidopsis thaliana]
  misc_feature (1)..(48): Homolog of NCBI NO: 30695519 NR Description: bHLH protein family [Arabidopsis thaliana] putative bHLH transcription factor bHLH067 [Arabidopsis thaliana]
  misc_feature (104)..(179): Homolog of NCBI NO: 18412203 NR Description: putative protein; protein id: At3g61950.1,
  misc_feature (104)..(179): Homolog of NCBI NO: 21618009 NR Description: unknown [Arabidopsis thaliana]
  misc_feature (1)..(48): Homolog of NCBI NO: 18412203 NR Description: putative protein; protein id: At3g61950.1,
MNEHLKSLRSLTPCFYIKRGDQASIIGGVIEFIKELQQLVQVLESKKRRKTLNRPSFPYDHQTIEPSSLGAATTRVPFSRIENVMTTSTFKEVGACCNSPHANVEAKISGSNVVLRVVSRRIVGQLVKIISVLEKLSFQVLHLNISSMEETVLYFFVVKIGLECHLSLEELTLEVQKSFVSDEVIVSTN

SEQ ID NO: 95804 - protein, 105 aa, Arabidopsis thaliana
  peptide (1)..(105): Ceres Seq. ID no. 12730468
  misc_feature (1)..(105): Homolog of NCBI NO: 15230639 NR Description: putative helix-loop-helix DNA-binding protein; id: At3g06120.1 [Arabidopsis thaliana]
  misc_feature (1)..(95): Homolog of NCBI NO: 15238680 NR Description: bHLH protein; protein id: At5g53210.1
  misc_feature (1)..(95): Homolog of NCBI NO: 30687365 NR Description: bHLH protein family [Arabidopsis thaliana]
  misc_feature (1)..(78): Homolog of NCBI NO: 11994233 NR Description: contains similarity to helix-loop-helix
  misc_feature (1)..(103): Homolog of NCBI NO: 15234187 NR Description: bHLH protein; protein id: At4g01460.1, supported cDNA: gi_20127053, supported by cDNA: gi_20466627 [Arabidopsis
  misc_feature (20)..(95): Homolog of NCBI NO: 30695519 NR Description: bHLH protein family [Arabidopsis thaliana] putative bHLH transcription factor bHLH067 [Arabidopsis thaliana]
  misc_feature (20)..(95): Homolog of NCBI NO: 18412203 NR Description: putative protein; protein id: At3g61950.1,
  misc_feature (20)..(95): Homolog of NCBI NO: 21618009 NR Description: unknown [Arabidopsis thaliana]
  misc_feature (20)..(95): Homolog of NCBI NO: 11282339 NR Description: hypothetical protein F21F14.120 - Arabidopsis >gi|6899893|emb|CAB71902.1| putative protein [Arabidopsis
  misc_feature (18)..(75): Homolog of NCBI NO: 38346722 NR Description: OSJNBa0086O06.20 [Oryza sativa (japonica
MTTSTFKEVGACCNSPHANVEAKISGSNVVLRVVSRRIVGQLVKIISVLEKLSFQVLHLNISSMEETVLYFFVVKIGLECHLSLEELTLEVQKSFVSDEVIVSTN

SEQ ID NO: 95805 - DNA, 882 bp, Arabidopsis thaliana
  misc_feature (1)..(882): Ceres Seq. ID no. 12730484
  misc_feature: MA Experiment ID: 20000171 Result: Up-regulated in Transcription
  misc_feature: MA Experiment 20000171 PARAMETER Experiment Name: At_42deg_Heat_P Parameter: Age (day) Value: 14
  misc_feature: MA Experiment 20000171 PARAMETER Experiment Name: At_42deg_Heat_P Parameter: Organism Value: A. thaliana
  misc_feature: MA Experiment 20000171 PARAMETER Experiment Name: At_42deg_Heat_P Parameter: Plant Line Value: WS
  misc_feature: MA Experiment 20000171 PARAMETER Experiment Name: At_42deg_Heat_P Parameter: Temperature (deg C) Value: 42 vs. 22
  misc_feature: MA Experiment 20000171 PARAMETER Experiment Name: At_42deg_Heat_P Parameter: Timepoint (hr) Value: 1
  misc_feature: MA Experiment 20000171 PARAMETER Experiment Name: At_42deg_Heat_P Parameter: Tissue Value: Aerial
  misc_feature: MA Experiment ID: 20000173 Result: Up-regulated in Transcription
  misc_feature: MA Experiment 20000173 PARAMETER Experiment Name: At_42deg_Heat_P Parameter: Age (day) Value: 14
  misc_feature: MA Experiment 20000173 PARAMETER Experiment Name: At_42deg_Heat_P Parameter: Organism Value: A. thaliana
  misc_feature: MA Experiment 20000173 PARAMETER Experiment Name: At_42deg_Heat_P Parameter: Plant Line Value: WS
  misc_feature: MA Experiment 20000173 PARAMETER Experiment Name: At_42deg_Heat_P Parameter: Temperature (deg C) Value: 42 vs. 22
  misc_feature: MA Experiment 20000173 PARAMETER Experiment Name: At_42deg_Heat_P Parameter: Timepoint (hr) Value: 6
  misc_feature: MA Experiment 20000173 PARAMETER Experiment Name: At_42deg_Heat_P Parameter: Tissue Value: Aerial
atggttatggttagagataatcaattccttaacctcaaactgtctcctatacaagctcctactactatccccccttgccgcttccccatcatacccgctacaaaagtctctgcaacagtttcttcctgcgcaagcaacactttttctgtagctaatttggacagaatcagtgttcttggcagtggaaacggaggaaccgtattcaaagttaaggacaagacaacctcagagatctacgcgttgaagaaagtgaaagaaaactgggattctacttccctccgtgagatcgaaatccttcgcatggtcaactctccttacgtcgcaaagtgtcacgacatcttccagaatccttccggagaagtatctattctaatggattacatggatcttggctcgctcgagtctctacgcggggttacagaaaaacaactcgctttgatgtctcgtcaagttttggaaggaaaaaattacttgcacgagcacaagatcgttcatagagacatcaagccagcgaatctgctacgtagctcaaaagaagaagtcaagatcgcagactttggagtgagcaagatcgtggtcaggtctttaaacaagtgcaactcgttcgtaggcacgttcgcatacatgagtcctgaaagactcgatagtgaagctgatggtgttacagaagaagacaaatcaaacgtttacgccggagatatatggagttttgggcttacgatgctcgagatcttggtgggttactacccgatgctaccagaccaagccgcgatagtatgtgcagtttgttttggagaaccaccaaaagcccccgaagaatgctctgacgatttgaagagtttcatggactgctgtttacgcaagaaagcaagcgagagatag

SEQ ID NO: 95806 - protein, 293 aa, Arabidopsis thaliana
  peptide (1)..(293): Ceres Seq. ID no. 12730485
  misc_feature (53)..(293): Pfam Name: Protein kinase domain Pfam Description: Protein kinase domain
  misc_feature (1)..(293): Homolog of NCBI NO: 15230671 NR Description: putative MAP kinase; protein id: At3g06230.1 thaliana] >gi|6862927|gb|AAF30316.1|AC018907_16 putative MAP
  misc_feature (1)..(293): Homolog of NCBI NO: 15219482 NR Description: MAP kinase, putative; protein id: At1g73500.1, by cDNA: 112118. [Arabidopsis thaliana] >gi|25287619|pir||G96761
  misc_feature (1)..(293): Homolog of NCBI NO: 15221060 NR Description: MAP kinase kinase 5, putative; protein id: [Arabidopsis thaliana] >gi|6714299|gb|AAF25995.1|AC013354_14
  misc_feature (17)..(293): Homolog of NCBI NO: 33563103 NR Description: mitogen-activated protein kinase kinase [Solanum
  misc_feature (16)..(293): Homolog of NCBI NO: 15232491 NR Description: MAP kinase kinase 5; protein id: At3g21220.1, by cDNA: gi_19698850, supported by cDNA: gi_3219272 [Arabidopsis
  misc_feature (16)..(293): Homolog of NCBI NO: 19698851 NR Description: MAP kinase kinase 5 [Arabidopsis thaliana]
  misc_feature (16)..(293): Homolog of NCBI NO: 25287595 NR Description: mitogen-activated protein kinase kinase (EC
  misc_feature (39)..(293): Homolog of NCBI NO: 15217998 NR Description: MAP kinase kinase 4 (ATMKK4); protein id: supported by cDNA: gi_11908061, supported by cDNA: gi_13194803, by cDNA: gi_13265419, supported by cDNA: gi_14030614, supported
  misc_feature (10)..(293): Homolog of NCBI NO: 12484128 NR Description: mitogen-activated protein kinase 2 [Nicotiana
  misc_feature (42)..(293): Homolog of NCBI NO: 14719279 NR Description: MAP kinase kinase [Zea mays]
MVMVRDNQFLNLKLSPIQAPTTIPPCRFPIIPATKVSATVSSCASNTFSVANLDRISVLGSGNGGTVFKVKDKTTSEIYALKKVKENWDSTSLREIEILRMVNSPYVAKCHDIFQNPSGEVSILMDYMDLGSLESLRGVTEKQLALMSRQVLEGKNYLHEHKIVHRDIKPANLLRSSKEEVKIADFGVSKIVVRSLNKCNSFVGTFAYMSPERLDSEADGVTEEDKSNVYAGDIWSFGLTMLEILVGYYPMLPDQAAIVCAVCFGEPPKAPEECSDDLKSFMDCCLRKKASER

SEQ ID NO: 95807 - protein, 291 aa, Arabidopsis thaliana
  peptide (1)..(291): Ceres Seq. ID no. 12730486
  misc_feature (51)..(291): Pfam Name: Protein kinase domain Pfam Description: Protein kinase domain
  misc_feature (1)..(291): Homolog of NCBI NO: 15230671 NR Description: putative MAP kinase; protein id: At3g06230.1 thaliana] >gi|6862927|gb|AAF30316.1|AC018907_16 putative MAP
  misc_feature (1)..(291): Homolog of NCBI NO: 15219482 NR Description: MAP kinase, putative; protein id: At1g73500.1, by cDNA: 112118. [Arabidopsis thaliana] >gi|25287619|pir||G96761
  misc_feature (1)..(291): Homolog of NCBI NO: 15221060 NR Description: MAP kinase kinase 5, putative; protein id: [Arabidopsis thaliana] >gi|6714299|gb|AAF25995.1|AC013354_14
  misc_feature (15)..(291): Homolog of NCBI NO: 33563103 NR Description: mitogen-activated protein kinase kinase [Solanum
  misc_feature (14)..(291): Homolog of NCBI NO: 15232491 NR Description: MAP kinase kinase 5; protein id: At3g21220.1, by cDNA: gi_19698850, supported by cDNA: gi_3219272 [Arabidopsis
  misc_feature (14)..(291): Homolog of NCBI NO: 19698851 NR Description: MAP kinase kinase 5 [Arabidopsis thaliana]
  misc_feature (14)..(291): Homolog of NCBI NO: 25287595 NR Description: mitogen-activated protein kinase kinase (EC
  misc_feature (37)..(291): Homolog of NCBI NO: 15217998 NR Description: MAP kinase kinase 4 (ATMKK4); protein id: supported by cDNA: gi_11908061, supported by cDNA: gi_13194803, by cDNA: gi_13265419, supported by cDNA: gi_14030614, supported
  misc_feature (8)..(291): Homolog of NCBI NO: 12484128 NR Description: mitogen-activated protein kinase 2 [Nicotiana
  misc_feature (40)..(291): Homolog of NCBI NO: 14719279 NR Description: MAP kinase kinase [Zea mays]
MVRDNQFLNLKLSPIQAPTTIPPCRFPIIPATKVSATVSSCASNTFSVANLDRISVLGSGNGGTVFKVKDKTTSEIYALKKVKENWDSTSLREIEILRMVNSPYVAKCHDIFQNPSGEVSILMDYMDLGSLESLRGVTEKQLALMSRQVLEGKNYLHEHKIVHRDIKPANLLRSSKEEVKIADFGVSKIVVRSLNKCNSFVGTFAYMSPERLDSEADGVTEEDKSNVYAGDIWSFGLTMLEILVGYYPMLPDQAAIVCAVCFGEPPKAPEECSDDLKSFMDCCLRKKASER

SEQ ID NO: 95808 - protein, 193 aa, Arabidopsis thaliana
  peptide (1)..(193): Ceres Seq. ID no. 12730487
  misc_feature (1)..(193): Pfam Name: Protein kinase domain Pfam Description: Protein kinase domain
  misc_feature (1)..(193): Homolog of NCBI NO: 15230671 NR Description: putative MAP kinase; protein id: At3g06230.1 thaliana] >gi|6862927|gb|AAF30316.1|AC018907_16 putative MAP
  misc_feature (1)..(193): Homolog of NCBI NO: 15219482 NR Description: MAP kinase, putative; protein id: At1g73500.1, by cDNA: 112118. [Arabidopsis thaliana] >gi|25287619|pir||G96761
  misc_feature (1)..(193): Homolog of NCBI NO: 15221060 NR Description: MAP kinase kinase 5, putative; protein id: [Arabidopsis thaliana] >gi|6714299|gb|AAF25995.1|AC013354_14
  misc_feature (1)..(193): Homolog of NCBI NO: 33563103 NR Description: mitogen-activated protein kinase kinase [Solanum
  misc_feature (1)..(193): Homolog of NCBI NO: 15232491 NR Description: MAP kinase kinase 5; protein id: At3g21220.1, by cDNA: gi_19698850, supported by cDNA: gi_3219272 [Arabidopsis
  misc_feature (1)..(193): Homolog of NCBI NO: 19698851 NR Description: MAP kinase kinase 5 [Arabidopsis thaliana]
  misc_feature (1)..(193): Homolog of NCBI NO: 25287595 NR Description: mitogen-activated protein kinase kinase (EC
  misc_feature (1)..(193): Homolog of NCBI NO: 15217998 NR Description: MAP kinase kinase 4 (ATMKK4); protein id: supported by cDNA: gi_11908061, supported by cDNA: gi_13194803, by cDNA: gi_13265419, supported by cDNA: gi_14030614, supported
  misc_feature (1)..(193): Homolog of NCBI NO: 12484128 NR Description: mitogen-activated protein kinase 2 [Nicotiana
  misc_feature (1)..(193): Homolog of NCBI NO: 14719279 NR Description: MAP kinase kinase [Zea mays]
MVNSPYVAKCHDIFQNPSGEVSILMDYMDLGSLESLRGVTEKQLALMSRQVLEGKNYLHEHKIVHRDIKPANLLRSSKEEVKIADFGVSKIVVRSLNKCNSFVGTFAYMSPERLDSEADGVTEEDKSNVYAGDIWSFGLTMLEILVGYYPMLPDQAAIVCAVCFGEPPKAPEECSDDLKSFMDCCLRKKASER

SEQ ID NO: 95809 - DNA, 1143 bp, Arabidopsis thaliana
  misc_feature (1)..(1143): Ceres Seq. ID no. 12730500
  misc_feature: MA Experiment ID: 20000227 Result: Down-regulated in Transcription
  misc_feature: MA Experiment 20000227 PARAMETER Experiment Name: At_Root-Tips-vs-Tops_P Parameter: Tissue Value: Root Tips vs. Root Tops
  misc_feature: MA Experiment ID: 20000234 Result: Down-regulated in Transcription
  misc_feature: MA Experiment 20000234 PARAMETER Experiment Name: At_Siliques_P Parameter: Age (day) Value: 21
  misc_feature: MA Experiment 20000234 PARAMETER Experiment Name: At_Siliques_P Parameter: Organism Value: A. thaliana
  misc_feature: MA Experiment 20000234 PARAMETER Experiment Name: At_Siliques_P Parameter: Plant Line Value: WS
  misc_feature: MA Experiment 20000234 PARAMETER Experiment Name: At_Siliques_P Parameter: Tissue Value: Less Than 5mm Siliques vs. Whole Plant
  misc_feature: MA Experiment ID: 20001248 Result: Up-regulated in Transcription
  misc_feature: MA Experiment 20001248 PARAMETER Experiment Name: At_Far-red-induction_P Parameter: Age (day) Value: 7
  misc_feature: MA Experiment 20001248 PARAMETER Experiment Name: At_Far-red-induction_P Parameter: Light Value: Far-red vs. White
  misc_feature: MA Experiment 20001248 PARAMETER Experiment Name: At_Far-red-induction_P Parameter: Organism Value: A. thaliana
  misc_feature: MA Experiment 20001248 PARAMETER Experiment Name: At_Far-red-induction_P Parameter: Plant Line Value: Columbia
  misc_feature: MA Experiment 20001248 PARAMETER Experiment Name: At_Far-red-induction_P Parameter: Timepoint (hr) Value: 4
  misc_feature: MA Experiment 20001248 PARAMETER Experiment Name: At_Far-red-induction_P Parameter: Tissue Value: Whole Plant
atgacgttccgaagtttactccaggaaatgcggtctaggccacaccgtgtagttcacgccgccgcctcaaccgctaatagttcagaccctttcagctggtcggagctcccggaggagctgcttagagaaatcctgattagggttgagactgttgacggcggcgattggccgtcgcggcgaaacgtggtggcttgtgccggcgtttgtcgtagctggaggattctcaccaaggagattgtagctgttcctgaattctcctctaaattgactttccctatctccctcaagcagtctggtccaagagattctctagttcaatgctttataaaacgtaatcgaaatactcaatcgtatcatctctatctcggattaactacctctttgacggataacgggaagtttcttcttgctgcttctaagctgaagcgcgcaacttgcactgattacatcatctctttgcgttcagacgatatctcaaagagaagcaacgcgtatcttgggagaatgagatcgaacttccttggaacaaaattcacggtctttgatggtagtcagaccggagcagcgaagatgcagaagagccgctcttctaatttcatcaaagtttcacctagagttcctcagggaagttaccccatcgctcacatttcatacgagttaaacgtcttaggctctcggggaccgagaagaatgcgttgcatcatggatacaatacctatgagcatcgtggagtcgcgaggagtagtagcttcaacatccataagctctttttccagtcggtcatcaccagtctttaggtctcactcaaaaccattgcgcagtaatagtgcatcatgtagcgactcaggcaacaacctgggagatccaccattggtgctgagcaacaaagctccacggtggcatgagcagttacgttgctggtgcttaaatttccatggtcgagtcacagtggcttcggttaagaactttcagcttgtggcagttagtgactgtgaagcagggcagacatctgagaggatcatactccagtttgggaaagttgggaaggacatgtttaccatggattatggatatccgatttctgcgtttcaagcgtttgctatctgcctgagcagttttgaaaccagaattgcctgtgaataa

SEQ ID NO: 95810 - protein, 380 aa, Arabidopsis thaliana
  peptide (1)..(380): Ceres Seq. ID no. 12730501
  misc_feature (98)..(380): Pfam Name: Tub family Pfam Description: Tub family
  misc_feature (1)..(380): Homolog of NCBI NO: 15230707 NR Description: F-box containing tubby family protein; protein At3g06380.1 [Arabidopsis thaliana]
  misc_feature (1)..(380): Homolog of NCBI NO: 22326885 NR Description: F-box containing tubby family protein; protein
  misc_feature (11)..(380): Homolog of NCBI NO: 30690823 NR Description: F-box containing tubby family protein thaliana] >gi|18377640|gb|AAL66970.1| putative tubby protein thaliana] >gi|20465543|gb|AAM20254.1| putative tubby protein
  misc_feature (11)..(380): Homolog of NCBI NO: 25409071 NR Description: probable Tub family protein [imported] - thaliana >gi|3738302|gb|AAC63644.1| putative tubby protein thaliana] >gi|20197552|gb|AAM15124.1| putative tubby protein
  misc_feature (11)..(380): Homolog of NCBI NO: 34899264 NR Description: contains ESTs
  misc_feature (33)..(249): Homolog of NCBI NO: 15223772 NR Description: Tub family protein, putative; protein id: [Arabidopsis thaliana] >gi|25406477|pir||H96797 hypothetical
  misc_feature (238)..(329): Homolog of NCBI NO: 15223772 NR Description: Tub family protein, putative; protein id: [Arabidopsis thaliana] >gi|25406477|pir||H96797 hypothetical
  misc_feature (333)..(380): Homolog of NCBI NO: 15223772 NR Description: Tub family protein, putative; protein id: [Arabidopsis thaliana] >gi|25406477|pir||H96797 hypothetical
  misc_feature (29)..(249): Homolog of NCBI NO: 38637048 NR Description: putative chain A, C-terminal domain of mouse
  misc_feature (238)..(339): Homolog of NCBI NO: 38637048 NR Description: putative chain A, C-terminal domain of mouse
MTFRSLLQEMRSRPHRVVHAAASTANSSDPFSWSELPEELLREILIRVETVDGGDWPSRRNVVACAGVCRSWRILTKEIVAVPEFSSKLTFPISLKQSGPRDSLVQCFIKRNRNTQSYHLYLGLTTSLTDNGKFLLAASKLKRATCTDYIISLRSDDISKRSNAYLGRMRSNFLGTKFTVFDGSQTGAAKMQKSRSSNFIKVSPRVPQGSYPIAHISYELNVLGSRGPRRMRCIMDTIPMSIVESRGVVASTSISSFSSRSSPVFRSHSKPLRSNSASCSDSGNNLGDPPLVLSNKAPRWHEQLRCWCLNFHGRVTVASVKNFQLVAVSDCEAGQTSERIILQFGKVGKDMFTMDYGYPISAFQAFAICLSSFETRIACE

SEQ ID NO: 95811 - protein, 371 aa, Arabidopsis thaliana
  peptide (1)..(371): Ceres Seq. ID no. 12730502
  misc_feature (89)..(371): Pfam Name: Tub family Pfam Description: Tub family
  misc_feature (1)..(371): Homolog of NCBI NO: 15230707 NR Description: F-box containing tubby family protein; protein At3g06380.1 [Arabidopsis thaliana]
  misc_feature (1)..(371): Homolog of NCBI NO: 22326885 NR Description: F-box containing tubby family protein; protein
  misc_feature (2)..(371): Homolog of NCBI NO: 30690823 NR Description: F-box containing tubby family protein thaliana] >gi|18377640|gb|AAL66970.1| putative tubby protein thaliana] >gi|20465543|gb|AAM20254.1| putative tubby protein
  misc_feature (2)..(371): Homolog of NCBI NO: 25409071 NR Description: probable Tub family protein [imported] - thaliana >gi|3738302|gb|AAC63644.1| putative tubby protein thaliana] >gi|20197552|gb|AAM15124.1| putative tubby protein
  misc_feature (2)..(371): Homolog of NCBI NO: 34899264 NR Description: contains ESTs
  misc_feature (24)..(240): Homolog of NCBI NO: 15223772 NR Description: Tub family protein, putative; protein id: [Arabidopsis thaliana] >gi|25406477|pir||H96797 hypothetical
  misc_feature (229)..(320): Homolog of NCBI NO: 15223772 NR Description: Tub family protein, putative; protein id: [Arabidopsis thaliana] >gi|25406477|pir||H96797 hypothetical
  misc_feature (324)..(371): Homolog of NCBI NO: 15223772 NR Description: Tub family protein, putative; protein id: [Arabidopsis thaliana] >gi|25406477|pir||H96797 hypothetical
  misc_feature (20)..(240): Homolog of NCBI NO: 38637048 NR Description: putative chain A, C-terminal domain of mouse
  misc_feature (229)..(330): Homolog of NCBI NO: 38637048 NR Description: putative chain A, C-terminal domain of mouse
MRSRPHRVVHAAASTANSSDPFSWSELPEELLREILIRVETVDGGDWPSRRNVVACAGVCRSWRILTKEIVAVPEFSSKLTFPISLKQSGPRDSLVQCFIKRNRNTQSYHLYLGLTTSLTDNGKFLLAASKLKRATCTDYIISLRSDDISKRSNAYLGRMRSNFLGTKFTVFDGSQTGAAKMQKSRSSNFIKVSPRVPQGSYPIAHISYELNVLGSRGPRRMRCIMDTIPMSIVESRGVVASTSISSFSSRSSPVFRSHSKPLRSNSASCSDSGNNLGDPPLVLSNKAPRWHEQLRCWCLNFHGRVTVASVKNFQLVAVSDCEAGQTSERIILQFGKVGKDMFTMDYGYPISAFQAFAICLSSFETRIACE

SEQ ID NO: 95812 - protein, 212 aa, Arabidopsis thaliana
  peptide (1)..(212): Ceres Seq. ID no. 12730503
  misc_feature (1)..(212): Pfam Name: Tub family Pfam Description: Tub family
  misc_feature (1)..(212): Homolog of NCBI NO: 15230707 NR Description: F-box containing tubby family protein; protein At3g06380.1 [Arabidopsis thaliana]
  misc_feature (1)..(212): Homolog of NCBI NO: 22326885 NR Description: F-box containing tubby family protein; protein
  misc_feature (1)..(212): Homolog of NCBI NO: 30690823 NR Description: F-box containing tubby family protein thaliana] >gi|18377640|gb|AAL66970.1| putative tubby protein thaliana] >gi|20465543|gb|AAM20254.1| putative tubby protein
  misc_feature (1)..(212): Homolog of NCBI NO: 25409071 NR Description: probable Tub family protein [imported] - thaliana >gi|3738302|gb|AAC63644.1| putative tubby protein thaliana] >gi|20197552|gb|AAM15124.1| putative tubby protein
  misc_feature (1)..(212): Homolog of NCBI NO: 34899264 NR Description: contains ESTs
  misc_feature (1)..(81): Homolog of NCBI NO: 15223772 NR Description: Tub family protein, putative; protein id: [Arabidopsis thaliana] >gi|25406477|pir||H96797 hypothetical
  misc_feature (70)..(161): Homolog of NCBI NO: 15223772 NR Description: Tub family protein, putative; protein id: [Arabidopsis thaliana] >gi|25406477|pir||H96797 hypothetical
  misc_feature (165)..(212): Homolog of NCBI NO: 15223772 NR Description: Tub family protein, putative; protein id: [Arabidopsis thaliana] >gi|25406477|pir||H96797 hypothetical
  misc_feature (1)..(81): Homolog of NCBI NO: 38637048 NR Description: putative chain A, C-terminal domain of mouse
  misc_feature (70)..(171): Homolog of NCBI NO: 38637048 NR Description: putative chain A, C-terminal domain of mouse
MRSNFLGTKFTVFDGSQTGAAKMQKSRSSNFIKVSPRVPQGSYPIAHISYELNVLGSRGPRRMRCIMDTIPMSIVESRGVVASTSISSFSSRSSPVFRSHSKPLRSNSASCSDSGNNLGDPPLVLSNKAPRWHEQLRCWCLNFHGRVTVASVKNFQLVAVSDCEAGQTSERIILQFGKVGKDMFTMDYGYPISAFQAFAICLSSFETRIACE

SEQ ID NO: 95813 - DNA, 1083 bp, Arabidopsis thaliana
  misc_feature (1)..(1083): Ceres Seq. ID no. 12730512
  misc_feature: MA Experiment ID: 20000185 Result: Up-regulated in Transcription
  misc_feature: MA Experiment 20000185 PARAMETER Experiment Name: At_Roots__P Parameter: Age (day) Value: 7 vs. 21
  misc_feature: MA Experiment 20000185 PARAMETER Experiment Name: At_Roots__P Parameter: Organism Value: A. thaliana
  misc_feature: MA Experiment 20000185 PARAMETER Experiment Name: At_Roots__P Parameter: Tissue Value: Roots vs. Whole Plant
  misc_feature: MA Experiment ID: 20000227 Result: Up-regulated in Transcription
  misc_feature: MA Experiment 20000227 PARAMETER Experiment Name: At_Root-Tips-vs-Tops_P Parameter: Tissue Value: Root Tips vs. Root Tops
  misc_feature: MA Experiment ID: 20000439 Result: Up-regulated in Transcription
  misc_feature: MA Experiment 20000439 PARAMETER Experiment Name: At_Roots__P Parameter: Age (day) Value: 14 vs. 21
  misc_feature: MA Experiment 20000439 PARAMETER Experiment Name: At_Roots__P Parameter: Organism Value: A. thaliana
  misc_feature: MA Experiment 20000439 PARAMETER Experiment Name: At_Roots__P Parameter: Tissue Value: Roots vs. Whole Plant
  misc_feature: MA Experiment ID: 20001451 Result: Up-regulated in Transcription
  misc_feature: MA Experiment 20001451 PARAMETER Experiment Name: At_Far-red-induction_P Parameter: Age (day) Value: 7
  misc_feature: MA Experiment 20001451 PARAMETER Experiment Name: At_Far-red-induction_P Parameter: Light Value: Far-red vs. White
  misc_feature: MA Experiment 20001451 PARAMETER Experiment Name: At_Far-red-induction_P Parameter: Organism Value: A. thaliana
  misc_feature: MA Experiment 20001451 PARAMETER Experiment Name: At_Far-red-induction_P Parameter: Plant Line Value: Columbia
  misc_feature: MA Experiment 20001451 PARAMETER Experiment Name: At_Far-red-induction_P Parameter: Timepoint (hr) Value: 24
  misc_feature: MA Experiment 20001451 PARAMETER Experiment Name: At_Far-red-induction_P Parameter: Tissue Value: Whole Plant
atggggaaaggagtagtatcagagaaggtgaagctcgtggtggcattgatcacacttcagttttgtttcgcaggcttccacattgtctcaagagttgctcttaacattggtgtcagcaaagttgtgtaccctgtttataggaatctccttgcccttctcctcataggtcccttcgcttacttcttcgaaaaaaaagaaagacctccacttacaatctctttactggctcagttcttcttcttggcactcataggcatcacagcgaaccaaggattctacctattaggactttactatgcaactccaacttttgcttccgcaatgcagaactctgttcctgccatcactttcatcatggcttgtgccttaaggctagagcacatagacctggtcaggaaacatggtgtggcaaaagtattgggaactcttgtgagcatcggtggagccaccgtgatcacattgtacagaggatttccgatatttgaccagggccttaacatgcaaaaggaagaggtggtcggatctgacaactcgcacagcttgacactcggatggttataccttatgggacattgtctgtcatgggctggttggatggttcttcaagctcctgttctaaagcaatacccggcgaagctcactttaacatccttcacatgtttctttggtctgattcagtttctggttattgctctctttgtggaaactgatctaaataattggatcatcgtctcttgggaagagctcttcaccatcctatacgccggaataatagcgtcagggttggtggtttatcttcaaacatggtgtatctacaaaagcggtccagtttttgtcgctgttttccagcctctccagacacttcttgttgctgcgatggcgtttcttattcttggtgatcagttatactcgggagggattgttggtgcagtgtttataatgctagggctctacttagttctttggggcaaaaacgaagaaagaaaactggctcttgaagagagtcaacaagatccagagtcactgaccaaacatctacttgaggcacaacacaagaagagtaattctgaatctgaagtgtaa

SEQ ID NO: 95814 - protein, 360 aa, Arabidopsis thaliana
  peptide (1)..(360): Ceres Seq. ID no. 12730513
  misc_feature (21)..(154): Pfam Name: Integral membrane protein DUF6 Pfam Description: Integral membrane protein DUF6
  misc_feature (1)..(360): Homolog of NCBI NO: 9294076 NR Description: nodulin-like protein [Arabidopsis thaliana]
  misc_feature (1)..(360): Homolog of NCBI NO: 15229596 NR Description: integral membrane protein, putative; protein id:
  misc_feature (5)..(359): Homolog of NCBI NO: 34895316 NR Description: putative nodulin [Oryza sativa (japonica
  misc_feature (6)..(356): Homolog of NCBI NO: 18410867 NR Description: nodulin-like protein; protein id: At1g75500.1, by cDNA: gi_15028078, supported by cDNA: gi_20259306 [Arabidopsis >gi|15028079|gb|AAK76570.1| putative nodulin protein nodulin
  misc_feature (6)..(337): Homolog of NCBI NO: 18409794 NR Description: putative protein; protein id: At3g53210.1,
  misc_feature (16)..(337): Homolog of NCBI NO: 21593130 NR Description: nodulin-like protein [Arabidopsis thaliana]
  misc_feature (146)..(356): Homolog of NCBI NO: 25404978 NR Description: protein F10A5.28 [imported] - Arabidopsis >gi|9369372|gb|AAF87121.1|AC006434_17 F10A5.28 [Arabidopsis
  misc_feature (6)..(85): Homolog of NCBI NO: 25404978 NR Description: protein F10A5.28 [imported] - Arabidopsis >gi|9369372|gb|AAF87121.1|AC006434_17 F10A5.28 [Arabidopsis
  misc_feature (6)..(189): Homolog of NCBI NO: 11358354 NR Description: hypothetical protein T4D2.140 - Arabidopsis >gi|6630741|emb|CAB64224.1| putative protein [Arabidopsis
  misc_feature (224)..(337): Homolog of NCBI NO: 11358354 NR Description: hypothetical protein T4D2.140 - Arabidopsis >gi|6630741|emb|CAB64224.1| putative protein [Arabidopsis
MGKGVVSEKVKLVVALITLQFCFAGFHIVSRVALNIGVSKVVYPVYRNLLALLLIGPFAYFFEKKERPPLTISLLAQFFFLALIGITANQGFYLLGLYYATPTFASAMQNSVPAITFIMACALRLEHIDLVRKHGVAKVLGTLVSIGGATVITLYRGFPIFDQGLNMQKEEVVGSDNSHSLTLGWLYLMGHCLSWAGWMVLQAPVLKQYPAKLTLTSFTCFFGLIQFLVIALFVETDLNNWIIVSWEELFTILYAGIIASGLVVYLQTWCIYKSGPVFVAVFQPLQTLLVAAMAFLILGDQLYSGGIVGAVFIMLGLYLVLWGKNEERKLALEESQQDPESLTKHLLEAQHKKSNSESEV

SEQ ID NO: 95815 - protein, 253 aa, Arabidopsis thaliana
  peptide (1)..(253): Ceres Seq. ID no. 12730514
  misc_feature (1)..(253): Homolog of NCBI NO: 9294076 NR Description: nodulin-like protein [Arabidopsis thaliana]
  misc_feature (1)..(253): Homolog of NCBI NO: 15229596 NR Description: integral membrane protein, putative; protein id:
  misc_feature (1)..(252): Homolog of NCBI NO: 34895316 NR Description: putative nodulin [Oryza sativa (japonica
  misc_feature (1)..(249): Homolog of NCBI NO: 18410867 NR Description: nodulin-like protein; protein id: At1g75500.1, by cDNA: gi_15028078, supported by cDNA: gi_20259306 [Arabidopsis >gi|15028079|gb|AAK76570.1| putative nodulin protein nodulin
  misc_feature (1)..(230): Homolog of NCBI NO: 18409794 NR Description: putative protein; protein id: At3g53210.1,
  misc_feature (1)..(230): Homolog of NCBI NO: 21593130 NR Description: nodulin-like protein [Arabidopsis thaliana]
  misc_feature (39)..(249): Homolog of NCBI NO: 25404978 NR Description: protein F10A5.28 [imported] - Arabidopsis >gi|9369372|gb|AAF87121.1|AC006434_17 F10A5.28 [Arabidopsis
  misc_feature (1)..(82): Homolog of NCBI NO: 11358354 NR Description: hypothetical protein T4D2.140 - Arabidopsis >gi|6630741|emb|CAB64224.1| putative protein [Arabidopsis
  misc_feature (117)..(230): Homolog of NCBI NO: 11358354 NR Description: hypothetical protein T4D2.140 - Arabidopsis >gi|6630741|emb|CAB64224.1| putative protein [Arabidopsis
  misc_feature (1)..(252): Homolog of NCBI NO: 15240683 NR Description: MtN21 nodulin protein-like; protein id:
MQNSVPAITFIMACALRLEHIDLVRKHGVAKVLGTLVSIGGATVITLYRGFPIFDQGLNMQKEEVVGSDNSHSLTLGWLYLMGHCLSWAGWMVLQAPVLKQYPAKLTLTSFTCFFGLIQFLVIALFVETDLNNWIIVSWEELFTILYAGIIASGLVVYLQTWCIYKSGPVFVAVFQPLQTLLVAAMAFLILGDQLYSGGIVGAVFIMLGLYLVLWGKNEERKLALEESQQDPESLTKHLLEAQHKKSNSESEV

SEQ ID NO: 95816 - protein, 242 aa, Arabidopsis thaliana
  peptide (1)..(242): Ceres Seq. ID no. 12730515
  misc_feature (1)..(242): Homolog of NCBI NO: 9294076 NR Description: nodulin-like protein [Arabidopsis thaliana]
  misc_feature (1)..(242): Homolog of NCBI NO: 15229596 NR Description: integral membrane protein, putative; protein id:
  misc_feature (1)..(241): Homolog of NCBI NO: 34895316 NR Description: putative nodulin [Oryza sativa (japonica
  misc_feature (1)..(238): Homolog of NCBI NO: 18410867 NR Description: nodulin-like protein; protein id: At1g75500.1, by cDNA: gi_15028078, supported by cDNA: gi_20259306 [Arabidopsis >gi|15028079|gb|AAK76570.1| putative nodulin protein nodulin
  misc_feature (1)..(219): Homolog of NCBI NO: 18409794 NR Description: putative protein; protein id: At3g53210.1,
  misc_feature (1)..(219): Homolog of NCBI NO: 21593130 NR Description: nodulin-like protein [Arabidopsis thaliana]
  misc_feature (28)..(238): Homolog of NCBI NO: 25404978 NR Description: protein F10A5.28 [imported] - Arabidopsis >gi|9369372|gb|AAF87121.1|AC006434_17 F10A5.28 [Arabidopsis
  misc_feature (1)..(71): Homolog of NCBI NO: 11358354 NR Description: hypothetical protein T4D2.140 - Arabidopsis >gi|6630741|emb|CAB64224.1| putative protein [Arabidopsis
  misc_feature (106)..(219): Homolog of NCBI NO: 11358354 NR Description: hypothetical protein T4D2.140 - Arabidopsis >gi|6630741|emb|CAB64224.1| putative protein [Arabidopsis
  misc_feature (1)..(241): Homolog of NCBI NO: 15240683 NR Description: MtN21 nodulin protein-like; protein id:
MACALRLEHIDLVRKHGVAKVLGTLVSIGGATVITLYRGFPIFDQGLNMQKEEVVGSDNSHSLTLGWLYLMGHCLSWAGWMVLQAPVLKQYPAKLTLTSFTCFFGLIQFLVIALFVETDLNNWIIVSWEELFTILYAGIIASGLVVYLQTWCIYKSGPVFVAVFQPLQTLLVAAMAFLILGDQLYSGGIVGAVFIMLGLYLVLWGKNEERKLALEESQQDPESLTKHLLEAQHKKSNSESEV

SEQ ID NO: 95817 - DNA, 4229 bp, Arabidopsis thaliana
  misc_feature (1)..(4229): Ceres Seq. ID no. 12730516
  misc_feature: MA Experiment ID: 20000184 Result: Down-regulated in Transcription
  misc_feature: MA Experiment 20000184 PARAMETER Experiment Name: At_Shoots__P Parameter: Age (day) Value: 7
  misc_feature: MA Experiment 20000184 PARAMETER Experiment Name: At_Shoots__P Parameter: Tissue Value: Shoots vs. Whole Plant
  misc_feature: MA Experiment ID: 20000441 Result: Up-regulated in Transcription
  misc_feature: MA Experiment 20000441 PARAMETER Experiment Name: At_1uM_BR-BRZ__P Parameter: Tissue Value: Shoot Apices
  misc_feature: MA Experiment 20000441 PARAMETER Experiment Name: At_1uM_BR-BRZ__P Parameter: Treatment Value: 1uM BR vs. No Treatment
  misc_feature: MA Experiment ID: 20000527 Result: Up-regulated in Transcription
  misc_feature: MA Experiment 20000527 PARAMETER Experiment Name: At_10percent_PEG_P Parameter: Age (day) Value: 20
  misc_feature: MA Experiment 20000527 PARAMETER Experiment Name: At_10percent_PEG_P Parameter: Organism Value: A. thaliana
  misc_feature: MA Experiment 20000527 PARAMETER Experiment Name: At_10percent_PEG_P Parameter: Plant Line Value: WS
  misc_feature: MA Experiment 20000527 PARAMETER Experiment Name: At_10percent_PEG_P Parameter: Timepoint (day) Value: 20
  misc_feature: MA Experiment 20000527 PARAMETER Experiment Name: At_10percent_PEG_P Parameter: Tissue Value: Whole Plant
  misc_feature: MA Experiment 20000527 PARAMETER Experiment Name: At_10percent_PEG_P Parameter: Treatment Value: 10percent PEG vs. No Treatment
  misc_feature: MA Experiment ID: 20001247 Result: Down-regulated in Transcription
  misc_feature: MA Experiment 20001247 PARAMETER Experiment Name: At_Far-red-induction_P Parameter: Age (day) Value: 7
  misc_feature: MA Experiment 20001247 PARAMETER Experiment Name: At_Far-red-induction_P Parameter: Light Value: Far-red vs. White
  misc_feature: MA Experiment 20001247 PARAMETER Experiment Name: At_Far-red-induction_P Parameter: Organism Value: A. thaliana
  misc_feature: MA Experiment 20001247 PARAMETER Experiment Name: At_Far-red-induction_P Parameter: Plant Line Value: Columbia
  misc_feature: MA Experiment 20001247 PARAMETER Experiment Name: At_Far-red-induction_P Parameter: Timepoint (hr) Value: 1
  misc_feature: MA Experiment 20001247 PARAMETER Experiment Name: At_Far-red-induction_P Parameter: Tissue Value: Whole Plant
  misc_feature: MA Experiment ID: 20001248 Result: Down-regulated in Transcription
  misc_feature: MA Experiment 20001248 PARAMETER Experiment Name: At_Far-red-induction_P Parameter: Age (day) Value: 7
  misc_feature: MA Experiment 20001248 PARAMETER Experiment Name: At_Far-red-induction_P Parameter: Light Value: Far-red vs. White
  misc_feature: MA Experiment 20001248 PARAMETER Experiment Name: At_Far-red-induction_P Parameter: Organism Value: A. thaliana
  misc_feature: MA Experiment 20001248 PARAMETER Experiment Name: At_Far-red-induction_P Parameter: Plant Line Value: Columbia
  misc_feature: MA Experiment 20001248 PARAMETER Experiment Name: At_Far-red-induction_P Parameter: Timepoint (hr) Value: 4
  misc_feature: MA Experiment 20001248 PARAMETER Experiment Name: At_Far-red-induction_P Parameter: Tissue Value: Whole Plant
  misc_feature: MA Experiment ID: 20001450 Result: Down-regulated in Transcription
  misc_feature: MA Experiment 20001450 PARAMETER Experiment Name: At_Far-red-induction_P Parameter: Age (day) Value: 7
  misc_feature: MA Experiment 20001450 PARAMETER Experiment Name: At_Far-red-induction_P Parameter: Light Value: Far-red vs. White
  misc_feature: MA Experiment 20001450 PARAMETER Experiment Name: At_Far-red-induction_P Parameter: Organism Value: A. thaliana
  misc_feature: MA Experiment 20001450 PARAMETER Experiment Name: At_Far-red-induction_P Parameter: Plant Line Value: Columbia
  misc_feature: MA Experiment 20001450 PARAMETER Experiment Name: At_Far-red-induction_P Parameter: Timepoint (hr) Value: 8
  misc_feature: MA Experiment 20001450 PARAMETER Experiment Name: At_Far-red-induction_P Parameter: Tissue Value: Whole Plant
  misc_feature: MA Experiment ID: 20001451 Result: Down-regulated in Transcription
  misc_feature: MA Experiment 20001451 PARAMETER Experiment Name: At_Far-red-induction_P Parameter: Age (day) Value: 7
  misc_feature: MA Experiment 20001451 PARAMETER Experiment Name: At_Far-red-induction_P Parameter: Light Value: Far-red vs. White
  misc_feature: MA Experiment 20001451 PARAMETER Experiment Name: At_Far-red-induction_P Parameter: Organism Value: A. thaliana
  misc_feature: MA Experiment 20001451 PARAMETER Experiment Name: At_Far-red-induction_P Parameter: Plant Line Value: Columbia
  misc_feature: MA Experiment 20001451 PARAMETER Experiment Name: At_Far-red-induction_P Parameter: Timepoint (hr) Value: 24
  misc_feature: MA Experiment 20001451 PARAMETER Experiment Name: At_Far-red-induction_P Parameter: Tissue Value: Whole Plant
  misc_feature: MA Experiment ID: 20001554 Result: Down-regulated in Transcription
  misc_feature: MA Experiment 20001554 PARAMETER Experiment Name: At_Drought_Soil_Dry_P Parameter: Age (day) Value: 21
  misc_feature: MA Experiment 20001554 PARAMETER Experiment Name: At_Drought_Soil_Dry_P Parameter: Organism Value: A. thaliana
  misc_feature: MA Experiment 20001554 PARAMETER Experiment Name: At_Drought_Soil_Dry_P Parameter: Plant Line Value: WS
  misc_feature: MA Experiment 20001554 PARAMETER Experiment Name: At_Drought_Soil_Dry_P Parameter: Post Timepoint (hr) Value: None
  misc_feature: MA Experiment 20001554 PARAMETER Experiment Name: At_Drought_Soil_Dry_P Parameter: Post-Treatment Value: None
  misc_feature: MA Experiment 20001554 PARAMETER Experiment Name: At_Drought_Soil_Dry_P Parameter: Timepoint (day) Value: 7
  misc_feature: MA Experiment 20001554 PARAMETER Experiment Name: At_Drought_Soil_Dry_P Parameter: Treatment Value: Drought vs. No Drought
  misc_feature: MA Experiment ID: 20001555 Result: Down-regulated in Transcription
  misc_feature: MA Experiment 20001555 PARAMETER Experiment Name: At_Drought_Soil_Dry_P Parameter: Age (day) Value: 24
  misc_feature: MA Experiment 20001555 PARAMETER Experiment Name: At_Drought_Soil_Dry_P Parameter: Organism Value: A. thaliana
  misc_feature: MA Experiment 20001555 PARAMETER Experiment Name: At_Drought_Soil_Dry_P Parameter: Plant Line Value: WS
  misc_feature: MA Experiment 20001555 PARAMETER Experiment Name: At_Drought_Soil_Dry_P Parameter: Post Timepoint (hr) Value: None
  misc_feature: MA Experiment 20001555 PARAMETER Experiment Name: At_Drought_Soil_Dry_P Parameter: Post-Treatment Value: None
  misc_feature: MA Experiment 20001555 PARAMETER Experiment Name: At_Drought_Soil_Dry_P Parameter: Timepoint (day) Value: 10
  misc_feature: MA Experiment 20001555 PARAMETER Experiment Name: At_Drought_Soil_Dry_P Parameter: Treatment Value: Drought vs. No Drought
  misc_feature: MA Experiment ID: 20001557 Result: Down-regulated in Transcription
  misc_feature: MA Experiment 20001557 PARAMETER Experiment Name: At_Drought_Soil_Dry_P Parameter: Age (day) Value: 27
  misc_feature: MA Experiment 20001557 PARAMETER Experiment Name: At_Drought_Soil_Dry_P Parameter: Organism Value: A. thaliana
  misc_feature: MA Experiment 20001557 PARAMETER Experiment Name: At_Drought_Soil_Dry_P Parameter: Plant Line Value: WS
  misc_feature: MA Experiment 20001557 PARAMETER Experiment Name: At_Drought_Soil_Dry_P Parameter: Post Timepoint (hr) Value: 3
  misc_feature: MA Experiment 20001557 PARAMETER Experiment Name: At_Drought_Soil_Dry_P Parameter: Post-Treatment Value: Re-Water vs. No Drought
  misc_feature: MA Experiment 20001557 PARAMETER Experiment Name: At_Drought_Soil_Dry_P Parameter: Timepoint (day) Value: 13
  misc_feature: MA Experiment 20001557 PARAMETER Experiment Name: At_Drought_Soil_Dry_P Parameter: Treatment Value: Drought vs. No Drought
  misc_feature: MA Experiment ID: 20001558 Result: Down-regulated in Transcription
  misc_feature: MA Experiment 20001558 PARAMETER Experiment Name: At_Drought_Soil_Dry_P Parameter: Age (day) Value: 27
  misc_feature: MA Experiment 20001558 PARAMETER Experiment Name: At_Drought_Soil_Dry_P Parameter: Organism Value: A. thaliana
  misc_feature: MA Experiment 20001558 PARAMETER Experiment Name: At_Drought_Soil_Dry_P Parameter: Plant Line Value: WS
  misc_feature: MA Experiment 20001558 PARAMETER Experiment Name: At_Drought_Soil_Dry_P Parameter: Post Timepoint (hr) Value: 6
  misc_feature: MA Experiment 20001558 PARAMETER Experiment Name: At_Drought_Soil_Dry_P Parameter: Post-Treatment Value: Re-Water vs. No Drought
  misc_feature: MA Experiment 20001558 PARAMETER Experiment Name: At_Drought_Soil_Dry_P Parameter: Timepoint (day) Value: 13
  misc_feature: MA Experiment 20001558 PARAMETER Experiment Name: At_Drought_Soil_Dry_P Parameter: Treatment Value: Drought vs. No Drought
  misc_feature: MA Experiment ID: 20001771 Result: Down-regulated in Transcription
  misc_feature: MA Experiment 20001771 PARAMETER Experiment Name: At_Far-red-enriched-adult_P Parameter: Age (day) Value: 28
  misc_feature: MA Experiment 20001771 PARAMETER Experiment Name: At_Far-red-enriched-adult_P Parameter: Light Value: Far-red enriched vs. White
  misc_feature: MA Experiment 20001771 PARAMETER Experiment Name: At_Far-red-enriched-adult_P Parameter: Organism Value: A. thaliana
  misc_feature: MA Experiment 20001771 PARAMETER Experiment Name: At_Far-red-enriched-adult_P Parameter: Plant Line Value: Columbia
  misc_feature: MA Experiment 20001771 PARAMETER Experiment Name: At_Far-red-enriched-adult_P Parameter: Timepoint (hr) Value: 16
  misc_feature: MA Experiment 20001771 PARAMETER Experiment Name: At_Far-red-enriched-adult_P Parameter: Tissue Value: Aerial
aacagttttttttaaatattttccagataaacattaataaaacgataaaaggcaaaaaataaaaaagaaaagaaagcaaaagcaaaatcaaaatcgatatatcagacaacgcctcgacctttctttctttttttccttctcatcgtctccgttgaacaacaccacacaaacaccagaagaacaccagataattcccatggtgaaccgagctcagatttgaaaattgaaggtcgtagacgaatcataaggaaagagagaagtggtttgagatttcttttttgacggacgaaaacggagataagctttgggggaaatggcgacgccgttaccagattttgagacggcgagaggcggcggagcagtggcgtcttcttcaaccacggttcttccgagttctgtgtcttcttcttcttcttcatctcgtccgttgcctgtggcgaattcgttctcggatgacgcggaagagatttctccgatcctgattttcttgttctttcataaggcagtatgtagtgagcttgaagctcttcatagattggctcttgagtttgctactggtcaccatgtcgatctccggctgcttcgtgaacggtaccggttcttgagatccatctataagcatcactgcaatgccgaagacgaggtgatattttcagctcttgacatacgtgtgaagaatgtagcgcaaacatattctcttgaacacaagggggaaagcaatcttttcgatcatctctttgagctgctgaattctgccacggaaactgatgaaagttaccgaagggagttggctcgttctaccggagcacttcagacttctgttagccagcacttggcgaaagaacagaaacaggtgttccccttacttattgagaaattcaagtatgaggagcaagcttacatagtctggcggtttctctgcagtattcctgtgaatatgcttgctgtgttcttgccatggatttcttcttccatttcagtagatgaaagcaaggagatgcaaacgtgcttaaagaagatagttccaggcgagaagctccttcagcaggttattttcacctggctgggagggaaaagcaataccgtggcttcgtgtcgcattgaagattctatgttccagtgctgtctagattcttctagcagcatgcttccttgtaaagcaagtagagaacagtgcgcatgtgagggttccaagattgggaagagaaagtacccagagcttactaactttggctcatctgatactctgcacccagttgatgagataaagctctggcacaagtcaatcaacaaggagatgaaagaaatagccgatgaggctaggaagattcagctgtctggagatttttcggatttatcggcatttgatgaacgcttacaatatattgctgaagtgtgcatcttccatagtcttgcagaggacaagatcatatttccagctgtagatggagagttttcattttctgaagagcacgatgaagaagaaaatcagtttaacgagtttcgatgcttaattgaaaatatcaagagtgctggagcctcttctacttccgctgccgaattttacactaagctgtgctcacatgctgatcaaataatggaaactattcaaagacacttccataacgaggaaattcaggtgctaccccttgcacgaaagaacttcagcttcaaaagacaacaagaacttctctaccaaagcctgtgtataatgccattgagactaattgaacgagttttgccatggttgacggcatctttaacagaagatgaagctaagaattttctgaagaacttgcaagctggagcacctaaatcggatgttgctctcgttactcttttctctggttgggcttgcaaaggacgcaaagccggggaatgcttgtctccaaacgggaatggtttatgccctgtgaaaacactaagcaacattaaagaagtcaaccttcagtcatgtaatgcttgtgcgtctgttccatgcacgagtaggagtacaaaatcgtgttgccagcatcaagataaaaggccagctaagcgaactgctgtattgtcttgtgaaaaaaaaaccacccctcactcgacagaagttgcaaatgggtgcaagccatctggaaatggtaggtcatgctgtgttccggatctcggagttaacaataattgtctggaacttggttctcttccagcagctaaagctatgagatcttcttcgctaaactctgctgcacccgctcttaattccagcctctttatttgggaaatggatagtaacagctttggtactggacatgctgagcggccagttgctacaatattcaagtttcacaaggccataagcaaagatctagagtttcttgatgttgaatctggaaagctcattgattgcgatggaacatttattcgtcaatttatcggtcgatttcacctactctggggtttctacaaggctcatagtaatgcagaagatgacatcctatttccagctctagaatcgaaggagacacttcacaatgtcagtcactcttacacgctcgaccataaacaggaggagaagttgtttggagatatttatagtgtccttaccgaactttcaattcttcatgagaagttacagagtgattctatgatggaggacatagctcaaactgacactgttcggacggatatcgataacggtgactgcaacaagaaatacaatgaactggctacaaagctacaggggatgtgcaaatccattaaaatcactttggatcagcacattttcttggaggaactggagctttggcctctatttgacaaacacttctccattcaagagcaagacaagattgtgggtcgtataatcggaacaacgggtgctgaagttcttcaatctatgttaccatgggtgacgtctgccctttctgaagatgagcaaaacagaatgatggatacctggaagcaggcaaccaagaacacaatgttcgatgaatggcttaatgaatgctggaaaggatcacccgactcatcctcaacagaaacatccaaacctagtccacagaaagataatgatcatcaagaaatcttggaccaaagtggtgaactatttaagccagggtggaaagatattttccgcatgaaccagaatgaactagaggctgaaatcaggaaggtctatcaggactcaacacttgatccgaggagaaaagattatctcgtacagaattggaggaccagtcgatggattgcggctcagcaaaagttacctaaggaagcagaaactgcagtaaatggtgatgttgaacttggatgttccccgtcttttcgggatcccgagaagcagatatatggatgcgagcattacaagcgtaactgcaagcttcgagctgcttgttgtgatcagttgttcacttgtaggttttgccatgacaaagtaagcgaccactccatggatagaaaattggtgacggaaatgctctgtatgcggtgcctcaaggtgcaacctgttggtcccatctgcacaacaccttcatgcgacggattcccaatggcaaagcactattgcagtatttgcaaactttttgatgatgaaagggccgtttaccactgtccattctgcaacctttgccgggtcggggaaggactaggaatcgattttttccattgcatgacatgtaactgttgcctagggatgaaattagtaaaccacaagtgcctcgagaagagcctcgagacaaattgccccatctgctgcgaatttcttttcacatcgagtgaagcagttagagccttaccatgtggtcactacatgcactcagcttgcttccaggcttacacttgcagtcactacacatgtccaatctgtggaaaatcattaggagatatggctgtttattttggtatgcttgatgcactgttagctgcagaagaacttccagaggaatacaaaaatcgctgtcaggacattctatgtaatgattgtgaacgcaaaggaactacacggttccattggttgtaccataaatgtggtagctgtggttcttacaatacccgggtgatcaagtccgaaacaatccccccggactgctcaacctcatcctgaaaacaccaagaggtttcactcacttgttactctctttttttctttccttttttcgggttttaccctctgtttcgcacaacaatgtgaagaagcccgttgatagattttttttttgtatagtctctgagatattaagattttgaagagtctt

SEQ ID NO: 95818 - protein, 1254 aa, Arabidopsis thaliana
  peptide (1)..(1254): Ceres Seq. ID no. 12730517
  misc_feature (732)..(831): Pfam Name: Domain of Unknown function Pfam Description: Domain of Unknown function
  misc_feature (26)..(497): Homolog of NCBI NO: 25402866 NR Description: protein F14D16.3 [imported] - Arabidopsis >gi|8778297|gb|AAF79306.1|AC068602_29 F14D16.3 [Arabidopsis
  misc_feature (919)..(1240): Homolog of NCBI NO: 25402866 NR Description: protein F14D16.3 [imported] - Arabidopsis >gi|8778297|gb|AAF79306.1|AC068602_29 F14D16.3 [Arabidopsis
  misc_feature (739)..(917): Homolog of NCBI NO: 25402866 NR Description: protein F14D16.3 [imported] - Arabidopsis >gi|8778297|gb|AAF79306.1|AC068602_29 F14D16.3 [Arabidopsis
  misc_feature (661)..(762): Homolog of NCBI NO: 25402866 NR Description: protein F14D16.3 [imported] - Arabidopsis >gi|8778297|gb|AAF79306.1|AC068602_29 F14D16.3 [Arabidopsis
  misc_feature (854)..(1252): Homolog of NCBI NO: 22347790 NR Description: putative zinc finger protein [Zea mays]
  misc_feature (659)..(784): Homolog of NCBI NO: 25402866 NR Description: protein F14D16.3 [imported] - Arabidopsis >gi|8778297|gb|AAF79306.1|AC068602_29 F14D16.3 [Arabidopsis
  misc_feature (806)..(882): Homolog of NCBI NO: 25402866 NR Description: protein F14D16.3 [imported] - Arabidopsis >gi|8778297|gb|AAF79306.1|AC068602_29 F14D16.3 [Arabidopsis
  misc_feature (905)..(1192): Homolog of NCBI NO: 29367543 NR Description: putative zinc finger protein [Oryza sativa
  misc_feature (800)..(935): Homolog of NCBI NO: 25402866 NR Description: protein F14D16.3 [imported] - Arabidopsis >gi|8778297|gb|AAF79306.1|AC068602_29 F14D16.3 [Arabidopsis
  misc_feature (51)..(225): Homolog of NCBI NO: 25402866 NR Description: protein F14D16.3 [imported] - Arabidopsis >gi|8778297|gb|AAF79306.1|AC068602_29 F14D16.3 [Arabidopsis
MATPLPDFETARGGGAVASSSTTVLPSSVSSSSSSSRPLPVANSFSDDAEEISPILIFLFFHKAVCSELEALHRLALEFATGHHVDLRLLRERYRFLRSIYKHHCNAEDEVIFSALDIRVKNVAQTYSLEHKGESNLFDHLFELLNSATETDESYRRELARSTGALQTSVSQHLAKEQKQVFPLLIEKFKYEEQAYIVWRFLCSIPVNMLAVFLPWISSSISVDESKEMQTCLKKIVPGEKLLQQVIFTWLGGKSNTVASCRIEDSMFQCCLDSSSSMLPCKASREQCACEGSKIGKRKYPELTNFGSSDTLHPVDEIKLWHKSINKEMKEIADEARKIQLSGDFSDLSAFDERLQYIAEVCIFHSLAEDKIIFPAVDGEFSFSEEHDEEENQFNEFRCLIENIKSAGASSTSAAEFYTKLCSHADQIMETIQRHFHNEEIQVLPLARKNFSFKRQQELLYQSLCIMPLRLIERVLPWLTASLTEDEAKNFLKNLQAGAPKSDVALVTLFSGWACKGRKAGECLSPNGNGLCPVKTLSNIKEVNLQSCNACASVPCTSRSTKSCCQHQDKRPAKRTAVLSCEKKTTPHSTEVANGCKPSGNGRSCCVPDLGVNNNCLELGSLPAAKAMRSSSLNSAAPALNSSLFIWEMDSNSFGTGHAERPVATIFKFHKAISKDLEFLDVESGKLIDCDGTFIRQFIGRFHLLWGFYKAHSNAEDDILFPALESKETLHNVSHSYTLDHKQEEKLFGDIYSVLTELSILHEKLQSDSMMEDIAQTDTVRTDIDNGDCNKKYNELATKLQGMCKSIKITLDQHIFLEELELWPLFDKHFSIQEQDKIVGRIIGTTGAEVLQSMLPWVTSALSEDEQNRMMDTWKQATKNTMFDEWLNECWKGSPDSSSTETSKPSPQKDNDHQEILDQSGELFKPGWKDIFRMNQNELEAEIRKVYQDSTLDPRRKDYLVQNWRTSRWIAAQQKLPKEAETAVNGDVELGCSPSFRDPEKQIYGCEHYKRNCKLRAACCDQLFTCRFCHDKVSDHSMDRKLVTEMLCMRCLKVQPVGPICTTPSCDGFPMAKHYCSICKLFDDERAVYHCPFCNLCRVGEGLGIDFFHCMTCNCCLGMKLVNHKCLEKSLETNCPICCEFLFTSSEAVRALPCGHYMHSACFQAYTCSHYTCPICGKSLGDMAVYFGMLDALLAAEELPEEYKNRCQDILCNDCERKGTTRFHWLYHKCGSCGSYNTRVIKSETIPPDCSTSS

SEQ ID NO: 95819 - protein, 1046 aa, Arabidopsis thaliana
  peptide (1)..(1046): Ceres Seq. ID no. 12730518
  misc_feature (524)..(623): Pfam Name: Domain of Unknown function Pfam Description: Domain of Unknown function
  misc_feature (1)..(289): Homolog of NCBI NO: 25402866 NR Description: protein F14D16.3 [imported] - Arabidopsis >gi|8778297|gb|AAF79306.1|AC068602_29 F14D16.3 [Arabidopsis
  misc_feature (711)..(1032): Homolog of NCBI NO: 25402866 NR Description: protein F14D16.3 [imported] - Arabidopsis >gi|8778297|gb|AAF79306.1|AC068602_29 F14D16.3 [Arabidopsis
  misc_feature (531)..(709): Homolog of NCBI NO: 25402866 NR Description: protein F14D16.3 [imported] - Arabidopsis >gi|8778297|gb|AAF79306.1|AC068602_29 F14D16.3 [Arabidopsis
  misc_feature (453)..(554): Homolog of NCBI NO: 25402866 NR Description: protein F14D16.3 [imported] - Arabidopsis >gi|8778297|gb|AAF79306.1|AC068602_29 F14D16.3 [Arabidopsis
  misc_feature (646)..(1044): Homolog of NCBI NO: 22347790 NR Description: putative zinc finger protein [Zea mays]
  misc_feature (451)..(576): Homolog of NCBI NO: 25402866 NR Description: protein F14D16.3 [imported] - Arabidopsis >gi|8778297|gb|AAF79306.1|AC068602_29 F14D16.3 [Arabidopsis
  misc_feature (598)..(674): Homolog of NCBI NO: 25402866 NR Description: protein F14D16.3 [imported] - Arabidopsis >gi|8778297|gb|AAF79306.1|AC068602_29 F14D16.3 [Arabidopsis
  misc_feature (697)..(984): Homolog of NCBI NO: 29367543 NR Description: putative zinc finger protein [Oryza sativa
  misc_feature (592)..(727): Homolog of NCBI NO: 25402866 NR Description: protein F14D16.3 [imported] - Arabidopsis >gi|8778297|gb|AAF79306.1|AC068602_29 F14D16.3 [Arabidopsis
  misc_feature (1)..(17): Homolog of NCBI NO: 25402866 NR Description: protein F14D16.3 [imported] - Arabidopsis >gi|8778297|gb|AAF79306.1|AC068602_29 F14D16.3 [Arabidopsis
MLAVFLPWISSSISVDESKEMQTCLKKIVPGEKLLQQVIFTWLGGKSNTVASCRIEDSMFQCCLDSSSSMLPCKASREQCACEGSKIGKRKYPELTNFGSSDTLHPVDEIKLWHKSINKEMKEIADEARKIQLSGDFSDLSAFDERLQYIAEVCIFHSLAEDKIIFPAVDGEFSFSEEHDEEENQFNEFRCLIENIKSAGASSTSAAEFYTKLCSHADQIMETIQRHFHNEEIQVLPLARKNFSFKRQQELLYQSLCIMPLRLIERVLPWLTASLTEDEAKNFLKNLQAGAPKSDVALVTLFSGWACKGRKAGECLSPNGNGLCPVKTLSNIKEVNLQSCNACASVPCTSRSTKSCCQHQDKRPAKRTAVLSCEKKTTPHSTEVANGCKPSGNGRSCCVPDLGVNNNCLELGSLPAAKAMRSSSLNSAAPALNSSLFIWEMDSNSFGTGHAERPVATIFKFHKAISKDLEFLDVESGKLIDCDGTFIRQFIGRFHLLWGFYKAHSNAEDDILFPALESKETLHNVSHSYTLDHKQEEKLFGDIYSVLTELSILHEKLQSDSMMEDIAQTDTVRTDIDNGDCNKKYNELATKLQGMCKSIKITLDQHIFLEELELWPLFDKHFSIQEQDKIVGRIIGTTGAEVLQSMLPWVTSALSEDEQNRMMDTWKQATKNTMFDEWLNECWKGSPDSSSTETSKPSPQKDNDHQEILDQSGELFKPGWKDIFRMNQNELEAEIRKVYQDSTLDPRRKDYLVQNWRTSRWIAAQQKLPKEAETAVNGDVELGCSPSFRDPEKQIYGCEHYKRNCKLRAACCDQLFTCRFCHDKVSDHSMDRKLVTEMLCMRCLKVQPVGPICTTPSCDGFPMAKHYCSICKLFDDERAVYHCPFCNLCRVGEGLGIDFFHCMTCNCCLGMKLVNHKCLEKSLETNCPICCEFLFTSSEAVRALPCGHYMHSACFQAYTCSHYTCPICGKSLGDMAVYFGMLDALLAAEELPEEYKNRCQDILCNDCERKGTTRFHWLYHKCGSCGSYNTRVIKSETIPPDCSTSS

SEQ ID NO: 95820 - protein, 1026 aa, Arabidopsis thaliana
  peptide (1)..(1026): Ceres Seq. ID no. 12730519
  misc_feature (504)..(603): Pfam Name: Domain of Unknown function Pfam Description: Domain of Unknown function
  misc_feature (1)..(269): Homolog of NCBI NO: 25402866 NR Description: protein F14D16.3 [imported] - Arabidopsis >gi|8778297|gb|AAF79306.1|AC068602_29 F14D16.3 [Arabidopsis
  misc_feature (691)..(1012): Homolog of NCBI NO: 25402866 NR Description: protein F14D16.3 [imported] - Arabidopsis >gi|8778297|gb|AAF79306.1|AC068602_29 F14D16.3 [Arabidopsis
  misc_feature (511)..(689): Homolog of NCBI NO: 25402866 NR Description: protein F14D16.3 [imported] - Arabidopsis >gi|8778297|gb|AAF79306.1|AC068602_29 F14D16.3 [Arabidopsis
  misc_feature (433)..(534): Homolog of NCBI NO: 25402866 NR Description: protein F14D16.3 [imported] - Arabidopsis >gi|8778297|gb|AAF79306.1|AC068602_29 F14D16.3 [Arabidopsis
  misc_feature (626)..(1024): Homolog of NCBI NO: 22347790 NR Description: putative zinc finger protein [Zea mays]
  misc_feature (431)..(556): Homolog of NCBI NO: 25402866 NR Description: protein F14D16.3 [imported] - Arabidopsis >gi|8778297|gb|AAF79306.1|AC068602_29 F14D16.3 [Arabidopsis
  misc_feature (578)..(654): Homolog of NCBI NO: 25402866 NR Description: protein F14D16.3 [imported] - Arabidopsis >gi|8778297|gb|AAF79306.1|AC068602_29 F14D16.3 [Arabidopsis
  misc_feature (677)..(964): Homolog of NCBI NO: 29367543 NR Description: putative zinc finger protein [Oryza sativa
  misc_feature (572)..(707): Homolog of NCBI NO: 25402866 NR Description: protein F14D16.3 [imported] - Arabidopsis >gi|8778297|gb|AAF79306.1|AC068602_29 F14D16.3 [Arabidopsis
  misc_feature (84)..(285): Homolog of NCBI NO: 25402866 NR Description: protein F14D16.3 [imported] - Arabidopsis >gi|8778297|gb|AAF79306.1|AC068602_29 F14D16.3 [Arabidopsis
MQTCLKKIVPGEKLLQQVIFTWLGGKSNTVASCRIEDSMFQCCLDSSSSMLPCKASREQCACEGSKIGKRKYPELTNFGSSDTLHPVDEIKLWHKSINKEMKEIADEARKIQLSGDFSDLSAFDERLQYIAEVCIFHSLAEDKIIFPAVDGEFSFSEEHDEEENQFNEFRCLIENIKSAGASSTSAAEFYTKLCSHADQIMETIQRHFHNEEIQVLPLARKNFSFKRQQELLYQSLCIMPLRLIERVLPWLTASLTEDEAKNFLKNLQAGAPKSDVALVTLFSGWACKGRKAGECLSPNGNGLCPVKTLSNIKEVNLQSCNACASVPCTSRSTKSCCQHQDKRPAKRTAVLSCEKKTTPHSTEVANGCKPSGNGRSCCVPDLGVNNNCLELGSLPAAKAMRSSSLNSAAPALNSSLFIWEMDSNSFGTGHAERPVATIFKFHKAISKDLEFLDVESGKLIDCDGTFIRQFIGRFHLLWGFYKAHSNAEDDILFPALESKETLHNVSHSYTLDHKQEEKLFGDIYSVLTELSILHEKLQSDSMMEDIAQTDTVRTDIDNGDCNKKYNELATKLQGMCKSIKITLDQHIFLEELELWPLFDKHFSIQEQDKIVGRIIGTTGAEVLQSMLPWVTSALSEDEQNRMMDTWKQATKNTMFDEWLNECWKGSPDSSSTETSKPSPQKDNDHQEILDQSGELFKPGWKDIFRMNQNELEAEIRKVYQDSTLDPRRKDYLVQNWRTSRWIAAQQKLPKEAETAVNGDVELGCSPSFRDPEKQIYGCEHYKRNCKLRAACCDQLFTCRFCHDKVSDHSMDRKLVTEMLCMRCLKVQPVGPICTTPSCDGFPMAKHYCSICKLFDDERAVYHCPFCNLCRVGEGLGIDFFHCMTCNCCLGMKLVNHKCLEKSLETNCPICCEFLFTSSEAVRALPCGHYMHSACFQAYTCSHYTCPICGKSLGDMAVYFGMLDALLAAEELPEEYKNRCQDILCNDCERKGTTRFHWLYHKCGSCGSYNTRVIKSETIPPDCSTSS

SEQ ID NO: 95821 - DNA, 945 bp, Arabidopsis thaliana
  misc_feature (1)..(945): Ceres Seq. ID no. 12730540
  misc_feature: MA Experiment ID: 20000184 Result: Up-regulated in Transcription
  misc_feature: MA Experiment 20000184 PARAMETER Experiment Name: At_Shoots__P Parameter: Age (day) Value: 7
  misc_feature: MA Experiment 20000184 PARAMETER Experiment Name: At_Shoots__P Parameter: Tissue Value: Shoots vs. Whole Plant
  misc_feature: MA Experiment ID: 20000185 Result: Up-regulated in Transcription
  misc_feature: MA Experiment 20000185 PARAMETER Experiment Name: At_Roots__P Parameter: Age (day) Value: 7 vs. 21
  misc_feature: MA Experiment 20000185 PARAMETER Experiment Name: At_Roots__P Parameter: Organism Value: A. thaliana
  misc_feature: MA Experiment 20000185 PARAMETER Experiment Name: At_Roots__P Parameter: Tissue Value: Roots vs. Whole Plant
  misc_feature: MA Experiment ID: 20000227 Result: Down-regulated in Transcription
  misc_feature: MA Experiment 20000227 PARAMETER Experiment Name: At_Root-Tips-vs-Tops_P Parameter: Tissue Value: Root Tips vs. Root Tops
  misc_feature: MA Experiment ID: 20000439 Result: Up-regulated in Transcription
  misc_feature: MA Experiment 20000439 PARAMETER Experiment Name: At_Roots__P Parameter: Age (day) Value: 14 vs. 21
  misc_feature: MA Experiment 20000439 PARAMETER Experiment Name: At_Roots__P Parameter: Organism Value: A. thaliana
  misc_feature: MA Experiment 20000439 PARAMETER Experiment Name: At_Roots__P Parameter: Tissue Value: Roots vs. Whole Plant
atggaagaaaatcttcctccggggttcagatttcatcctacagacgaggagctcataacgcattatctatgtcggaaagtctccgatataggattcaccggtaaagctgtcgtcgacgttgatctcaacaagtgtgaaccttgggatttgccagccaaggcttcaatgggagagaaagagtggtatttcttcagccaaagggatcggaaatatccaaccggtttaagaacaaaccgggcaacagaagctggttactggaaaaccaccgggaaagataaagaaatataccgaagtggagtgttggttgggatgaagaaaaccctagttttctacaaaggaagagctcccaaaggtgagaaaagcaattgggttatgcatgagtacaggcttgagagcaaacaacctttcaaccccacgaataaggaggaatgggtagtgtgtagggttttcgaaaagagcacggcagcaaagaaagcacaagaacaacaacctcaatcttctcaaccatcttttggatctccatgcgatgcaaactcatcaatggcaaatgagtttgaagatattgatgagcttccgaatctgaattcaaactcatcaaccatcgattacaataatcatatccatcaatattcgcaacgcaatgtttactcagaagacaacacaacaagtacggctggtctcaacatgaacatgaacatggctagtactaatcttcagtcttggacaacaagtctccttggtccgcctttatctccaatcaactctttgttgctcaaggctttccaaatcaggaactcttatagtttcccaaaagagatgatccccagtttcaatcattcttctcttcaacaaggagtctccaatatgatccaaaatgcttcaagttcgtctcaagtgcaaccccaaccgcaagaggaagcgtttaatatggactccatatggtga

SEQ ID NO: 95822 - protein, 314 aa, Arabidopsis thaliana
  peptide (1)..(314): Ceres Seq. ID no. 12730541
  misc_feature (5)..(131): Pfam Name: No apical meristem (NAM) protein Pfam Description: No apical meristem (NAM) protein
  misc_feature (1)..(314): Homolog of NCBI NO: 15229637 NR Description: organ separation protein, putative; protein id: [Arabidopsis thaliana] >gi|11994103|dbj|BAB01106.1| contains to NAM (no apical meristem) protein~gene_id:MYF24.12 [Arabidopsis
  misc_feature (26)..(314): Homolog of NCBI NO: 21389168 NR Description: nam-like protein 15 [Petunia x hybrida]
  misc_feature (1)..(189): Homolog of NCBI NO: 40737029 NR Description: putative OsNAC1 protein [Oryza sativa (japonica
  misc_feature (2)..(314): Homolog of NCBI NO: 1279640 NR Description: NAM [Petunia x hybrida]
MEENLPPGFRFHPTDEELITHYLCRKVSDIGFTGKAVVDVDLNKCEPWDLPAKASMGEKEWYFFSQRDRKYPTGLRTNRATEAGYWKTTGKDKEIYRSGVLVGMKKTLVFYKGRAPKGEKSNWVMHEYRLESKQPFNPTNKEEWVVCRVFEKSTAAKKAQEQQPQSSQPSFGSPCDANSSMANEFEDIDELPNLNSNSSTIDYNNHIHQYSQRNVYSEDNTTSTAGLNMNMNMASTNLQSWTTSLLGPPLSPINSLLLKAFQIRNSYSFPKEMIPSFNHSSLQQGVSNMIQNASSSSQVQPQPQEEAFNMDSIW

SEQ ID NO: 95823 - protein, 259 aa, Arabidopsis thaliana
  peptide (1)..(259): Ceres Seq. ID no. 12730542
  misc_feature (1)..(76): Pfam Name: No apical meristem (NAM) protein Pfam Description: No apical meristem (NAM) protein
  misc_feature (1)..(259): Homolog of NCBI NO: 15229637 NR Description: organ separation protein, putative; protein id: [Arabidopsis thaliana] >gi|11994103|dbj|BAB01106.1| contains to NAM (no apical meristem) protein~gene_id:MYF24.12 [Arabidopsis
  misc_feature (1)..(259): Homolog of NCBI NO: 21389168 NR Description: nam-like protein 15 [Petunia x hybrida]
  misc_feature (1)..(134): Homolog of NCBI NO: 40737029 NR Description: putative OsNAC1 protein [Oryza sativa (japonica
  misc_feature (1)..(259): Homolog of NCBI NO: 1279640 NR Description: NAM [Petunia x hybrida]
MGEKEWYFFSQRDRKYPTGLRTNRATEAGYWKTTGKDKEIYRSGVLVGMKKTLVFYKGRAPKGEKSNWVMHEYRLESKQPFNPTNKEEWVVCRVFEKSTAAKKAQEQQPQSSQPSFGSPCDANSSMANEFEDIDELPNLNSNSSTIDYNNHIHQYSQRNVYSEDNTTSTAGLNMNMNMASTNLQSWTTSLLGPPLSPINSLLLKAFQIRNSYSFPKEMIPSFNHSSLQQGVSNMIQNASSSSQVQPQPQEEAFNMDSIW

SEQ ID NO: 95824 - protein, 211 aa, Arabidopsis thaliana
  peptide (1)..(211): Ceres Seq. ID no. 12730543
  misc_feature (1)..(211): Homolog of NCBI NO: 15229637 NR Description: organ separation protein, putative; protein id: [Arabidopsis thaliana] >gi|11994103|dbj|BAB01106.1| contains to NAM (no apical meristem) protein~gene_id:MYF24.12 [Arabidopsis
  misc_feature (1)..(211): Homolog of NCBI NO: 21389168 NR Description: nam-like protein 15 [Petunia x hybrida]
  misc_feature (1)..(86): Homolog of NCBI NO: 40737029 NR Description: putative OsNAC1 protein [Oryza sativa (japonica
  misc_feature (1)..(211): Homolog of NCBI NO: 1279640 NR Description: NAM [Petunia x hybrida]
MKKTLVFYKGRAPKGEKSNWVMHEYRLESKQPFNPTNKEEWVVCRVFEKSTAAKKAQEQQPQSSQPSFGSPCDANSSMANEFEDIDELPNLNSNSSTIDYNNHIHQYSQRNVYSEDNTTSTAGLNMNMNMASTNLQSWTTSLLGPPLSPINSLLLKAFQIRNSYSFPKEMIPSFNHSSLQQGVSNMIQNASSSSQVQPQPQEEAFNMDSIW

SEQ ID NO: 95825 - DNA, 942 bp, Arabidopsis thaliana
  misc_feature (1)..(942): Ceres Seq. ID no. 12730576
  misc_feature: MA Experiment ID: 20000171 Result: Up-regulated in Transcription
  misc_feature: MA Experiment 20000171 PARAMETER Experiment Name: At_42deg_Heat_P Parameter: Age (day) Value: 14
  misc_feature: MA Experiment 20000171 PARAMETER Experiment Name: At_42deg_Heat_P Parameter: Organism Value: A. thaliana
  misc_feature: MA Experiment 20000171 PARAMETER Experiment Name: At_42deg_Heat_P Parameter: Plant Line Value: WS
  misc_feature: MA Experiment 20000171 PARAMETER Experiment Name: At_42deg_Heat_P Parameter: Temperature (deg C) Value: 42 vs. 22
  misc_feature: MA Experiment 20000171 PARAMETER Experiment Name: At_42deg_Heat_P Parameter: Timepoint (hr) Value: 1
  misc_feature: MA Experiment 20000171 PARAMETER Experiment Name: At_42deg_Heat_P Parameter: Tissue Value: Aerial
  misc_feature: MA Experiment ID: 20000173 Result: Up-regulated in Transcription
  misc_feature: MA Experiment 20000173 PARAMETER Experiment Name: At_42deg_Heat_P Parameter: Age (day) Value: 14
  misc_feature: MA Experiment 20000173 PARAMETER Experiment Name: At_42deg_Heat_P Parameter: Organism Value: A. thaliana
  misc_feature: MA Experiment 20000173 PARAMETER Experiment Name: At_42deg_Heat_P Parameter: Plant Line Value: WS
  misc_feature: MA Experiment 20000173 PARAMETER Experiment Name: At_42deg_Heat_P Parameter: Temperature (deg C) Value: 42 vs. 22
  misc_feature: MA Experiment 20000173 PARAMETER Experiment Name: At_42deg_Heat_P Parameter: Timepoint (hr) Value: 6
  misc_feature: MA Experiment 20000173 PARAMETER Experiment Name: At_42deg_Heat_P Parameter: Tissue Value: Aerial
  misc_feature: MA Experiment ID: 20000437 Result: Up-regulated in Transcription
  misc_feature: MA Experiment 20000437 PARAMETER Experiment Name: At_Drought_P Parameter: Age (day) Value: 8
  misc_feature: MA Experiment 20000437 PARAMETER Experiment Name: At_Drought_P Parameter: Organism Value: A. thaliana
  misc_feature: MA Experiment 20000437 PARAMETER Experiment Name: At_Drought_P Parameter: Plant Line Value: WS
  misc_feature: MA Experiment 20000437 PARAMETER Experiment Name: At_Drought_P Parameter: Timepoint (hr) Value: 24
  misc_feature: MA Experiment 20000437 PARAMETER Experiment Name: At_Drought_P Parameter: Tissue Value: Whole Plant
  misc_feature: MA Experiment 20000437 PARAMETER Experiment Name: At_Drought_P Parameter: Treatment Value: Drought vs. No Drought
atgtctctcttctttattttattgtgcatctttctgagtacatttctgaagatttgctttgggaattgtttgtacaagccggatgagttggtaattagcgtctttattcaacaaaaatttggattcgttcaattccataatgaggaagatgctgactatgcaattaaggtttttaacatgattaagctctatggggagcctatacgtgttaaaaaggcatctcaagataagaagagcttggatgttggtgctaacctgtttcttggaaaccttgatcctgatgtggatgaaaagatgttgcatgatacttttagcgcgtttggtgtaatttctgatcatcctaagataatgcgagatcccgatactggaaacccacgaggttttggtttcattagctatgactcttttgaagcatctgatgctgctattgaggcaatgactggacaatatctgagtaatcgtcaaataacagtcacttatgcatacaagaaagacaccaaaggagagcgccacggtactcctgaagagaggcttttggctgcaaattcccaaagaagcagaccccataagctattcgcaactggcccttctacgcataatgctcctaaagttaacggtctacaacctgtaccaatcccgggtccacgtccaccaccacaaccacaagtgtatcaaactcagccaccatcttggccatctcagccacaacaacaatacggcttagcggttcgaccacctatgcagttccgtccgcctcaaggtatgcagtcgcaaccaccacctcctcagtttcctcatcaccaacaaggttttggttgtccgaggcagccaccaccatatcaagccatgggaatgcaccaacatggttggccaccgcaacatattcagcaacatggtgggttagtcatattaatattaaataacaaatctttgggagattga

SEQ ID NO: 95826 - protein, 313 aa, Arabidopsis thaliana
  peptide (1)..(313): Ceres Seq. ID no. 12730577
  misc_feature (86)..(158): Pfam Name: RNA recognition motif. (a.k.a. RRM, RBD, or RNP domain) Pfam Description: RNA recognition motif. (a.k.a. RRM, RBD, or RNP
  misc_feature (1)..(313): Homolog of NCBI NO: 22325678 NR Description: pre-mRNA splicing factor SF3b, putative; protein
  misc_feature (1)..(313): Homolog of NCBI NO: 25411571 NR Description: probable spliceosome associated protein - Arabidopsis thaliana >gi|4263832|gb|AAD15475.1| putative
  misc_feature (24)..(300): Homolog of NCBI NO: 15224186 NR Description: pre-mRNA splicing factor SF3b, putative; protein At2g18510.1, supported by cDNA: 38968., supported by cDNA: [Arabidopsis thaliana] >gi|25386562|pir||B84565 probable
  misc_feature (24)..(300): Homolog of NCBI NO: 21593441 NR Description: putative spliceosome associated protein
  misc_feature (24)..(300): Homolog of NCBI NO: 14334958 NR Description: putative spliceosome associated protein
  misc_feature (24)..(301): Homolog of NCBI NO: 37535012 NR Description: putative spliceosomal protein [Oryza sativa
  misc_feature (9)..(296): Homolog of NCBI NO: 1279382 NR Description: spliceosomal protein [Drosophila melanogaster]
  misc_feature (38)..(285): Homolog of NCBI NO: 24119253 NR Description: splicing factor 3b, subunit 4 [Danio rerio]
  misc_feature (38)..(285): Homolog of NCBI NO: 34193906 NR Description: Splicing factor 3b, subunit 4 [Danio rerio]
  misc_feature (38)..(299): Homolog of NCBI NO: 5032069 NR Description: splicing factor 3b, subunit 4; protein (U2 snRNP); splicing factor 3b, subunit 4, 49kD;
MSLFFILLCIFLSTFLKICFGNCLYKPDELVISVFIQQKFGFVQFHNEEDADYAIKVFNMIKLYGEPIRVKKASQDKKSLDVGANLFLGNLDPDVDEKMLHDTFSAFGVISDHPKIMRDPDTGNPRGFGFISYDSFEASDAAIEAMTGQYLSNRQITVTYAYKKDTKGERHGTPEERLLAANSQRSRPHKLFATGPSTHNAPKVNGLQPVPIPGPRPPPQPQVYQTQPPSWPSQPQQQYGLAVRPPMQFRPPQGMQSQPPPPQFPHHQQGFGCPRQPPPYQAMGMHQHGWPPQHIQQHGGLVILILNNKSLGD

SEQ ID NO: 95827 - protein, 254 aa, Arabidopsis thaliana
  peptide (1)..(254): Ceres Seq. ID no. 12730578
  misc_feature (27)..(99): Pfam Name: RNA recognition motif. (a.k.a. RRM, RBD, or RNP domain) Pfam Description: RNA recognition motif. (a.k.a. RRM, RBD, or RNP
  misc_feature (1)..(254): Homolog of NCBI NO: 22325678 NR Description: pre-mRNA splicing factor SF3b, putative; protein
  misc_feature (1)..(254): Homolog of NCBI NO: 25411571 NR Description: probable spliceosome associated protein - Arabidopsis thaliana >gi|4263832|gb|AAD15475.1| putative
  misc_feature (1)..(241): Homolog of NCBI NO: 15224186 NR Description: pre-mRNA splicing factor SF3b, putative; protein At2g18510.1, supported by cDNA: 38968., supported by cDNA: [Arabidopsis thaliana] >gi|25386562|pir||B84565 probable
  misc_feature (1)..(241): Homolog of NCBI NO: 21593441 NR Description: putative spliceosome associated protein
  misc_feature (1)..(241): Homolog of NCBI NO: 14334958 NR Description: putative spliceosome associated protein
  misc_feature (1)..(242): Homolog of NCBI NO: 37535012 NR Description: putative spliceosomal protein [Oryza sativa
  misc_feature (1)..(237): Homolog of NCBI NO: 1279382 NR Description: spliceosomal protein [Drosophila melanogaster]
  misc_feature (1)..(226): Homolog of NCBI NO: 24119253 NR Description: splicing factor 3b, subunit 4 [Danio rerio]
  misc_feature (1)..(226): Homolog of NCBI NO: 34193906 NR Description: Splicing factor 3b, subunit 4 [Danio rerio]
  misc_feature (1)..(240): Homolog of NCBI NO: 5032069 NR Description: splicing factor 3b, subunit 4; protein (U2 snRNP); splicing factor 3b, subunit 4, 49kD;
MIKLYGEPIRVKKASQDKKSLDVGANLFLGNLDPDVDEKMLHDTFSAFGVISDHPKIMRDPDTGNPRGFGFISYDSFEASDAAIEAMTGQYLSNRQITVTYAYKKDTKGERHGTPEERLLAANSQRSRPHKLFATGPSTHNAPKVNGLQPVPIPGPRPPPQPQVYQTQPPSWPSQPQQQYGLAVRPPMQFRPPQGMQSQPPPPQFPHHQQGFGCPRQPPPYQAMGMHQHGWPPQHIQQHGGLVILILNNKSLGD

SEQ ID NO: 95828 - protein, 215 aa, Arabidopsis thaliana
  peptide (1)..(215): Ceres Seq. ID no. 12730579
  misc_feature (1)..(60): Pfam Name: RNA recognition motif. (a.k.a. RRM, RBD, or RNP domain) Pfam Description: RNA recognition motif. (a.k.a. RRM, RBD, or RNP
  misc_feature (1)..(215): Homolog of NCBI NO: 22325678 NR Description: pre-mRNA splicing factor SF3b, putative; protein
  misc_feature (1)..(215): Homolog of NCBI NO: 25411571 NR Description: probable spliceosome associated protein - Arabidopsis thaliana >gi|4263832|gb|AAD15475.1| putative
  misc_feature (1)..(202): Homolog of NCBI NO: 15224186 NR Description: pre-mRNA splicing factor SF3b, putative; protein At2g18510.1, supported by cDNA: 38968., supported by cDNA: [Arabidopsis thaliana] >gi|25386562|pir||B84565 probable
  misc_feature (1)..(202): Homolog of NCBI NO: 21593441 NR Description: putative spliceosome associated protein
  misc_feature (1)..(202): Homolog of NCBI NO: 14334958 NR Description: putative spliceosome associated protein
  misc_feature (1)..(203): Homolog of NCBI NO: 37535012 NR Description: putative spliceosomal protein [Oryza sativa
  misc_feature (1)..(198): Homolog of NCBI NO: 1279382 NR Description: spliceosomal protein [Drosophila melanogaster]
  misc_feature (1)..(187): Homolog of NCBI NO: 24119253 NR Description: splicing factor 3b, subunit 4 [Danio rerio]
  misc_feature (1)..(187): Homolog of NCBI NO: 34193906 NR Description: Splicing factor 3b, subunit 4 [Danio rerio]
  misc_feature (1)..(201): Homolog of NCBI NO: 5032069 NR Description: splicing factor 3b, subunit 4; protein (U2 snRNP); splicing factor 3b, subunit 4, 49kD;
MLHDTFSAFGVISDHPKIMRDPDTGNPRGFGFISYDSFEASDAAIEAMTGQYLSNRQITVTYAYKKDTKGERHGTPEERLLAANSQRSRPHKLFATGPSTHNAPKVNGLQPVPIPGPRPPPQPQVYQTQPPSWPSQPQQQYGLAVRPPMQFRPPQGMQSQPPPPQFPHHQQGFGCPRQPPPYQAMGMHQHGWPPQHIQQHGGLVILILNNKSLGD

SEQ ID NO: 95829 - DNA, 833 bp, Arabidopsis thaliana
  misc_feature (1)..(833): Ceres Seq. ID no. 12730580
  misc_feature: MA Experiment ID: 20000314 Result: Down-regulated in Transcription
  misc_feature: MA Experiment 20000314 PARAMETER Experiment Name: At_14day_Shoots-Roots_Sub_P Parameter: Age (day) Value: 14
  misc_feature: MA Experiment 20000314 PARAMETER Experiment Name: At_14day_Shoots-Roots_Sub_P Parameter: Organism Value: A. thaliana
  misc_feature: MA Experiment 20000314 PARAMETER Experiment Name: At_14day_Shoots-Roots_Sub_P Parameter: Plant Line Value: WS
  misc_feature: MA Experiment 20000314 PARAMETER Experiment Name: At_14day_Shoots-Roots_Sub_P Parameter: Tissue Value: Roots vs. Whole Plant
  misc_feature: MA Experiment ID: 20000315 Result: Down-regulated in Transcription
  misc_feature: MA Experiment 20000315 PARAMETER Experiment Name: At_14day_Shoots-Roots_Sub_P Parameter: Age (day) Value: 14
  misc_feature: MA Experiment 20000315 PARAMETER Experiment Name: At_14day_Shoots-Roots_Sub_P Parameter: Organism Value: A. thaliana
  misc_feature: MA Experiment 20000315 PARAMETER Experiment Name: At_14day_Shoots-Roots_Sub_P Parameter: Plant Line Value: WS
  misc_feature: MA Experiment 20000315 PARAMETER Experiment Name: At_14day_Shoots-Roots_Sub_P Parameter: Tissue Value: Shoots vs. Whole Plant
  misc_feature: MA Experiment ID: 20000327 Result: Down-regulated in Transcription
  misc_feature: MA Experiment 20000327 PARAMETER Experiment Name: At_42deg_Heat_Sub_P Parameter: Age (day) Value: 14
  misc_feature: MA Experiment 20000327 PARAMETER Experiment Name: At_42deg_Heat_Sub_P Parameter: Organism Value: A. thaliana
  misc_feature: MA Experiment 20000327 PARAMETER Experiment Name: At_42deg_Heat_Sub_P Parameter: Plant Line Value: WS
  misc_feature: MA Experiment 20000327 PARAMETER Experiment Name: At_42deg_Heat_Sub_P Parameter: Temperature (deg C) Value: 42 vs. 22
  misc_feature: MA Experiment 20000327 PARAMETER Experiment Name: At_42deg_Heat_Sub_P Parameter: Timepoint (hr) Value: 1
  misc_feature: MA Experiment 20000327 PARAMETER Experiment Name: At_42deg_Heat_Sub_P Parameter: Tissue Value: Aerial
  misc_feature: MA Experiment ID: 20000328 Result: Down-regulated in Transcription
  misc_feature: MA Experiment 20000328 PARAMETER Experiment Name: At_42deg_Heat_Sub_P Parameter: Age (day) Value: 14
  misc_feature: MA Experiment 20000328 PARAMETER Experiment Name: At_42deg_Heat_Sub_P Parameter: Organism Value: A. thaliana
  misc_feature: MA Experiment 20000328 PARAMETER Experiment Name: At_42deg_Heat_Sub_P Parameter: Plant Line Value: WS
  misc_feature: MA Experiment 20000328 PARAMETER Experiment Name: At_42deg_Heat_Sub_P Parameter: Temperature (deg C) Value: 42 vs. 22
  misc_feature: MA Experiment 20000328 PARAMETER Experiment Name: At_42deg_Heat_Sub_P Parameter: Timepoint (hr) Value: 6
  misc_feature: MA Experiment 20000328 PARAMETER Experiment Name: At_42deg_Heat_Sub_P Parameter: Tissue Value: Aerial
  misc_feature: MA Experiment ID: 20000347 Result: Up-regulated in Transcription
  misc_feature: MA Experiment 20000347 PARAMETER Experiment Name: At_2mM_SA_Sub_P Parameter: Age (day) Value: 14
  misc_feature: MA Experiment 20000347 PARAMETER Experiment Name: At_2mM_SA_Sub_P Parameter: Organism Value: A. thaliana
  misc_feature: MA Experiment 20000347 PARAMETER Experiment Name: At_2mM_SA_Sub_P Parameter: Plant Line Value: WS
  misc_feature: MA Experiment 20000347 PARAMETER Experiment Name: At_2mM_SA_Sub_P Parameter: Timepoint (hr) Value: 6
  misc_feature: MA Experiment 20000347 PARAMETER Experiment Name: At_2mM_SA_Sub_P Parameter: Tissue Value: Aerial
  misc_feature: MA Experiment 20000347 PARAMETER Experiment Name: At_2mM_SA_Sub_P Parameter: Treatment Value: 2mM SA vs. No Treatment
  misc_feature: MA Experiment ID: 20000355 Result: Down-regulated in Transcription
  misc_feature: MA Experiment 20000355 PARAMETER Experiment Name: At_Siliques_Sub_P Parameter: Age (day) Value: 21
  misc_feature: MA Experiment 20000355 PARAMETER Experiment Name: At_Siliques_Sub_P Parameter: Organism Value: A. thaliana
  misc_feature: MA Experiment 20000355 PARAMETER Experiment Name: At_Siliques_Sub_P Parameter: Plant Line Value: WS
  misc_feature: MA Experiment 20000355 PARAMETER Experiment Name: At_Siliques_Sub_P Parameter: Tissue Value: Less Than 5mm Siliques vs. Whole Plant
  misc_feature: MA Experiment ID: 20000440 Result: Down-regulated in Transcription
  misc_feature: MA Experiment 20000440 PARAMETER Experiment Name: At_Closed-Flower__Sub_P Parameter: Tissue Value: Closed Flower vs. Whole Plant
atttcaaagcaaaacaaaagagagagagtgtatccatttttggaggggaaaacaaagtatgcagcagccctgtgtgatagtgggttcgaagtactgctcaccaaaccctgtaggtttggcgatcgtccgtaaggtgatgaagataacggacggtaacttcgtgataacgagtgcggacggtaagttattgttcaaggtgaaggatcctttgtttagtcttcacggcaagaggatcttgctggattgttctggagctaaggtcttaactttgagagggaagatgatgaccatgcatgacaggtggcaagtgtttagaggagggagtacggaggagggtgctctactatacacggtgaaaagatcgtcgatgattcagctagcccctaaacttgaggtgtttttggctaacaacgtagaggagaagatatgtgatttcaaagtcaaaggggcctggctcgacgactcttgtgttgtctacgccggcgattctgacaccattattgcccacatgtgcggaaagcaaacgatgcgaggctttttcttcggaaaggaccatttctccgtcactgttgataagaacgttgattatgccttcattgcatctctcattgtcatccttgtagaaatagaaaaagctggttttattacgaaaatgacaacacaaatgataataggtttttaggtatcaatttttaaagcactatcatatcgttgtagtaatttaggttgtcaatacaatttggtgtaatgcactagcatcgtttgcttttcgtacatctgcattcaaaccataccaattttatttcaagttttaacaattaataaaacattgg

SEQ ID NO: 95830 - protein, 226 aa, Arabidopsis thaliana
  peptide (1)..(226): Ceres Seq. ID no. 12730581
  misc_feature (24)..(205): Pfam Name: Protein of unknown function (DUF567) Pfam Description: Protein of unknown function (DUF567)
  misc_feature (20)..(226): Homolog of NCBI NO: 15225960 NR Description: unknown protein; protein id: At2g14560.1, by cDNA: gi_17979320 [Arabidopsis thaliana]
  misc_feature (20)..(226): Homolog of NCBI NO: 17979321 NR Description: unknown protein [Arabidopsis thaliana]
  misc_feature (25)..(206): Homolog of NCBI NO: 9665105 NR Description: Hypothetical protein [Arabidopsis thaliana]
  misc_feature (25)..(206): Homolog of NCBI NO: 15217694 NR Description: unknown protein; protein id: At1g33840.1
  misc_feature (16)..(211): Homolog of NCBI NO: 30679390 NR Description: expressed protein [Arabidopsis thaliana]
  misc_feature (25)..(170): Homolog of NCBI NO: 25352417 NR Description: hypothetical protein T3M13.14 - Arabidopsis
  misc_feature (16)..(170): Homolog of NCBI NO: 18413737 NR Description: expressed protein; protein id: At5g01750.1,
  misc_feature (16)..(170): Homolog of NCBI NO: 21553506 NR Description: unknown [Arabidopsis thaliana]
  misc_feature (128)..(211): Homolog of NCBI NO: 15229837 NR Description: hypothetical protein; protein id: At3g11740.1 thaliana] >gi|6671930|gb|AAF23190.1|AC016795_3 hypothetical
  misc_feature (26)..(91): Homolog of NCBI NO: 15229837 NR Description: hypothetical protein; protein id: At3g11740.1 thaliana] >gi|6671930|gb|AAF23190.1|AC016795_3 hypothetical
FQSKTKERECIHFWRGKQSMQQPCVIVGSKYCSPNPVGLAIVRKVMKITDGNFVITSADGKLLFKVKDPLFSLHGKRILLDCSGAKVLTLRGKMMTMHDRWQVFRGGSTEEGALLYTVKRSSMIQLAPKLEVFLANNVEEKICDFKVKGAWLDDSCVVYAGDSDTIIAHMCGKQTMRGFFFGKDHFSVTVDKNVDYAFIASLIVILVEIEKAGFITKMTTQMIIGF

SEQ ID NO: 95831 - protein, 207 aa, Arabidopsis thaliana
  peptide (1)..(207): Ceres Seq. ID no. 12730582
  misc_feature (5)..(186): Pfam Name: Protein of unknown function (DUF567) Pfam Description: Protein of unknown function (DUF567)
  misc_feature (1)..(207): Homolog of NCBI NO: 15225960 NR Description: unknown protein; protein id: At2g14560.1, by cDNA: gi_17979320 [Arabidopsis thaliana]
  misc_feature (1)..(207): Homolog of NCBI NO: 17979321 NR Description: unknown protein [Arabidopsis thaliana]
  misc_feature (6)..(187): Homolog of NCBI NO: 9665105 NR Description: Hypothetical protein [Arabidopsis thaliana]
  misc_feature (6)..(187): Homolog of NCBI NO: 15217694 NR Description: unknown protein; protein id: At1g33840.1
  misc_feature (1)..(192): Homolog of NCBI NO: 30679390 NR Description: expressed protein [Arabidopsis thaliana]
  misc_feature (6)..(151): Homolog of NCBI NO: 25352417 NR Description: hypothetical protein T3M13.14 - Arabidopsis
  misc_feature (1)..(151): Homolog of NCBI NO: 18413737 NR Description: expressed protein; protein id: At5g01750.1,
  misc_feature (1)..(151): Homolog of NCBI NO: 21553506 NR Description: unknown [Arabidopsis thaliana]
  misc_feature (109)..(192): Homolog of NCBI NO: 15229837 NR Description: hypothetical protein; protein id: At3g11740.1 thaliana] >gi|6671930|gb|AAF23190.1|AC016795_3 hypothetical
  misc_feature (7)..(72): Homolog of NCBI NO: 15229837 NR Description: hypothetical protein; protein id: At3g11740.1 thaliana] >gi|6671930|gb|AAF23190.1|AC016795_3 hypothetical
MQQPCVIVGSKYCSPNPVGLAIVRKVMKITDGNFVITSADGKLLFKVKDPLFSLHGKRILLDCSGAKVLTLRGKMMTMHDRWQVFRGGSTEEGALLYTVKRSSMIQLAPKLEVFLANNVEEKICDFKVKGAWLDDSCVVYAGDSDTIIAHMCGKQTMRGFFFGKDHFSVTVDKNVDYAFIASLIVILVEIEKAGFITKMTTQMIIGF

SEQ ID NO: 95832 - protein, 181 aa, Arabidopsis thaliana
  peptide (1)..(181): Ceres Seq. ID no. 12730583
  misc_feature (1)..(160): Pfam Name: Protein of unknown function (DUF567) Pfam Description: Protein of unknown function (DUF567)
  misc_feature (1)..(181): Homolog of NCBI NO: 15225960 NR Description: unknown protein; protein id: At2g14560.1, by cDNA: gi_17979320 [Arabidopsis thaliana]
  misc_feature (1)..(181): Homolog of NCBI NO: 17979321 NR Description: unknown protein [Arabidopsis thaliana]
  misc_feature (1)..(161): Homolog of NCBI NO: 9665105 NR Description: Hypothetical protein [Arabidopsis thaliana]
  misc_feature (1)..(161): Homolog of NCBI NO: 15217694 NR Description: unknown protein; protein id: At1g33840.1
  misc_feature (1)..(166): Homolog of NCBI NO: 30679390 NR Description: expressed protein [Arabidopsis thaliana]
  misc_feature (1)..(125): Homolog of NCBI NO: 25352417 NR Description: hypothetical protein T3M13.14 - Arabidopsis
  misc_feature (1)..(125): Homolog of NCBI NO: 18413737 NR Description: expressed protein; protein id: At5g01750.1,
  misc_feature (1)..(125): Homolog of NCBI NO: 21553506 NR Description: unknown [Arabidopsis thaliana]
  misc_feature (83)..(166): Homolog of NCBI NO: 15229837 NR Description: hypothetical protein; protein id: At3g11740.1 thaliana] >gi|6671930|gb|AAF23190.1|AC016795_3 hypothetical
  misc_feature (1)..(46): Homolog of NCBI NO: 15229837 NR Description: hypothetical protein; protein id: At3g11740.1 thaliana] >gi|6671930|gb|AAF23190.1|AC016795_3 hypothetical
MKITDGNFVITSADGKLLFKVKDPLFSLHGKRILLDCSGAKVLTLRGKMMTMHDRWQVFRGGSTEEGALLYTVKRSSMIQLAPKLEVFLANNVEEKICDFKVKGAWLDDSCVVYAGDSDTIIAHMCGKQTMRGFFFGKDHFSVTVDKNVDYAFIASLIVILVEIEKAGFITKMTTQMIIGF

SEQ ID NO: 95833 - DNA, 671 bp, Arabidopsis thaliana
  misc_feature (1)..(671): Ceres Seq. ID no. 12730584
  misc_feature: MA Experiment ID: 20000184 Result: Up-regulated in Transcription
  misc_feature: MA Experiment 20000184 PARAMETER Experiment Name: At_Shoots__P Parameter: Age (day) Value: 7
  misc_feature: MA Experiment 20000184 PARAMETER Experiment Name: At_Shoots__P Parameter: Tissue Value: Shoots vs. Whole Plant
aaagcttggaaatagccattatttcaactaagaaaaatgaaagtcacaagctactctcgaattctaataatcttggcagcacttgtgggtgctcttgttgttcccttgaaggctcaagacagccagcaagactatgtaaatgctcacaaccaggcacgatcgcagataggcgtaggccccatgcagtgggacgaaggacttgcagcctacgctcggaactacgcaaaccaactaaaaggagactgcagactcgtacattcccgtgggccttacggggagaacttggcaaagagtggcggtgacttgtctggtgttgctgccgtgaacttgtgggttaacgagaaggctaactacaactacgatacaaacacgtgcaacggagtttgcggtcactacactcaggtcgtttggagaaattctgtgagactcggatgtgctaaagtgagatgtaacaatggtggaaccatcatcagttgcaattatgatcctccggggaactatgcgaaccagaagccttactgatgtgtgatcatgttacacatatggcatatacacacacatataaaacacggacctgcacaaaggacgtgaatatatatttcaataagaagcatcatatgcaggatgtgtataaatatttattaaaaaatacaaataagttaaaggcctct

SEQ ID NO: 95834 - protein, 161 aa, Arabidopsis thaliana
  peptide (1)..(161): Ceres Seq. ID no. 12730585
  misc_feature (34)..(148): Pfam Name: SCP-like extracellular protein Pfam Description: SCP-like extracellular protein
  misc_feature (1)..(161): Homolog of NCBI NO: 15225965 NR Description: putative pathogenesis related-1 (PR1) protein; id: At2g14580.1, supported by cDNA: gi_17529119 [Arabidopsis
  misc_feature (1)..(161): Homolog of NCBI NO: 15225974 NR Description: pathogenesis-related PR-1-like protein; protein At2g14610.1, supported by cDNA: gi_166860, supported by cDNA:
  misc_feature (1)..(161): Homolog of NCBI NO: 2129798 NR Description: pathogenesis-related protein 1a homolog precursor
  misc_feature (2)..(161): Homolog of NCBI NO: 23630526 NR Description: pathogenesis-related protein 1 [Brassica juncea]
  misc_feature (1)..(161): Homolog of NCBI NO: 7442176 NR Description: pathogenesis-related protein PR1 - rape
  misc_feature (1)..(161): Homolog of NCBI NO: 15235056 NR Description: pathogenesis-related protein 1 precursor, 19.3K; id: At4g33720.1, supported by cDNA: 5743., supported by cDNA:
  misc_feature (1)..(160): Homolog of NCBI NO: 1228950 NR Description: pathogenesis-related protein 1 [Arabidopsis
  misc_feature (6)..(161): Homolog of NCBI NO: 13560653 NR Description: pathogenesis-related protein PR-1 precursor
  misc_feature (6)..(161): Homolog of NCBI NO: 282959 NR Description: pathogenesis-related protein 1b - common tobacco
  misc_feature (11)..(161): Homolog of NCBI NO: 19944 NR Description: PR-1a protein (AA 1 - 168) [Nicotiana tabacum]
MKVTSYSRILIILAALVGALVVPLKAQDSQQDYVNAHNQARSQIGVGPMQWDEGLAAYARNYANQLKGDCRLVHSRGPYGENLAKSGGDLSGVAAVNLWVNEKANYNYDTNTCNGVCGHYTQVVWRNSVRLGCAKVRCNNGGTIISCNYDPPGNYANQKPY

SEQ ID NO: 95835 - protein, 113 aa, Arabidopsis thaliana
  peptide (1)..(113): Ceres Seq. ID no. 12730586
  misc_feature (1)..(100): Pfam Name: SCP-like extracellular protein Pfam Description: SCP-like extracellular protein
  misc_feature (1)..(113): Homolog of NCBI NO: 15225965 NR Description: putative pathogenesis related-1 (PR1) protein; id: At2g14580.1, supported by cDNA: gi_17529119 [Arabidopsis
  misc_feature (1)..(113): Homolog of NCBI NO: 15225974 NR Description: pathogenesis-related PR-1-like protein; protein At2g14610.1, supported by cDNA: gi_166860, supported by cDNA:
  misc_feature (1)..(113): Homolog of NCBI NO: 2129798 NR Description: pathogenesis-related protein 1a homolog precursor
  misc_feature (1)..(113): Homolog of NCBI NO: 23630526 NR Description: pathogenesis-related protein 1 [Brassica juncea]
  misc_feature (1)..(113): Homolog of NCBI NO: 7442176 NR Description: pathogenesis-related protein PR1 - rape
  misc_feature (1)..(113): Homolog of NCBI NO: 15235056 NR Description: pathogenesis-related protein 1 precursor, 19.3K; id: At4g33720.1, supported by cDNA: 5743., supported by cDNA:
  misc_feature (1)..(112): Homolog of NCBI NO: 1228950 NR Description: pathogenesis-related protein 1 [Arabidopsis
  misc_feature (1)..(113): Homolog of NCBI NO: 13560653 NR Description: pathogenesis-related protein PR-1 precursor
  misc_feature (1)..(113): Homolog of NCBI NO: 282959 NR Description: pathogenesis-related protein 1b - common tobacco
  misc_feature (1)..(113): Homolog of NCBI NO: 19944 NR Description: PR-1a protein (AA 1 - 168) [Nicotiana tabacum]
MQWDEGLAAYARNYANQLKGDCRLVHSRGPYGENLAKSGGDLSGVAAVNLWVNEKANYNYDTNTCNGVCGHYTQVVWRNSVRLGCAKVRCNNGGTIISCNYDPPGNYANQKPY

SEQ ID NO: 95836 - protein, 99 aa, Arabidopsis thaliana
  peptide (1)..(99): Ceres Seq. ID no. 12730587
SLEIAIISTKKNESHKLLSNSNNLGSTCGCSCCSLEGSRQPARLCKCSQPGTIADRRRPHAVGRRTCSLRSELRKPTKRRLQTRTFPWALRGELGKEWR

SEQ ID NO: 95837 - DNA, 760 bp, Arabidopsis thaliana
  misc_feature (1)..(760): Ceres Seq. ID no. 12730588
  misc_feature: MA Experiment ID: 20000166 Result: Up-regulated in Transcription
  misc_feature: MA Experiment 20000166 PARAMETER Experiment Name: At_100uM_ABA_P Parameter: Age (day) Value: 14
  misc_feature: MA Experiment 20000166 PARAMETER Experiment Name: At_100uM_ABA_P Parameter: Organism Value: A. thaliana
  misc_feature: MA Experiment 20000166 PARAMETER Experiment Name: At_100uM_ABA_P Parameter: Plant Line Value: WS
  misc_feature: MA Experiment 20000166 PARAMETER Experiment Name: At_100uM_ABA_P Parameter: Timepoint (hr) Value: 1
  misc_feature: MA Experiment 20000166 PARAMETER Experiment Name: At_100uM_ABA_P Parameter: Tissue Value: Aerial
  misc_feature: MA Experiment 20000166 PARAMETER Experiment Name: At_100uM_ABA_P Parameter: Treatment Value: 100uM ABA vs. No Treatment
  misc_feature: MA Experiment ID: 20000171 Result: Down-regulated in Transcription
  misc_feature: MA Experiment 20000171 PARAMETER Experiment Name: At_42deg_Heat_P Parameter: Age (day) Value: 14
  misc_feature: MA Experiment 20000171 PARAMETER Experiment Name: At_42deg_Heat_P Parameter: Organism Value: A. thaliana
  misc_feature: MA Experiment 20000171 PARAMETER Experiment Name: At_42deg_Heat_P Parameter: Plant Line Value: WS
  misc_feature: MA Experiment 20000171 PARAMETER Experiment Name: At_42deg_Heat_P Parameter: Temperature (deg C) Value: 42 vs. 22
  misc_feature: MA Experiment 20000171 PARAMETER Experiment Name: At_42deg_Heat_P Parameter: Timepoint (hr) Value: 1
  misc_feature: MA Experiment 20000171 PARAMETER Experiment Name: At_42deg_Heat_P Parameter: Tissue Value: Aerial
  misc_feature: MA Experiment ID: 20000173 Result: Down-regulated in Transcription
  misc_feature: MA Experiment 20000173 PARAMETER Experiment Name: At_42deg_Heat_P Parameter: Age (day) Value: 14
  misc_feature: MA Experiment 20000173 PARAMETER Experiment Name: At_42deg_Heat_P Parameter: Organism Value: A. thaliana
  misc_feature: MA Experiment 20000173 PARAMETER Experiment Name: At_42deg_Heat_P Parameter: Plant Line Value: WS
  misc_feature: MA Experiment 20000173 PARAMETER Experiment Name: At_42deg_Heat_P Parameter: Temperature (deg C) Value: 42 vs. 22
  misc_feature: MA Experiment 20000173 PARAMETER Experiment Name: At_42deg_Heat_P Parameter: Timepoint (hr) Value: 6
  misc_feature: MA Experiment 20000173 PARAMETER Experiment Name: At_42deg_Heat_P Parameter: Tissue Value: Aerial
  misc_feature: MA Experiment ID: 20000453 Result: Down-regulated in Transcription
  misc_feature: MA Experiment 20000453 PARAMETER Experiment Name: At_100uM_ABA_P Parameter: Age (day) Value: 15
  misc_feature: MA Experiment 20000453 PARAMETER Experiment Name: At_100uM_ABA_P Parameter: Organism Value: A. thaliana
  misc_feature: MA Experiment 20000453 PARAMETER Experiment Name: At_100uM_ABA_P Parameter: Plant Line Value: WS
  misc_feature: MA Experiment 20000453 PARAMETER Experiment Name: At_100uM_ABA_P Parameter: Timepoint (hr) Value: 24
  misc_feature: MA Experiment 20000453 PARAMETER Experiment Name: At_100uM_ABA_P Parameter: Tissue Value: Aerial
  misc_feature: MA Experiment 20000453 PARAMETER Experiment Name: At_100uM_ABA_P Parameter: Treatment Value: 100uM ABA vs. No Treatment
  misc_feature: MA Experiment ID: 20000455 Result: Down-regulated in Transcription
  misc_feature: MA Experiment 20000455 PARAMETER Experiment Name: At_100uM_ABA_P Parameter: Age (day) Value: 16
  misc_feature: MA Experiment 20000455 PARAMETER Experiment Name: At_100uM_ABA_P Parameter: Organism Value: A. thaliana
  misc_feature: MA Experiment 20000455 PARAMETER Experiment Name: At_100uM_ABA_P Parameter: Plant Line Value: WS
  misc_feature: MA Experiment 20000455 PARAMETER Experiment Name: At_100uM_ABA_P Parameter: Timepoint (hr) Value: 48
  misc_feature: MA Experiment 20000455 PARAMETER Experiment Name: At_100uM_ABA_P Parameter: Tissue Value: Aerial
  misc_feature: MA Experiment 20000455 PARAMETER Experiment Name: At_100uM_ABA_P Parameter: Treatment Value: 100uM ABA vs. No Treatment
  misc_feature: MA Experiment ID: 20000460 Result: Down-regulated in Transcription
  misc_feature: MA Experiment 20000460 PARAMETER Experiment Name: At_10percent_PEG_P Parameter: Age (day) Value: 12
  misc_feature: MA Experiment 20000460 PARAMETER Experiment Name: At_10percent_PEG_P Parameter: Organism Value: A. thaliana
  misc_feature: MA Experiment 20000460 PARAMETER Experiment Name: At_10percent_PEG_P Parameter: Plant Line Value: WS
  misc_feature: MA Experiment 20000460 PARAMETER Experiment Name: At_10percent_PEG_P Parameter: Timepoint (day) Value: 12
  misc_feature: MA Experiment 20000460 PARAMETER Experiment Name: At_10percent_PEG_P Parameter: Tissue Value: Whole Plant
  misc_feature: MA Experiment 20000460 PARAMETER Experiment Name: At_10percent_PEG_P Parameter: Treatment Value: 10percent PEG vs. No Treatment
  misc_feature: MA Experiment ID: 20000527 Result: Down-regulated in Transcription
  misc_feature: MA Experiment 20000527 PARAMETER Experiment Name: At_10percent_PEG_P Parameter: Age (day) Value: 20
  misc_feature: MA Experiment 20000527 PARAMETER Experiment Name: At_10percent_PEG_P Parameter: Organism Value: A. thaliana
  misc_feature: MA Experiment 20000527 PARAMETER Experiment Name: At_10percent_PEG_P Parameter: Plant Line Value: WS
  misc_feature: MA Experiment 20000527 PARAMETER Experiment Name: At_10percent_PEG_P Parameter: Timepoint (day) Value: 20
  misc_feature: MA Experiment 20000527 PARAMETER Experiment Name: At_10percent_PEG_P Parameter: Tissue Value: Whole Plant
  misc_feature: MA Experiment 20000527 PARAMETER Experiment Name: At_10percent_PEG_P Parameter: Treatment Value: 10percent PEG vs. No Treatment
  misc_feature: MA Experiment ID: 20000573 Result: Up-regulated in Transcription
  misc_feature: MA Experiment 20000573 PARAMETER Experiment Name: At_100uM_ABA_Mutants__P Parameter: Organism Value: A. thaliana
  misc_feature: MA Experiment 20000573 PARAMETER Experiment Name: At_100uM_ABA_Mutants__P Parameter: Plant Line Value: CS22 vs. Ler wt
  misc_feature: MA Experiment 20000573 PARAMETER Experiment Name: At_100uM_ABA_Mutants__P Parameter: Timepoint (hr) Value: N/A
  misc_feature: MA Experiment 20000573 PARAMETER Experiment Name: At_100uM_ABA_Mutants__P Parameter: Tissue Value: Whole Plant
  misc_feature: MA Experiment 20000573 PARAMETER Experiment Name: At_100uM_ABA_Mutants__P Parameter: Treatment Value: None
  misc_feature: MA Experiment ID: 20000574 Result: Up-regulated in Transcription
  misc_feature: MA Experiment 20000574 PARAMETER Experiment Name: At_100uM_ABA_Mutants__P Parameter: Organism Value: A. thaliana
  misc_feature: MA Experiment 20000574 PARAMETER Experiment Name: At_100uM_ABA_Mutants__P Parameter: Plant Line Value: CS23 vs. Ler wt
  misc_feature: MA Experiment 20000574 PARAMETER Experiment Name: At_100uM_ABA_Mutants__P Parameter: Timepoint (hr) Value: N/A
  misc_feature: MA Experiment 20000574 PARAMETER Experiment Name: At_100uM_ABA_Mutants__P Parameter: Tissue Value: Whole Plant
  misc_feature: MA Experiment 20000574 PARAMETER Experiment Name: At_100uM_ABA_Mutants__P Parameter: Treatment Value: None
  misc_feature: MA Experiment ID: 20000575 Result: Down-regulated in Transcription
  misc_feature: MA Experiment 20000575 PARAMETER Experiment Name: At_100uM_ABA_Mutants__P Parameter: Organism Value: A. thaliana
  misc_feature: MA Experiment 20000575 PARAMETER Experiment Name: At_100uM_ABA_Mutants__P Parameter: Plant Line Value: CS22
  misc_feature: MA Experiment 20000575 PARAMETER Experiment Name: At_100uM_ABA_Mutants__P Parameter: Timepoint (hr) Value: 6
  misc_feature: MA Experiment 20000575 PARAMETER Experiment Name: At_100uM_ABA_Mutants__P Parameter: Tissue Value: Whole Plant
  misc_feature: MA Experiment 20000575 PARAMETER Experiment Name: At_100uM_ABA_Mutants__P Parameter: Treatment Value: 1uM ABA vs. No Treatment
  misc_feature: MA Experiment ID: 20000576 Result: Down-regulated in Transcription
  misc_feature: MA Experiment 20000576 PARAMETER Experiment Name: At_100uM_ABA_Mutants__P Parameter: Organism Value: A. thaliana
  misc_feature: MA Experiment 20000576 PARAMETER Experiment Name: At_100uM_ABA_Mutants__P Parameter: Plant Line Value: CS23
  misc_feature: MA Experiment 20000576 PARAMETER Experiment Name: At_100uM_ABA_Mutants__P Parameter: Timepoint (hr) Value: 6
  misc_feature: MA Experiment 20000576 PARAMETER Experiment Name: At_100uM_ABA_Mutants__P Parameter: Tissue Value: Whole Plant
  misc_feature: MA Experiment 20000576 PARAMETER Experiment Name: At_100uM_ABA_Mutants__P Parameter: Treatment Value: 1uM ABA vs. No Treatment
  misc_feature: MA Experiment ID: 20000606 Result: Up-regulated in Transcription
  misc_feature: MA Experiment 20000606 PARAMETER Experiment Name: At_CS8548_Mutant_P Parameter: Age (day) Value: 14
  misc_feature: MA Experiment 20000606 PARAMETER Experiment Name: At_CS8548_Mutant_P Parameter: Plant Line Value: CS8548 vs. wt
  misc_feature: MA Experiment 20000606 PARAMETER Experiment Name: At_CS8548_Mutant_P Parameter: Tissue Value: Whole Plant
  misc_feature: MA Experiment ID: 20000709 Result: Down-regulated in Transcription
  misc_feature: MA Experiment 20000709 PARAMETER Experiment Name: At_15mM_NH4NO3_L-to-H_P Parameter: Age (hr) Value: 14
  misc_feature: MA Experiment 20000709 PARAMETER Experiment Name: At_15mM_NH4NO3_L-to-H_P Parameter: Organism Value: A. thaliana
  misc_feature: MA Experiment 20000709 PARAMETER Experiment Name: At_15mM_NH4NO3_L-to-H_P Parameter: Plant Line Value: WS
  misc_feature: MA Experiment 20000709 PARAMETER Experiment Name: At_15mM_NH4NO3_L-to-H_P Parameter: Timepoint (hr) Value: 4
  misc_feature: MA Experiment 20000709 PARAMETER Experiment Name: At_15mM_NH4NO3_L-to-H_P Parameter: Tissue Value: Aerial
  misc_feature: MA Experiment 20000709 PARAMETER Experiment Name: At_15mM_NH4NO3_L-to-H_P Parameter: Treatment Value: 15mM NH4NO3 vs. 30mM Mannitol
  misc_feature: MA Experiment ID: 20000794 Result: Down-regulated in Transcription
  misc_feature: MA Experiment 20000794 PARAMETER Experiment Name: At_Petals_P Parameter: Age (day) Value: 23-25 days
  misc_feature: MA Experiment 20000794 PARAMETER Experiment Name: At_Petals_P Parameter: Plant Line Value: WS
  misc_feature: MA Experiment 20000794 PARAMETER Experiment Name: At_Petals_P Parameter: Tissue Value: Petals vs. Whole plant
  misc_feature: MA Experiment ID: 20001554 Result: Down-regulated in Transcription
  misc_feature: MA Experiment 20001554 PARAMETER Experiment Name: At_Drought_Soil_Dry_P Parameter: Age (day) Value: 21
  misc_feature: MA Experiment 20001554 PARAMETER Experiment Name: At_Drought_Soil_Dry_P Parameter: Organism Value: A. thaliana
  misc_feature: MA Experiment 20001554 PARAMETER Experiment Name: At_Drought_Soil_Dry_P Parameter: Plant Line Value: WS
  misc_feature: MA Experiment 20001554 PARAMETER Experiment Name: At_Drought_Soil_Dry_P Parameter: Post Timepoint (hr) Value: None
  misc_feature: MA Experiment 20001554 PARAMETER Experiment Name: At_Drought_Soil_Dry_P Parameter: Post-Treatment Value: None
  misc_feature: MA Experiment 20001554 PARAMETER Experiment Name: At_Drought_Soil_Dry_P Parameter: Timepoint (day) Value: 7
  misc_feature: MA Experiment 20001554 PARAMETER Experiment Name: At_Drought_Soil_Dry_P Parameter: Treatment Value: Drought vs. No Drought
  misc_feature: MA Experiment ID: 20001556 Result: Down-regulated in Transcription
  misc_feature: MA Experiment 20001556 PARAMETER Experiment Name: At_Drought_Soil_Dry_P Parameter: Age (day) Value: 26
  misc_feature: MA Experiment 20001556 PARAMETER Experiment Name: At_Drought_Soil_Dry_P Parameter: Organism Value: A. thaliana
  misc_feature: MA Experiment 20001556 PARAMETER Experiment Name: At_Drought_Soil_Dry_P Parameter: Plant Line Value: WS
  misc_feature: MA Experiment 20001556 PARAMETER Experiment Name: At_Drought_Soil_Dry_P Parameter: Post Timepoint (hr) Value: None
  misc_feature: MA Experiment 20001556 PARAMETER Experiment Name: At_Drought_Soil_Dry_P Parameter: Post-Treatment Value: None
  misc_feature: MA Experiment 20001556 PARAMETER Experiment Name: At_Drought_Soil_Dry_P Parameter: Timepoint (day) Value: 12
  misc_feature: MA Experiment 20001556 PARAMETER Experiment Name: At_Drought_Soil_Dry_P Parameter: Treatment Value: Drought vs. No Drought
  misc_feature: MA Experiment ID: 20001557 Result: Down-regulated in Transcription
  misc_feature: MA Experiment 20001557 PARAMETER Experiment Name: At_Drought_Soil_Dry_P Parameter: Age (day) Value: 27
  misc_feature: MA Experiment 20001557 PARAMETER Experiment Name: At_Drought_Soil_Dry_P Parameter: Organism Value: A. thaliana
  misc_feature: MA Experiment 20001557 PARAMETER Experiment Name: At_Drought_Soil_Dry_P Parameter: Plant Line Value: WS
  misc_feature: MA Experiment 20001557 PARAMETER Experiment Name: At_Drought_Soil_Dry_P Parameter: Post Timepoint (hr) Value: 3
  misc_feature: MA Experiment 20001557 PARAMETER Experiment Name: At_Drought_Soil_Dry_P Parameter: Post-Treatment Value: Re-Water vs. No Drought
  misc_feature: MA Experiment 20001557 PARAMETER Experiment Name: At_Drought_Soil_Dry_P Parameter: Timepoint (day) Value: 13
  misc_feature: MA Experiment 20001557 PARAMETER Experiment Name: At_Drought_Soil_Dry_P Parameter: Treatment Value: Drought vs. No Drought
  misc_feature: MA Experiment ID: 20001558 Result: Down-regulated in Transcription
  misc_feature: MA Experiment 20001558 PARAMETER Experiment Name: At_Drought_Soil_Dry_P Parameter: Age (day) Value: 27
  misc_feature: MA Experiment 20001558 PARAMETER Experiment Name: At_Drought_Soil_Dry_P Parameter: Organism Value: A. thaliana
  misc_feature: MA Experiment 20001558 PARAMETER Experiment Name: At_Drought_Soil_Dry_P Parameter: Plant Line Value: WS
  misc_feature: MA Experiment 20001558 PARAMETER Experiment Name: At_Drought_Soil_Dry_P Parameter: Post Timepoint (hr) Value: 6
  misc_feature: MA Experiment 20001558 PARAMETER Experiment Name: At_Drought_Soil_Dry_P Parameter: Post-Treatment Value: Re-Water vs. No Drought
  misc_feature: MA Experiment 20001558 PARAMETER Experiment Name: At_Drought_Soil_Dry_P Parameter: Timepoint (day) Value: 13
  misc_feature: MA Experiment 20001558 PARAMETER Experiment Name: At_Drought_Soil_Dry_P Parameter: Treatment Value: Drought vs. No Drought
  misc_feature: MA Experiment ID: 20001559 Result: Down-regulated in Transcription
  misc_feature: MA Experiment 20001559 PARAMETER Experiment Name: At_Drought_Soil_Dry_P Parameter: Age (day) Value: 28
  misc_feature: MA Experiment 20001559 PARAMETER Experiment Name: At_Drought_Soil_Dry_P Parameter: Organism Value: A. thaliana
  misc_feature: MA Experiment 20001559 PARAMETER Experiment Name: At_Drought_Soil_Dry_P Parameter: Plant Line Value: WS
  misc_feature: MA Experiment 20001559 PARAMETER Experiment Name: At_Drought_Soil_Dry_P Parameter: Post Timepoint (hr) Value: 29
  misc_feature: MA Experiment 20001559 PARAMETER Experiment Name: At_Drought_Soil_Dry_P Parameter: Post-Treatment Value: Re-Water vs. No Drought
  misc_feature: MA Experiment 20001559 PARAMETER Experiment Name: At_Drought_Soil_Dry_P Parameter: Timepoint (day) Value: 14
  misc_feature: MA Experiment 20001559 PARAMETER Experiment Name: At_Drought_Soil_Dry_P Parameter: Treatment Value: Drought vs. No Drought
  misc_feature: MA Experiment ID: 20001560 Result: Down-regulated in Transcription
  misc_feature: MA Experiment 20001560 PARAMETER Experiment Name: At_Drought_Soil_Dry_P Parameter: Age (day) Value: 28
  misc_feature: MA Experiment 20001560 PARAMETER Experiment Name: At_Drought_Soil_Dry_P Parameter: Organism Value: A. thaliana
  misc_feature: MA Experiment 20001560 PARAMETER Experiment Name: At_Drought_Soil_Dry_P Parameter: Plant Line Value: WS
  misc_feature: MA Experiment 20001560 PARAMETER Experiment Name: At_Drought_Soil_Dry_P Parameter: Post Timepoint (hr) Value: None
  misc_feature: MA Experiment 20001560 PARAMETER Experiment Name: At_Drought_Soil_Dry_P Parameter: Post-Treatment Value: None
  misc_feature: MA Experiment 20001560 PARAMETER Experiment Name: At_Drought_Soil_Dry_P Parameter: Timepoint (day) Value: 14
  misc_feature: MA Experiment 20001560 PARAMETER Experiment Name: At_Drought_Soil_Dry_P Parameter: Treatment Value: Drought vs. No Drought
  misc_feature: MA Experiment ID: 20001757 Result: Up-regulated in Transcription
  misc_feature: MA Experiment 20001757 PARAMETER Experiment Name: At_50mM_NH4NO3_L-to-H_P Parameter: Timepoint (hr) Value: 6
  misc_feature: MA Experiment 20001757 PARAMETER Experiment Name: At_50mM_NH4NO3_L-to-H_P Parameter: Tissue Value: Leaf
  misc_feature: MA Experiment 20001757 PARAMETER Experiment Name: At_50mM_NH4NO3_L-to-H_P Parameter: Treatment Value: 50mM NH4NO3 vs 100mM Mannitol
  misc_feature: MA Experiment ID: 20001774 Result: Up-regulated in Transcription
  misc_feature: MA Experiment 20001774 PARAMETER Experiment Name: At_Far-red-enriched-adult_P Parameter: Age (day) Value: 31
  misc_feature: MA Experiment 20001774 PARAMETER Experiment Name: At_Far-red-enriched-adult_P Parameter: Light Value: Far-red enriched vs. White
  misc_feature: MA Experiment 20001774 PARAMETER Experiment Name: At_Far-red-enriched-adult_P Parameter: Organism Value: A. thaliana
  misc_feature: MA Experiment 20001774 PARAMETER Experiment Name: At_Far-red-enriched-adult_P Parameter: Plant Line Value: Columbia
  misc_feature: MA Experiment 20001774 PARAMETER Experiment Name: At_Far-red-enriched-adult_P Parameter: Timepoint (hr) Value: 72
  misc_feature: MA Experiment 20001774 PARAMETER Experiment Name: At_Far-red-enriched-adult_P Parameter: Tissue Value: Aerial
  misc_feature: MA Experiment ID: 20001904 Result: Down-regulated in Transcription
  misc_feature: MA Experiment 20001904 PARAMETER Experiment Name: At_Drought_Reproduction_P Parameter: Age (day) Value: 37
  misc_feature: MA Experiment 20001904 PARAMETER Experiment Name: At_Drought_Reproduction_P Parameter: Organism Value: A. thaliana
  misc_feature: MA Experiment 20001904 PARAMETER Experiment Name: At_Drought_Reproduction_P Parameter: Plant Line Value: WS
  misc_feature: MA Experiment 20001904 PARAMETER Experiment Name: At_Drought_Reproduction_P Parameter: Timepoint (day) Value: 7
  misc_feature: MA Experiment 20001904 PARAMETER Experiment Name: At_Drought_Reproduction_P Parameter: Tissue Value: Rosettes
  misc_feature: MA Experiment 20001904 PARAMETER Experiment Name: At_Drought_Reproduction_P Parameter: Treatment Value: Drought vs. No Drought
  misc_feature: MA Experiment ID: 20001905 Result: Down-regulated in Transcription
  misc_feature: MA Experiment 20001905 PARAMETER Experiment Name: At_Drought_Reproduction_P Parameter: Age (day) Value: 40
  misc_feature: MA Experiment 20001905 PARAMETER Experiment Name: At_Drought_Reproduction_P Parameter: Organism Value: A. thaliana
  misc_feature: MA Experiment 20001905 PARAMETER Experiment Name: At_Drought_Reproduction_P Parameter: Plant Line Value: WS
  misc_feature: MA Experiment 20001905 PARAMETER Experiment Name: At_Drought_Reproduction_P Parameter: Timepoint (day) Value: 10
  misc_feature: MA Experiment 20001905 PARAMETER Experiment Name: At_Drought_Reproduction_P Parameter: Tissue Value: Rosettes
  misc_feature: MA Experiment 20001905 PARAMETER Experiment Name: At_Drought_Reproduction_P Parameter: Treatment Value: Drought vs. No Drought
  misc_feature: MA Experiment ID: 20001909 Result: Down-regulated in Transcription
  misc_feature: MA Experiment 20001909 PARAMETER Experiment Name: At_Drought_Reproduction_P Parameter: Age (day) Value: 35
  misc_feature: MA Experiment 20001909 PARAMETER Experiment Name: At_Drought_Reproduction_P Parameter: Organism Value: A. thaliana
  misc_feature: MA Experiment 20001909 PARAMETER Experiment Name: At_Drought_Reproduction_P Parameter: Plant Line Value: WS
  misc_feature: MA Experiment 20001909 PARAMETER Experiment Name: At_Drought_Reproduction_P Parameter: Timepoint (day) Value: 5
  misc_feature: MA Experiment 20001909 PARAMETER Experiment Name: At_Drought_Reproduction_P Parameter: Tissue Value: Flowers
  misc_feature: MA Experiment 20001909 PARAMETER Experiment Name: At_Drought_Reproduction_P Parameter: Treatment Value: Drought vs. No Drought
ataacacaacaataaccattatcaacttagaaaaatgaattttactggctattctcgatttttaatcgtctttgtagctcttgtaggtgctcttgttcttccctcgaaagctcaagatagcccacaagattatctaagggttcacaaccaggcacgaggagcggtaggcgtaggtcccatgcagtgggacgagagggttgcagcctatgctcggagctacgcagaacaactaagaggcaactgcagactcatacactctggtgggccttacggggaaaacttagcctggggtagcggtgacttgtctggcgtctccgccgtgaacatgtgggttagcgagaaggctaactacaactacgctgcgaacacgtgcaatggagtttgtggtcactacactcaagttgtttggagaaagtcagtgagactcggatgtgccaaagtgaggtgtaacaatggtggaaccataatcagttgcaactatgatcctcgtgggaattatgtgaacgagaagccatactaatgaagtaatgatgtgatcatgcatacacacgtacataaaggacgtgtatatgtatcagtatttcaataaggagcatcatatgcaggatgtatcaatatttatcaaataatacaaataagagctgagattacgagaatctatttaaattaaaagttacatacttaattattatagttatatatgtaaaatatgtggcctttttaaaagttacataattaattattatagttaatgtctttc

SEQ ID NO: 95838 - protein, 161 aa, Arabidopsis thaliana
  peptide (1)..(161): Ceres Seq. ID no. 12730589
  misc_feature (34)..(148): Pfam Name: SCP-like extracellular protein Pfam Description: SCP-like extracellular protein
  misc_feature (1)..(161): Homolog of NCBI NO: 15225974 NR Description: pathogenesis-related PR-1-like protein; protein At2g14610.1, supported by cDNA: gi_166860, supported by cDNA:
  misc_feature (1)..(161): Homolog of NCBI NO: 15225965 NR Description: putative pathogenesis related-1 (PR1) protein; id: At2g14580.1, supported by cDNA: gi_17529119 [Arabidopsis
  misc_feature (7)..(161): Homolog of NCBI NO: 7442176 NR Description: pathogenesis-related protein PR1 - rape
  misc_feature (1)..(161): Homolog of NCBI NO: 2129798 NR Description: pathogenesis-related protein 1a homolog precursor
  misc_feature (4)..(161): Homolog of NCBI NO: 23630526 NR Description: pathogenesis-related protein 1 [Brassica juncea]
  misc_feature (9)..(161): Homolog of NCBI NO: 15235056 NR Description: pathogenesis-related protein 1 precursor, 19.3K; id: At4g33720.1, supported by cDNA: 5743., supported by cDNA:
  misc_feature (9)..(160): Homolog of NCBI NO: 1228950 NR Description: pathogenesis-related protein 1 [Arabidopsis
  misc_feature (5)..(161): Homolog of NCBI NO: 282959 NR Description: pathogenesis-related protein 1b - common tobacco
  misc_feature (6)..(161): Homolog of NCBI NO: 2500716 NR Description: Pathogenesis-related protein PR-1 type precursor
  misc_feature (26)..(161): Homolog of NCBI NO: 19073340 NR Description: pathogenesis-related protein 1-1a [Cucumis
MNFTGYSRFLIVFVALVGALVLPSKAQDSPQDYLRVHNQARGAVGVGPMQWDERVAAYARSYAEQLRGNCRLIHSGGPYGENLAWGSGDLSGVSAVNMWVSEKANYNYAANTCNGVCGHYTQVVWRKSVRLGCAKVRCNNGGTIISCNYDPRGNYVNEKPY

SEQ ID NO: 95839 - protein, 113 aa, Arabidopsis thaliana
  peptide (1)..(113): Ceres Seq. ID no. 12730590
  misc_feature (1)..(100): Pfam Name: SCP-like extracellular protein Pfam Description: SCP-like extracellular protein
  misc_feature (1)..(113): Homolog of NCBI NO: 15225974 NR Description: pathogenesis-related PR-1-like protein; protein At2g14610.1, supported by cDNA: gi_166860, supported by cDNA:
  misc_feature (1)..(113): Homolog of NCBI NO: 15225965 NR Description: putative pathogenesis related-1 (PR1) protein; id: At2g14580.1, supported by cDNA: gi_17529119 [Arabidopsis
  misc_feature (1)..(113): Homolog of NCBI NO: 7442176 NR Description: pathogenesis-related protein PR1 - rape
  misc_feature (1)..(113): Homolog of NCBI NO: 2129798 NR Description: pathogenesis-related protein 1a homolog precursor
  misc_feature (1)..(113): Homolog of NCBI NO: 23630526 NR Description: pathogenesis-related protein 1 [Brassica juncea]
  misc_feature (1)..(113): Homolog of NCBI NO: 15235056 NR Description: pathogenesis-related protein 1 precursor, 19.3K; id: At4g33720.1, supported by cDNA: 5743., supported by cDNA:
  misc_feature (1)..(112): Homolog of NCBI NO: 1228950 NR Description: pathogenesis-related protein 1 [Arabidopsis
  misc_feature (1)..(113): Homolog of NCBI NO: 282959 NR Description: pathogenesis-related protein 1b - common tobacco
  misc_feature (1)..(113): Homolog of NCBI NO: 2500716 NR Description: Pathogenesis-related protein PR-1 type precursor
  misc_feature (1)..(113): Homolog of NCBI NO: 19073340 NR Description: pathogenesis-related protein 1-1a [Cucumis
MQWDERVAAYARSYAEQLRGNCRLIHSGGPYGENLAWGSGDLSGVSAVNMWVSEKANYNYAANTCNGVCGHYTQVVWRKSVRLGCAKVRCNNGGTIISCNYDPRGNYVNEKPY

SEQ ID NO: 95840 - DNA, 1479 bp, Arabidopsis thaliana
  misc_feature (1)..(1479): Ceres Seq. ID no. 12730595
  misc_feature: MA Experiment ID: 20000346 Result: Up-regulated in Transcription
  misc_feature: MA Experiment 20000346 PARAMETER Experiment Name: At_2mM_SA_Sub_P Parameter: Age (day) Value: 14
  misc_feature: MA Experiment 20000346 PARAMETER Experiment Name: At_2mM_SA_Sub_P Parameter: Organism Value: A. thaliana
  misc_feature: MA Experiment 20000346 PARAMETER Experiment Name: At_2mM_SA_Sub_P Parameter: Plant Line Value: WS
  misc_feature: MA Experiment 20000346 PARAMETER Experiment Name: At_2mM_SA_Sub_P Parameter: Timepoint (hr) Value: 1
  misc_feature: MA Experiment 20000346 PARAMETER Experiment Name: At_2mM_SA_Sub_P Parameter: Tissue Value: Aerial
  misc_feature: MA Experiment 20000346 PARAMETER Experiment Name: At_2mM_SA_Sub_P Parameter: Treatment Value: 2mM SA vs. No Treatment
  misc_feature: MA Experiment ID: 20000347 Result: Up-regulated in Transcription
  misc_feature: MA Experiment 20000347 PARAMETER Experiment Name: At_2mM_SA_Sub_P Parameter: Age (day) Value: 14
  misc_feature: MA Experiment 20000347 PARAMETER Experiment Name: At_2mM_SA_Sub_P Parameter: Organism Value: A. thaliana
  misc_feature: MA Experiment 20000347 PARAMETER Experiment Name: At_2mM_SA_Sub_P Parameter: Plant Line Value: WS
  misc_feature: MA Experiment 20000347 PARAMETER Experiment Name: At_2mM_SA_Sub_P Parameter: Timepoint (hr) Value: 6
  misc_feature: MA Experiment 20000347 PARAMETER Experiment Name: At_2mM_SA_Sub_P Parameter: Tissue Value: Aerial
  misc_feature: MA Experiment 20000347 PARAMETER Experiment Name: At_2mM_SA_Sub_P Parameter: Treatment Value: 2mM SA vs. No Treatment
atgagtgacctccaagcaaaaaacgatgtggtagctgtagatagacagtcttcctcgtcgttggcggatcttgatggaccatctccgctgagaaagatgatatcagtggcttctattgccgccggtattcagttcggttgggctcttcagctgtctctgctaactccatacgtgcagcttcttggagtcccacacaaatggtcatctttcatatggctatgtggtcctgtctctggtcttcttgtccagccatccgtcggttacttcagcgaccgatgcacgtcaagattcggacgtcgtcgtcctttcatcgccacaggcgccttgcttgtagctgttgctgttgtactaatcggatacgcagctgattttggccacagcatgggagacaaaatcgacaaacctgtcaagatgcgagccgttgttatcttcgctctcggtttctggatccttgacgtggctaacaacactctccaaggaccttgtcgcgctttcctcggtgatttagccgctggagacgctaagaaaacgcgaacagcaaacgcgtttttctctttcttcatggctgttgggaacgttttgggatacgcggcaggatcatacactaacctctacaagatcttccctttcacaatgactaaagcatgtgacatatattgcgcaaatctcaagagttgtttcttcctttccatcactctcctcctagtcgtcacaatcatagctctttggtacgtggaagacaagcaatggtcgcctaaagcagactcggacaacgagaaaactccgttctttggtgagatctttggagctttcaaggtgatgaaacgtccaatgtggatgctattaatcgtcacggccttgaactggatcgcatggttcccttttcttttatacgataccgattggatgggtcgtgaagtgtacggtggagactcaaaaggagatgacaaaatgaagaaactatacaaccaagggattcacgttggtgcgttgggattgatgcttaactctatcgttcttggaatcgtctcacttggtattgaaggtattagcaagaaaataggtggagctaaaaggctttggggagctgtgaatatcatccttgctgtgtgtttggcaatgacggttttggttactaaaaaggcggaggagcaccggagaatcgctggtccgatggcccttcctaccgatggcatcagagctggagcattgactctctttgctcttcttggaattcctcttgctattacattcagtattccgtttgcactagcttccataatctcaagtagttccggcgccggtcaaggactgtctctaggagttttaaacatggcaatagtgataccacaaatgattgtatcgtttggagttggtcctattgatgcgctttttggaggtggaaacttaccaagatttgtggtcggagctattgcagcggcaattagcagtgttgtggcatttaccgtgttaccttaa

SEQ ID NO: 95841 - protein, 492 aa, Arabidopsis thaliana
  peptide (1)..(492): Ceres Seq. ID no. 12730596
  misc_feature (33)..(468): Pfam Name: Sugar (and other) transporter Pfam Description: Sugar (and other) transporter
  misc_feature (1)..(492): Homolog of NCBI NO: 15225986 NR Description: putative sucrose-proton symporter; protein id:
  misc_feature (1)..(492): Homolog of NCBI NO: 15219686 NR Description: sucrose-proton symporter, putative; protein id:
  misc_feature (1)..(492): Homolog of NCBI NO: 15239921 NR Description: sucrose transporter protein; protein id: [Arabidopsis thaliana] >gi|10178200|dbj|BAB11624.1| sucrose
  misc_feature (1)..(492): Homolog of NCBI NO: 15239949 NR Description: sucrose transporter protein; protein id: [Arabidopsis thaliana] >gi|9759315|dbj|BAB09682.1| sucrose
  misc_feature (9)..(492): Homolog of NCBI NO: 18091779 NR Description: sucrose transporter SUC1 [Brassica oleracea]
  misc_feature (9)..(492): Homolog of NCBI NO: 15217601 NR Description: sucrose transport protein SUC1; protein id: supported by cDNA: gi_15146267 [Arabidopsis thaliana]
  misc_feature (5)..(492): Homolog of NCBI NO: 12057172 NR Description: sucrose trasporter [Arabidopsis thaliana]
  misc_feature (5)..(492): Homolog of NCBI NO: 15217602 NR Description: putative sucrose transport protein; protein id: [Arabidopsis thaliana] >gi|25344713|pir||F96741 probable sucrose
  misc_feature (5)..(492): Homolog of NCBI NO: 15219938 NR Description: putative sucrose transport protein, SUC2; protein At1g22710.1, supported by cDNA: 7894., supported by cDNA: supported by cDNA: gi_15293104, supported by cDNA: gi_20147212,
  misc_feature (5)..(492): Homolog of NCBI NO: 481131 NR Description: sucrose transport protein SUC2 - Arabidopsis
MSDLQAKNDVVAVDRQSSSSLADLDGPSPLRKMISVASIAAGIQFGWALQLSLLTPYVQLLGVPHKWSSFIWLCGPVSGLLVQPSVGYFSDRCTSRFGRRRPFIATGALLVAVAVVLIGYAADFGHSMGDKIDKPVKMRAVVIFALGFWILDVANNTLQGPCRAFLGDLAAGDAKKTRTANAFFSFFMAVGNVLGYAAGSYTNLYKIFPFTMTKACDIYCANLKSCFFLSITLLLVVTIIALWYVEDKQWSPKADSDNEKTPFFGEIFGAFKVMKRPMWMLLIVTALNWIAWFPFLLYDTDWMGREVYGGDSKGDDKMKKLYNQGIHVGALGLMLNSIVLGIVSLGIEGISKKIGGAKRLWGAVNIILAVCLAMTVLVTKKAEEHRRIAGPMALPTDGIRAGALTLFALLGIPLAITFSIPFALASIISSSSGAGQGLSLGVLNMAIVIPQMIVSFGVGPIDALFGGGNLPRFVVGAIAAAISSVVAFTVLP

SEQ ID NO: 95842 - protein, 460 aa, Arabidopsis thaliana
  peptide (1)..(460): Ceres Seq. ID no. 12730597
  misc_feature (1)..(436): Pfam Name: Sugar (and other) transporter Pfam Description: Sugar (and other) transporter
  misc_feature (1)..(460): Homolog of NCBI NO: 15225986 NR Description: putative sucrose-proton symporter; protein id:
  misc_feature (1)..(460): Homolog of NCBI NO: 15219686 NR Description: sucrose-proton symporter, putative; protein id:
  misc_feature (1)..(460): Homolog of NCBI NO: 15239921 NR Description: sucrose transporter protein; protein id: [Arabidopsis thaliana] >gi|10178200|dbj|BAB11624.1| sucrose
  misc_feature (1)..(460): Homolog of NCBI NO: 15239949 NR Description: sucrose transporter protein; protein id: [Arabidopsis thaliana] >gi|9759315|dbj|BAB09682.1| sucrose
  misc_feature (1)..(460): Homolog of NCBI NO: 18091779 NR Description: sucrose transporter SUC1 [Brassica oleracea]
  misc_feature (1)..(460): Homolog of NCBI NO: 15217601 NR Description: sucrose transport protein SUC1; protein id: supported by cDNA: gi_15146267 [Arabidopsis thaliana]
  misc_feature (1)..(460): Homolog of NCBI NO: 12057172 NR Description: sucrose trasporter [Arabidopsis thaliana]
  misc_feature (1)..(460): Homolog of NCBI NO: 15217602 NR Description: putative sucrose transport protein; protein id: [Arabidopsis thaliana] >gi|25344713|pir||F96741 probable sucrose
  misc_feature (1)..(460): Homolog of NCBI NO: 15219938 NR Description: putative sucrose transport protein, SUC2; protein At1g22710.1, supported by cDNA: 7894., supported by cDNA: supported by cDNA: gi_15293104, supported by cDNA: gi_20147212,
  misc_feature (1)..(460): Homolog of NCBI NO: 481131 NR Description: sucrose transport protein SUC2 - Arabidopsis
MISVASIAAGIQFGWALQLSLLTPYVQLLGVPHKWSSFIWLCGPVSGLLVQPSVGYFSDRCTSRFGRRRPFIATGALLVAVAVVLIGYAADFGHSMGDKIDKPVKMRAVVIFALGFWILDVANNTLQGPCRAFLGDLAAGDAKKTRTANAFFSFFMAVGNVLGYAAGSYTNLYKIFPFTMTKACDIYCANLKSCFFLSITLLLVVTIIALWYVEDKQWSPKADSDNEKTPFFGEIFGAFKVMKRPMWMLLIVTALNWIAWFPFLLYDTDWMGREVYGGDSKGDDKMKKLYNQGIHVGALGLMLNSIVLGIVSLGIEGISKKIGGAKRLWGAVNIILAVCLAMTVLVTKKAEEHRRIAGPMALPTDGIRAGALTLFALLGIPLAITFSIPFALASIISSSSGAGQGLSLGVLNMAIVIPQMIVSFGVGPIDALFGGGNLPRFVVGAIAAAISSVVAFTVLP

SEQ ID NO: 95843 - protein, 365 aa, Arabidopsis thaliana
  peptide (1)..(365): Ceres Seq. ID no. 12730598
  misc_feature (1)..(341): Pfam Name: Sugar (and other) transporter Pfam Description: Sugar (and other) transporter
  misc_feature (1)..(365): Homolog of NCBI NO: 15225986 NR Description: putative sucrose-proton symporter; protein id:
  misc_feature (1)..(365): Homolog of NCBI NO: 15219686 NR Description: sucrose-proton symporter, putative; protein id:
  misc_feature (1)..(365): Homolog of NCBI NO: 15239921 NR Description: sucrose transporter protein; protein id: [Arabidopsis thaliana] >gi|10178200|dbj|BAB11624.1| sucrose
  misc_feature (1)..(365): Homolog of NCBI NO: 15239949 NR Description: sucrose transporter protein; protein id: [Arabidopsis thaliana] >gi|9759315|dbj|BAB09682.1| sucrose
  misc_feature (1)..(365): Homolog of NCBI NO: 18091779 NR Description: sucrose transporter SUC1 [Brassica oleracea]
  misc_feature (1)..(365): Homolog of NCBI NO: 15217601 NR Description: sucrose transport protein SUC1; protein id: supported by cDNA: gi_15146267 [Arabidopsis thaliana]
  misc_feature (1)..(365): Homolog of NCBI NO: 12057172 NR Description: sucrose trasporter [Arabidopsis thaliana]
  misc_feature (1)..(365): Homolog of NCBI NO: 15217602 NR Description: putative sucrose transport protein; protein id: [Arabidopsis thaliana] >gi|25344713|pir||F96741 probable sucrose
  misc_feature (1)..(365): Homolog of NCBI NO: 15219938 NR Description: putative sucrose transport protein, SUC2; protein At1g22710.1, supported by cDNA: 7894., supported by cDNA: supported by cDNA: gi_15293104, supported by cDNA: gi_20147212,
  misc_feature (1)..(365): Homolog of NCBI NO: 481131 NR Description: sucrose transport protein SUC2 - Arabidopsis
MGDKIDKPVKMRAVVIFALGFWILDVANNTLQGPCRAFLGDLAAGDAKKTRTANAFFSFFMAVGNVLGYAAGSYTNLYKIFPFTMTKACDIYCANLKSCFFLSITLLLVVTIIALWYVEDKQWSPKADSDNEKTPFFGEIFGAFKVMKRPMWMLLIVTALNWIAWFPFLLYDTDWMGREVYGGDSKGDDKMKKLYNQGIHVGALGLMLNSIVLGIVSLGIEGISKKIGGAKRLWGAVNIILAVCLAMTVLVTKKAEEHRRIAGPMALPTDGIRAGALTLFALLGIPLAITFSIPFALASIISSSSGAGQGLSLGVLNMAIVIPQMIVSFGVGPIDALFGGGNLPRFVVGAIAAAISSVVAFTVLP

SEQ ID NO: 95844 - DNA, 1002 bp, Arabidopsis thaliana
  misc_feature (1)..(1002): Ceres Seq. ID no. 12730621
  misc_feature: MA Experiment ID: 20000314 Result: Up-regulated in Transcription
  misc_feature: MA Experiment 20000314 PARAMETER Experiment Name: At_14day_Shoots-Roots_Sub_P Parameter: Age (day) Value: 14
  misc_feature: MA Experiment 20000314 PARAMETER Experiment Name: At_14day_Shoots-Roots_Sub_P Parameter: Organism Value: A. thaliana
  misc_feature: MA Experiment 20000314 PARAMETER Experiment Name: At_14day_Shoots-Roots_Sub_P Parameter: Plant Line Value: WS
  misc_feature: MA Experiment 20000314 PARAMETER Experiment Name: At_14day_Shoots-Roots_Sub_P Parameter: Tissue Value: Roots vs. Whole Plant
  misc_feature: MA Experiment ID: 20000352 Result: Down-regulated in Transcription
  misc_feature: MA Experiment 20000352 PARAMETER Experiment Name: At_Drought_Sub_P Parameter: Age (day) Value: 7
  misc_feature: MA Experiment 20000352 PARAMETER Experiment Name: At_Drought_Sub_P Parameter: Organism Value: A. thaliana
  misc_feature: MA Experiment 20000352 PARAMETER Experiment Name: At_Drought_Sub_P Parameter: Plant Line Value: WS
  misc_feature: MA Experiment 20000352 PARAMETER Experiment Name: At_Drought_Sub_P Parameter: Timepoint (hr) Value: 6
  misc_feature: MA Experiment 20000352 PARAMETER Experiment Name: At_Drought_Sub_P Parameter: Tissue Value: Whole Plant
  misc_feature: MA Experiment 20000352 PARAMETER Experiment Name: At_Drought_Sub_P Parameter: Treatment Value: Drought vs. No Drought
atggatgaaaaagatagaccaaagaacttgagggaagaagaagaaaaaccgagtgaagaaaccaaaattctgatatcttcacttccttgggagatagattaccttgggaacaagctgttcaactacgaaggatattggtacagcgaagacattctccaatcaatccccaatatacacactggttttcagccacaagaaactgatataattcttgcttctttctacaaatcgggcacgacttggctcaaggcactcacatttgcactcgttcaacgatctaaacactctttggaagatcatcaacatcctttgctacatcataatcctcatgagatagtgcccaatcttgagctagatctgtatcttaaaagctcaaaaccggacttgaccaagttcttatcatcatcatcatcatctccaagattgttctcaactcacatgtcgctggacccgcttcaagtacccttgaaggagaacctttgcaagatcgtgtacgtttgcaggaacgtgaaagacgtgatggtgtcagtttggtattttaggcaaagcaaaaagatcactcgagcggaggattactctttggaggctatatttgagtcattctgcaacggagttaccctacacggtcccttttgggaccatgcactgagctattggcgaggcagcttggaagatcccaagcattttcttttcatgaggtacgaggatttgaaagcggagcctcgtactcaggtcaagagacttgcagagttcttggattgtccattcactaaggaagaggaagatagcggatctgtagacaagatcttggaactttgctctttaagtaatctaagaagtgtggagatcaacaaaaccagaacgtcgagtagagtggatttcaagagttatttccgtaaaggacaagttggtgactggaagagttatatgacccctgaaatggtagacaaaattgatatgattatagaggaaaaactcaaaggttccggtttgaaattctaa

SEQ ID NO: 95845 - protein, 333 aa, Arabidopsis thaliana
  peptide (1)..(333): Ceres Seq. ID no. 12730622
  misc_feature (66)..(330): Pfam Name: Sulfotransferase domain Pfam Description: Sulfotransferase domain
  misc_feature (1)..(333): Homolog of NCBI NO: 15226028 NR Description: putative steroid sulfotransferase; protein id:
  misc_feature (12)..(333): Homolog of NCBI NO: 30683286 NR Description: sulfotransferase family [Arabidopsis thaliana] Similar to steroid sulfotransferases [Arabidopsis thaliana]
  misc_feature (1)..(332): Homolog of NCBI NO: 15222843 NR Description: steroid sulfotransferase, putative; protein id: supported by cDNA: 150484. [Arabidopsis thaliana]
  misc_feature (1)..(332): Homolog of NCBI NO: 21553545 NR Description: steroid sulfotransferase, putative [Arabidopsis
  misc_feature (14)..(333): Homolog of NCBI NO: 15239947 NR Description: steroid sulfotransferase-like; protein id:
  misc_feature (9)..(333): Homolog of NCBI NO: 15230602 NR Description: sulfotransferase-like protein; protein id:
  misc_feature (1)..(333): Homolog of NCBI NO: 15230603 NR Description: sulfotransferase-like protein; protein id:
  misc_feature (1)..(333): Homolog of NCBI NO: 15217849 NR Description: steroid sulfotransferase, putative; protein id: [Arabidopsis thaliana] >gi|25288810|pir||F86407 probable
  misc_feature (136)..(327): Homolog of NCBI NO: 15236162 NR Description: steroid sulfotransferase - like protein; protein At4g26280.1 [Arabidopsis thaliana] >gi|7434975|pir||T06012
  misc_feature (9)..(113): Homolog of NCBI NO: 15236162 NR Description: steroid sulfotransferase - like protein; protein At4g26280.1 [Arabidopsis thaliana] >gi|7434975|pir||T06012
MDEKDRPKNLREEEEKPSEETKILISSLPWEIDYLGNKLFNYEGYWYSEDILQSIPNIHTGFQPQETDIILASFYKSGTTWLKALTFALVQRSKHSLEDHQHPLLHHNPHEIVPNLELDLYLKSSKPDLTKFLSSSSSSPRLFSTHMSLDPLQVPLKENLCKIVYVCRNVKDVMVSVWYFRQSKKITRAEDYSLEAIFESFCNGVTLHGPFWDHALSYWRGSLEDPKHFLFMRYEDLKAEPRTQVKRLAEFLDCPFTKEEEDSGSVDKILELCSLSNLRSVEINKTRTSSRVDFKSYFRKGQVGDWKSYMTPEMVDKIDMIIEEKLKGSGLKF

SEQ ID NO: 95846 - protein, 187 aa, Arabidopsis thaliana
  peptide (1)..(187): Ceres Seq. ID no. 12730623
  misc_feature (1)..(184): Pfam Name: Sulfotransferase domain Pfam Description: Sulfotransferase domain
  misc_feature (1)..(187): Homolog of NCBI NO: 15226028 NR Description: putative steroid sulfotransferase; protein id:
  misc_feature (1)..(187): Homolog of NCBI NO: 30683286 NR Description: sulfotransferase family [Arabidopsis thaliana] Similar to steroid sulfotransferases [Arabidopsis thaliana]
  misc_feature (1)..(186): Homolog of NCBI NO: 15222843 NR Description: steroid sulfotransferase, putative; protein id: supported by cDNA: 150484. [Arabidopsis thaliana]
  misc_feature (1)..(186): Homolog of NCBI NO: 21553545 NR Description: steroid sulfotransferase, putative [Arabidopsis
  misc_feature (1)..(187): Homolog of NCBI NO: 15239947 NR Description: steroid sulfotransferase-like; protein id:
  misc_feature (1)..(187): Homolog of NCBI NO: 15230602 NR Description: sulfotransferase-like protein; protein id:
  misc_feature (1)..(187): Homolog of NCBI NO: 15230603 NR Description: sulfotransferase-like protein; protein id:
  misc_feature (1)..(187): Homolog of NCBI NO: 15217849 NR Description: steroid sulfotransferase, putative; protein id: [Arabidopsis thaliana] >gi|25288810|pir||F86407 probable
  misc_feature (1)..(181): Homolog of NCBI NO: 15236162 NR Description: steroid sulfotransferase - like protein; protein At4g26280.1 [Arabidopsis thaliana] >gi|7434975|pir||T06012
  misc_feature (1)..(187): Homolog of NCBI NO: 9759556 NR Description: steroid sulfotransferase-like protein
MSLDPLQVPLKENLCKIVYVCRNVKDVMVSVWYFRQSKKITRAEDYSLEAIFESFCNGVTLHGPFWDHALSYWRGSLEDPKHFLFMRYEDLKAEPRTQVKRLAEFLDCPFTKEEEDSGSVDKILELCSLSNLRSVEINKTRTSSRVDFKSYFRKGQVGDWKSYMTPEMVDKIDMIIEEKLKGSGLKF

SEQ ID NO: 95847 - DNA, 602 bp, Arabidopsis thaliana
  misc_feature (1)..(602): Ceres Seq. ID no. 12730632
  misc_feature: MA Experiment ID: 20000306 Result: Down-regulated in Transcription
  misc_feature: MA Experiment 20000306 PARAMETER Experiment Name: At_Germinating_Seeds_Sub_P Parameter: Age (hr) Value: 6 vs. 0
  misc_feature: MA Experiment 20000306 PARAMETER Experiment Name: At_Germinating_Seeds_Sub_P Parameter: Organism Value: A. thaliana
  misc_feature: MA Experiment 20000306 PARAMETER Experiment Name: At_Germinating_Seeds_Sub_P Parameter: Plant Line Value: WS
  misc_feature: MA Experiment 20000306 PARAMETER Experiment Name: At_Germinating_Seeds_Sub_P Parameter: Tissue Value: Germinating Seeds
  misc_feature: MA Experiment ID: 20000307 Result: Down-regulated in Transcription
  misc_feature: MA Experiment 20000307 PARAMETER Experiment Name: At_Germinating_Seeds_Sub_P Parameter: Age (hr) Value: 24 vs. 0
  misc_feature: MA Experiment 20000307 PARAMETER Experiment Name: At_Germinating_Seeds_Sub_P Parameter: Organism Value: A. thaliana
  misc_feature: MA Experiment 20000307 PARAMETER Experiment Name: At_Germinating_Seeds_Sub_P Parameter: Plant Line Value: WS
  misc_feature: MA Experiment 20000307 PARAMETER Experiment Name: At_Germinating_Seeds_Sub_P Parameter: Tissue Value: Germinating Seeds
aaatatacactttgttatcaaattacaagtaatcaatcaaaagatggaaggcaaaactgtgatattcagtgtactcgtaatgggtctggtcatctcgcaaattcaagtagaagcacaaaaaacttgctgcccgagccagtcaactaggaaggagtttgaagattgcatttcagaaggaaatttgcagatactttgttcagctgaaagtggatgccgagacacttacgtgggttattgcccttcgggttttccttacgggagtctcacaaactctggtgatgttgtcaatgtatattgtaagttggggtgtgtatcctctctgtgtggtgccttaacgagtctccaaaaacttgacacaagtggaaaagtgaatgtcgcggttgaacgatgtaccaaggcatgttctactatatgcactaaaggatctaaaaccgcagttgaaactgtgtaaaaaagcagtcaagcataaacaagtaaaggggtggtcatgatcactaaaagtgtaaaagtgttgttttcatacaataattgtcgtgtatgtgtcaaacgtgctagactatggtgctagtactgtttaataaattgtttccggtttttttacg

SEQ ID NO: 95848 - protein, 149 aa, Arabidopsis thaliana
  peptide (1)..(149): Ceres Seq. ID no. 12730633
  misc_feature (40)..(85): Pfam Name: Plant thionin Pfam Description: Plant thionin
  misc_feature (15)..(149): Homolog of NCBI NO: 15226042 NR Description: thionin, putative; protein id: At2g15010.1, by cDNA: gi_17381171 [Arabidopsis thaliana]
  misc_feature (15)..(149): Homolog of NCBI NO: 17381172 NR Description: putative thionin protein [Arabidopsis thaliana]
  misc_feature (15)..(148): Homolog of NCBI NO: 1076465 NR Description: thionin variant Thi2Ca12 - Abyssinian crambe crambin precursor=thionin variant Thi2Ca12 [Crambe abyssinica,
  misc_feature (15)..(148): Homolog of NCBI NO: 1076472 NR Description: thionin variant Thi2Ca9 - Abyssinian crambe crambin precursor=thionin variant Thi2Ca9 [Crambe abyssinica,
  misc_feature (15)..(148): Homolog of NCBI NO: 1076464 NR Description: thionin variant Thi2Ca11 - Abyssinian crambe
  misc_feature (15)..(148): Homolog of NCBI NO: 15239447 NR Description: thionin Thi2.2; protein id: At5g36910.1, by cDNA: 1523., supported by cDNA: gi_1181532 [Arabidopsis
  misc_feature (20)..(148): Homolog of NCBI NO: 802169 NR Description: crambin precursor=thionin variant Thi2Ca11
  misc_feature (15)..(148): Homolog of NCBI NO: 1181533 NR Description: thionin >gi|1586834|prf||2204399B thionin
  misc_feature (15)..(148): Homolog of NCBI NO: 1076466 NR Description: thionin variant Thi2Ca2 - Abyssinian crambe crambin precursor=thionin variant Thi2Ca2 [Crambe abyssinica,
  misc_feature (15)..(148): Homolog of NCBI NO: 21553588 NR Description: thionin Thi2.2 [Arabidopsis thaliana]
NIHFVIKLQVINQKMEGKTVIFSVLVMGLVISQIQVEAQKTCCPSQSTRKEFEDCISEGNLQILCSAESGCRDTYVGYCPSGFPYGSLTNSGDVVNVYCKLGCVSSLCGALTSLQKLDTSGKVNVAVERCTKACSTICTKGSKTAVETV

SEQ ID NO: 95849 - protein, 135 aa, Arabidopsis thaliana
  peptide (1)..(135): Ceres Seq. ID no. 12730634
  misc_feature (26)..(71): Pfam Name: Plant thionin Pfam Description: Plant thionin
  misc_feature (1)..(135): Homolog of NCBI NO: 15226042 NR Description: thionin, putative; protein id: At2g15010.1, by cDNA: gi_17381171 [Arabidopsis thaliana]
  misc_feature (1)..(135): Homolog of NCBI NO: 17381172 NR Description: putative thionin protein [Arabidopsis thaliana]
  misc_feature (1)..(134): Homolog of NCBI NO: 1076465 NR Description: thionin variant Thi2Ca12 - Abyssinian crambe crambin precursor=thionin variant Thi2Ca12 [Crambe abyssinica,
  misc_feature (1)..(134): Homolog of NCBI NO: 1076472 NR Description: thionin variant Thi2Ca9 - Abyssinian crambe crambin precursor=thionin variant Thi2Ca9 [Crambe abyssinica,
  misc_feature (1)..(134): Homolog of NCBI NO: 1076464 NR Description: thionin variant Thi2Ca11 - Abyssinian crambe
  misc_feature (1)..(134): Homolog of NCBI NO: 15239447 NR Description: thionin Thi2.2; protein id: At5g36910.1, by cDNA: 1523., supported by cDNA: gi_1181532 [Arabidopsis
  misc_feature (6)..(134): Homolog of NCBI NO: 802169 NR Description: crambin precursor=thionin variant Thi2Ca11
  misc_feature (1)..(134): Homolog of NCBI NO: 1181533 NR Description: thionin >gi|1586834|prf||2204399B thionin
  misc_feature (1)..(134): Homolog of NCBI NO: 1076466 NR Description: thionin variant Thi2Ca2 - Abyssinian crambe crambin precursor=thionin variant Thi2Ca2 [Crambe abyssinica,
  misc_feature (1)..(134): Homolog of NCBI NO: 21553588 NR Description: thionin Thi2.2 [Arabidopsis thaliana]
MEGKTVIFSVLVMGLVISQIQVEAQKTCCPSQSTRKEFEDCISEGNLQILCSAESGCRDTYVGYCPSGFPYGSLTNSGDVVNVYCKLGCVSSLCGALTSLQKLDTSGKVNVAVERCTKACSTICTKGSKTAVETV

SEQ ID NO: 95850 - protein, 123 aa, Arabidopsis thaliana
  peptide (1)..(123): Ceres Seq. ID no. 12730635
  misc_feature (14)..(59): Pfam Name: Plant thionin Pfam Description: Plant thionin
  misc_feature (1)..(123): Homolog of NCBI NO: 15226042 NR Description: thionin, putative; protein id: At2g15010.1, by cDNA: gi_17381171 [Arabidopsis thaliana]
  misc_feature (1)..(123): Homolog of NCBI NO: 17381172 NR Description: putative thionin protein [Arabidopsis thaliana]
  misc_feature (1)..(122): Homolog of NCBI NO: 1076465 NR Description: thionin variant Thi2Ca12 - Abyssinian crambe crambin precursor=thionin variant Thi2Ca12 [Crambe abyssinica,
  misc_feature (1)..(122): Homolog of NCBI NO: 1076472 NR Description: thionin variant Thi2Ca9 - Abyssinian crambe crambin precursor=thionin variant Thi2Ca9 [Crambe abyssinica,
  misc_feature (1)..(122): Homolog of NCBI NO: 1076464 NR Description: thionin variant Thi2Ca11 - Abyssinian crambe
  misc_feature (1)..(122): Homolog of NCBI NO: 15239447 NR Description: thionin Thi2.2; protein id: At5g36910.1, by cDNA: 1523., supported by cDNA: gi_1181532 [Arabidopsis
  misc_feature (1)..(122): Homolog of NCBI NO: 802169 NR Description: crambin precursor=thionin variant Thi2Ca11
  misc_feature (1)..(122): Homolog of NCBI NO: 1181533 NR Description: thionin >gi|1586834|prf||2204399B thionin
  misc_feature (1)..(122): Homolog of NCBI NO: 1076466 NR Description: thionin variant Thi2Ca2 - Abyssinian crambe crambin precursor=thionin variant Thi2Ca2 [Crambe abyssinica,
  misc_feature (1)..(122): Homolog of NCBI NO: 21553588 NR Description: thionin Thi2.2 [Arabidopsis thaliana]
MGLVISQIQVEAQKTCCPSQSTRKEFEDCISEGNLQILCSAESGCRDTYVGYCPSGFPYGSLTNSGDVVNVYCKLGCVSSLCGALTSLQKLDTSGKVNVAVERCTKACSTICTKGSKTAVETV

SEQ ID NO: 95851 - DNA, 372 bp, Arabidopsis thaliana
  misc_feature (1)..(372): Ceres Seq. ID no. 12730640
  misc_feature: MA Experiment ID: 20000182 Result: Down-regulated in Transcription
  misc_feature: MA Experiment 20000182 PARAMETER Experiment Name: At_2mM_SA_P Parameter: Age (day) Value: 14
  misc_feature: MA Experiment 20000182 PARAMETER Experiment Name: At_2mM_SA_P Parameter: Organism Value: A. thaliana
  misc_feature: MA Experiment 20000182 PARAMETER Experiment Name: At_2mM_SA_P Parameter: Plant Line Value: WS
  misc_feature: MA Experiment 20000182 PARAMETER Experiment Name: At_2mM_SA_P Parameter: Timepoint (hr) Value: 6
  misc_feature: MA Experiment 20000182 PARAMETER Experiment Name: At_2mM_SA_P Parameter: Tissue Value: Aerial
  misc_feature: MA Experiment 20000182 PARAMETER Experiment Name: At_2mM_SA_P Parameter: Treatment Value: 2mM SA vs. No Treatment
  misc_feature: MA Experiment ID: 20000184 Result: Up-regulated in Transcription
  misc_feature: MA Experiment 20000184 PARAMETER Experiment Name: At_Shoots__P Parameter: Age (day) Value: 7
  misc_feature: MA Experiment 20000184 PARAMETER Experiment Name: At_Shoots__P Parameter: Tissue Value: Shoots vs. Whole Plant
  misc_feature: MA Experiment ID: 20000234 Result: Down-regulated in Transcription
  misc_feature: MA Experiment 20000234 PARAMETER Experiment Name: At_Siliques_P Parameter: Age (day) Value: 21
  misc_feature: MA Experiment 20000234 PARAMETER Experiment Name: At_Siliques_P Parameter: Organism Value: A. thaliana
  misc_feature: MA Experiment 20000234 PARAMETER Experiment Name: At_Siliques_P Parameter: Plant Line Value: WS
  misc_feature: MA Experiment 20000234 PARAMETER Experiment Name: At_Siliques_P Parameter: Tissue Value: Less Than 5mm Siliques vs. Whole Plant
  misc_feature: MA Experiment ID: 20000235 Result: Down-regulated in Transcription
  misc_feature: MA Experiment 20000235 PARAMETER Experiment Name: At_Siliques_P Parameter: Age (day) Value: 21
  misc_feature: MA Experiment 20000235 PARAMETER Experiment Name: At_Siliques_P Parameter: Organism Value: A. thaliana
  misc_feature: MA Experiment 20000235 PARAMETER Experiment Name: At_Siliques_P Parameter: Plant Line Value: WS
  misc_feature: MA Experiment 20000235 PARAMETER Experiment Name: At_Siliques_P Parameter: Tissue Value: 5-10mm Siliques vs. Whole Plant
  misc_feature: MA Experiment ID: 20000264 Result: Down-regulated in Transcription
  misc_feature: MA Experiment 20000264 PARAMETER Experiment Name: At_Open_Flower_P Parameter: Age (day) Value: 21
  misc_feature: MA Experiment 20000264 PARAMETER Experiment Name: At_Open_Flower_P Parameter: Plant Line Value: WS
  misc_feature: MA Experiment 20000264 PARAMETER Experiment Name: At_Open_Flower_P Parameter: Tissue Value: Open Flower vs. Whole Plant
  misc_feature: MA Experiment ID: 20000265 Result: Down-regulated in Transcription
  misc_feature: MA Experiment 20000265 PARAMETER Experiment Name: At_Open_Flower_P Parameter: Age (day) Value: 21
  misc_feature: MA Experiment 20000265 PARAMETER Experiment Name: At_Open_Flower_P Parameter: Plant Line Value: WS
  misc_feature: MA Experiment 20000265 PARAMETER Experiment Name: At_Open_Flower_P Parameter: Tissue Value: Closed Flower vs. Whole Plant
  misc_feature: MA Experiment ID: 20000286 Result: Down-regulated in Transcription
  misc_feature: MA Experiment 20000286 PARAMETER Experiment Name: At_Open_Flower_P Parameter: Age (day) Value: 21
  misc_feature: MA Experiment 20000286 PARAMETER Experiment Name: At_Open_Flower_P Parameter: Plant Line Value: WS
  misc_feature: MA Experiment 20000286 PARAMETER Experiment Name: At_Open_Flower_P Parameter: Tissue Value: Half Open vs. Whole Plant
  misc_feature: MA Experiment ID: 20000437 Result: Down-regulated in Transcription
  misc_feature: MA Experiment 20000437 PARAMETER Experiment Name: At_Drought_P Parameter: Age (day) Value: 8
  misc_feature: MA Experiment 20000437 PARAMETER Experiment Name: At_Drought_P Parameter: Organism Value: A. thaliana
  misc_feature: MA Experiment 20000437 PARAMETER Experiment Name: At_Drought_P Parameter: Plant Line Value: WS
  misc_feature: MA Experiment 20000437 PARAMETER Experiment Name: At_Drought_P Parameter: Timepoint (hr) Value: 24
  misc_feature: MA Experiment 20000437 PARAMETER Experiment Name: At_Drought_P Parameter: Tissue Value: Whole Plant
  misc_feature: MA Experiment 20000437 PARAMETER Experiment Name: At_Drought_P Parameter: Treatment Value: Drought vs. No Drought
  misc_feature: MA Experiment ID: 20000438 Result: Up-regulated in Transcription
  misc_feature: MA Experiment 20000438 PARAMETER Experiment Name: At_Shoots__P Parameter: Age (day) Value: 14
  misc_feature: MA Experiment 20000438 PARAMETER Experiment Name: At_Shoots__P Parameter: Tissue Value: Shoots vs. Whole Plant
  misc_feature: MA Experiment ID: 20000439 Result: Down-regulated in Transcription
  misc_feature: MA Experiment 20000439 PARAMETER Experiment Name: At_Roots__P Parameter: Age (day) Value: 14 vs. 21
  misc_feature: MA Experiment 20000439 PARAMETER Experiment Name: At_Roots__P Parameter: Organism Value: A. thaliana
  misc_feature: MA Experiment 20000439 PARAMETER Experiment Name: At_Roots__P Parameter: Tissue Value: Roots vs. Whole Plant
  misc_feature: MA Experiment ID: 20000445 Result: Down-regulated in Transcription
  misc_feature: MA Experiment 20000445 PARAMETER Experiment Name: At_100uM_NAA__P Parameter: Age (day) Value: 14
  misc_feature: MA Experiment 20000445 PARAMETER Experiment Name: At_100uM_NAA__P Parameter: Organism Value: A. thaliana
  misc_feature: MA Experiment 20000445 PARAMETER Experiment Name: At_100uM_NAA__P Parameter: Plant Line Value: WS
  misc_feature: MA Experiment 20000445 PARAMETER Experiment Name: At_100uM_NAA__P Parameter: Timepoint (hr) Value: 6
  misc_feature: MA Experiment 20000445 PARAMETER Experiment Name: At_100uM_NAA__P Parameter: Tissue Value: Aerial
  misc_feature: MA Experiment 20000445 PARAMETER Experiment Name: At_100uM_NAA__P Parameter: Treatment Value: 100uM NAA vs. No Treatment
  misc_feature: MA Experiment ID: 20000452 Result: Up-regulated in Transcription
  misc_feature: MA Experiment 20000452 PARAMETER Experiment Name: At_CS6879_Shoots-Roots_P Parameter: Age (day) Value: 14
  misc_feature: MA Experiment 20000452 PARAMETER Experiment Name: At_CS6879_Shoots-Roots_P Parameter: Organism Value: A. thaliana
  misc_feature: MA Experiment 20000452 PARAMETER Experiment Name: At_CS6879_Shoots-Roots_P Parameter: Plant Line Value: CS6879 vs. WS
  misc_feature: MA Experiment 20000452 PARAMETER Experiment Name: At_CS6879_Shoots-Roots_P Parameter: Tissue Value: Shoots
  misc_feature: MA Experiment ID: 20000573 Result: Down-regulated in Transcription
  misc_feature: MA Experiment 20000573 PARAMETER Experiment Name: At_100uM_ABA_Mutants__P Parameter: Organism Value: A. thaliana
  misc_feature: MA Experiment 20000573 PARAMETER Experiment Name: At_100uM_ABA_Mutants__P Parameter: Plant Line Value: CS22 vs. Ler wt
  misc_feature: MA Experiment 20000573 PARAMETER Experiment Name: At_100uM_ABA_Mutants__P Parameter: Timepoint (hr) Value: N/A
  misc_feature: MA Experiment 20000573 PARAMETER Experiment Name: At_100uM_ABA_Mutants__P Parameter: Tissue Value: Whole Plant
  misc_feature: MA Experiment 20000573 PARAMETER Experiment Name: At_100uM_ABA_Mutants__P Parameter: Treatment Value: None
  misc_feature: MA Experiment ID: 20000574 Result: Down-regulated in Transcription
  misc_feature: MA Experiment 20000574 PARAMETER Experiment Name: At_100uM_ABA_Mutants__P Parameter: Organism Value: A. thaliana
  misc_feature: MA Experiment 20000574 PARAMETER Experiment Name: At_100uM_ABA_Mutants__P Parameter: Plant Line Value: CS23 vs. Ler wt
  misc_feature: MA Experiment 20000574 PARAMETER Experiment Name: At_100uM_ABA_Mutants__P Parameter: Timepoint (hr) Value: N/A
  misc_feature: MA Experiment 20000574 PARAMETER Experiment Name: At_100uM_ABA_Mutants__P Parameter: Tissue Value: Whole Plant
  misc_feature: MA Experiment 20000574 PARAMETER Experiment Name: At_100uM_ABA_Mutants__P Parameter: Treatment Value: None
  misc_feature: MA Experiment ID: 20000794 Result: Down-regulated in Transcription
  misc_feature: MA Experiment 20000794 PARAMETER Experiment Name: At_Petals_P Parameter: Age (day) Value: 23-25 days
  misc_feature: MA Experiment 20000794 PARAMETER Experiment Name: At_Petals_P Parameter: Plant Line Value: WS
  misc_feature: MA Experiment 20000794 PARAMETER Experiment Name: At_Petals_P Parameter: Tissue Value: Petals vs. Whole plant
  misc_feature: MA Experiment ID: 20001248 Result: Down-regulated in Transcription
  misc_feature: MA Experiment 20001248 PARAMETER Experiment Name: At_Far-red-induction_P Parameter: Age (day) Value: 7
  misc_feature: MA Experiment 20001248 PARAMETER Experiment Name: At_Far-red-induction_P Parameter: Light Value: Far-red vs. White
  misc_feature: MA Experiment 20001248 PARAMETER Experiment Name: At_Far-red-induction_P Parameter: Organism Value: A. thaliana
  misc_feature: MA Experiment 20001248 PARAMETER Experiment Name: At_Far-red-induction_P Parameter: Plant Line Value: Columbia
  misc_feature: MA Experiment 20001248 PARAMETER Experiment Name: At_Far-red-induction_P Parameter: Timepoint (hr) Value: 4
  misc_feature: MA Experiment 20001248 PARAMETER Experiment Name: At_Far-red-induction_P Parameter: Tissue Value: Whole Plant
  misc_feature: MA Experiment ID: 20001450 Result: Down-regulated in Transcription
  misc_feature: MA Experiment 20001450 PARAMETER Experiment Name: At_Far-red-induction_P Parameter: Age (day) Value: 7
  misc_feature: MA Experiment 20001450 PARAMETER Experiment Name: At_Far-red-induction_P Parameter: Light Value: Far-red vs. White
  misc_feature: MA Experiment 20001450 PARAMETER Experiment Name: At_Far-red-induction_P Parameter: Organism Value: A. thaliana
  misc_feature: MA Experiment 20001450 PARAMETER Experiment Name: At_Far-red-induction_P Parameter: Plant Line Value: Columbia
  misc_feature: MA Experiment 20001450 PARAMETER Experiment Name: At_Far-red-induction_P Parameter: Timepoint (hr) Value: 8
  misc_feature: MA Experiment 20001450 PARAMETER Experiment Name: At_Far-red-induction_P Parameter: Tissue Value: Whole Plant
  misc_feature: MA Experiment ID: 20001557 Result: Down-regulated in Transcription
  misc_feature: MA Experiment 20001557 PARAMETER Experiment Name: At_Drought_Soil_Dry_P Parameter: Age (day) Value: 27
  misc_feature: MA Experiment 20001557 PARAMETER Experiment Name: At_Drought_Soil_Dry_P Parameter: Organism Value: A. thaliana
  misc_feature: MA Experiment 20001557 PARAMETER Experiment Name: At_Drought_Soil_Dry_P Parameter: Plant Line Value: WS
  misc_feature: MA Experiment 20001557 PARAMETER Experiment Name: At_Drought_Soil_Dry_P Parameter: Post Timepoint (hr) Value: 3
  misc_feature: MA Experiment 20001557 PARAMETER Experiment Name: At_Drought_Soil_Dry_P Parameter: Post-Treatment Value: Re-Water vs. No Drought
  misc_feature: MA Experiment 20001557 PARAMETER Experiment Name: At_Drought_Soil_Dry_P Parameter: Timepoint (day) Value: 13
  misc_feature: MA Experiment 20001557 PARAMETER Experiment Name: At_Drought_Soil_Dry_P Parameter: Treatment Value: Drought vs. No Drought
atggctggtcttatgaagttaggatgcttggtctttgtcttcgtgattgcggccggtccaatcacagcaaaggcggctctgagctgtggcgaagttaacagcaatttgaaaccgtgcactggctacttgaccaatggtggtatcactagcccaggcccacagtgctgcaatggtgttagaaagcttaacggcatggtccttacaaccctagaccgtcggcaagcatgtcgttgcattaaaaatgccgctagaaacgtcggccctggtctcaacgctgaccgtgctgctgggattcctaggagatgcggaatcaaaataccttacagtacccaaatcaggttcaacaccaagtgcaacacgtacatatgttaa

SEQ ID NO: 95852 - protein, 123 aa, Arabidopsis thaliana
  peptide (1)..(123): Ceres Seq. ID no. 12730641
  misc_feature (29)..(118): Pfam Name: Protease inhibitor/seed storage/LTP family Pfam Description: Protease inhibitor/seed storage/LTP family
  misc_feature (1)..(123): Homolog of NCBI NO: 15226046 NR Description: putative lipid transfer protein; protein id: supported by cDNA: gi_13272390 [Arabidopsis thaliana] probable lipid transfer protein [imported] transfer protein
  misc_feature (1)..(119): Homolog of NCBI NO: 2497738 NR Description: NONSPECIFIC LIPID-TRANSFER PROTEIN A PRECURSOR
  misc_feature (1)..(119): Homolog of NCBI NO: 11273805 NR Description: lipid transfer protein [imported] - wild cabbage
  misc_feature (1)..(120): Homolog of NCBI NO: 15224899 NR Description: putative nonspecific lipid-transfer protein; id: At2g38540.1, supported by cDNA: gi_15146309, supported by
  misc_feature (1)..(120): Homolog of NCBI NO: 15224898 NR Description: putative nonspecific lipid-transfer protein; id: At2g38530.1, supported by cDNA: 18328., supported by cDNA:
  misc_feature (1)..(118): Homolog of NCBI NO: 7438295 NR Description: lipid transfer protein wax9C - broccoli
  misc_feature (1)..(120): Homolog of NCBI NO: 2497736 NR Description: NONSPECIFIC LIPID-TRANSFER PROTEIN 2 PRECURSOR
  misc_feature (1)..(120): Homolog of NCBI NO: 2497735 NR Description: NONSPECIFIC LIPID-TRANSFER PROTEIN 1 PRECURSOR
  misc_feature (1)..(120): Homolog of NCBI NO: 2497739 NR Description: NONSPECIFIC LIPID-TRANSFER PROTEIN B PRECURSOR
  misc_feature (1)..(120): Homolog of NCBI NO: 2497740 NR Description: Nonspecific lipid-transfer protein D precursor
MAGLMKLGCLVFVFVIAAGPITAKAALSCGEVNSNLKPCTGYLTNGGITSPGPQCCNGVRKLNGMVLTTLDRRQACRCIKNAARNVGPGLNADRAAGIPRRCGIKIPYSTQIRFNTKCNTYIC

SEQ ID NO: 95853 - protein, 119 aa, Arabidopsis thaliana
  peptide (1)..(119): Ceres Seq. ID no. 12730642
  misc_feature (25)..(114): Pfam Name: Protease inhibitor/seed storage/LTP family Pfam Description: Protease inhibitor/seed storage/LTP family
  misc_feature (1)..(119): Homolog of NCBI NO: 15226046 NR Description: putative lipid transfer protein; protein id: supported by cDNA: gi_13272390 [Arabidopsis thaliana] probable lipid transfer protein [imported] transfer protein
  misc_feature (1)..(115): Homolog of NCBI NO: 2497738 NR Description: NONSPECIFIC LIPID-TRANSFER PROTEIN A PRECURSOR
  misc_feature (1)..(115): Homolog of NCBI NO: 11273805 NR Description: lipid transfer protein [imported] - wild cabbage
  misc_feature (1)..(116): Homolog of NCBI NO: 15224899 NR Description: putative nonspecific lipid-transfer protein; id: At2g38540.1, supported by cDNA: gi_15146309, supported by
  misc_feature (1)..(116): Homolog of NCBI NO: 15224898 NR Description: putative nonspecific lipid-transfer protein; id: At2g38530.1, supported by cDNA: 18328., supported by cDNA:
  misc_feature (1)..(114): Homolog of NCBI NO: 7438295 NR Description: lipid transfer protein wax9C - broccoli
  misc_feature (1)..(116): Homolog of NCBI NO: 2497736 NR Description: NONSPECIFIC LIPID-TRANSFER PROTEIN 2 PRECURSOR
  misc_feature (1)..(116): Homolog of NCBI NO: 2497735 NR Description: NONSPECIFIC LIPID-TRANSFER PROTEIN 1 PRECURSOR
  misc_feature (1)..(116): Homolog of NCBI NO: 2497739 NR Description: NONSPECIFIC LIPID-TRANSFER PROTEIN B PRECURSOR
  misc_feature (1)..(116): Homolog of NCBI NO: 2497740 NR Description: Nonspecific lipid-transfer protein D precursor
MKLGCLVFVFVIAAGPITAKAALSCGEVNSNLKPCTGYLTNGGITSPGPQCCNGVRKLNGMVLTTLDRRQACRCIKNAARNVGPGLNADRAAGIPRRCGIKIPYSTQIRFNTKCNTYIC

SEQ ID NO: 95854 - DNA, 2235 bp, Arabidopsis thaliana
  misc_feature (1)..(2235): Ceres Seq. ID no. 12730669
  misc_feature: MA Experiment ID: 20000314 Result: Up-regulated in Transcription
  misc_feature: MA Experiment 20000314 PARAMETER Experiment Name: At_14day_Shoots-Roots_Sub_P Parameter: Age (day) Value: 14
  misc_feature: MA Experiment 20000314 PARAMETER Experiment Name: At_14day_Shoots-Roots_Sub_P Parameter: Organism Value: A. thaliana
  misc_feature: MA Experiment 20000314 PARAMETER Experiment Name: At_14day_Shoots-Roots_Sub_P Parameter: Plant Line Value: WS
  misc_feature: MA Experiment 20000314 PARAMETER Experiment Name: At_14day_Shoots-Roots_Sub_P Parameter: Tissue Value: Roots vs. Whole Plant
atgacttccaacagaagcaacctcttcctccatcttctccttcttcatcttcctactcttatccaagctcttaacacagatggtgttgctttactctctttcaagtattccatcctcaatgatcctctcttagttctacgaaactggaactacgacgatgaaacaccgtgctcttggaccggtgttacatgcacagagcttgggattcccaacacccctgacatgtttagagttacaagtttggttcttcccaacaaacagcttcttggttctgtttctcccgacttgttttcaatcctacatctaagaatcttggatctctccgacaatttcttccatggatcactgccggattctgtgtccaacgccagtgagcttcgtattctgtcccttggtaacaacaaggtttctggtgaactaccccgtagtatcagcaacgtggctagtctgcagctcttgaatctctctgccaacgccttgaccggaaaaatccctcccaatctctcacttcccaagaatctgacagtcatttccttggcgaagaattcattttcaggcgatattccaagcgggtttgaagcagtacaggttctagatatctcctcaaatcttctagacggatctcttcctccagatttcagaggaacaagtctcctttacctcaacttatcaaacaatcaaatctccggcatgatttctccacctttcgccgaaaaatttccagcaagcgccatcattgatctctccttcaacaatctaacaggaccaatccctaacacaccaccattgcttaaccaaaagaccgagtctttttctggtaacataggcttatgtggtcagccattaaagaccctttgttcaatcccttctactctatcagacccaccaaatatctctgaaactacttcacctgcaatagcagtcatgcccacaactccaacaccaacaaactcttcaacagaatcaacaaatcaaacagccaaaagcaaactaaaaccaagcacaatcatcggcattacacttgcagatatagctggtcttgctatcatagccatgttcatcctctacatataccagctcaagaaacgtagaagctaccaagaatacagcactttcaacgtcttacaaaaatgtctggagaaaaacgatacattatccgtcaagaaatcgaaacacaacgtcgccgacgccttggagttcacgaaatctccgcctgcaaaaatgggatgcggttcatggataagcagaaggtacgaagaaacaacgtcggtgtcatccgagagtgacatagagaaccaaaaacccgttgaggcatttgatcgaacaggtggtgggcgagtaaaacacaatactgaaactcaactagtgacagtggatggagaaactcagctggagctagatactctactaaaggcatcagcttacgtacttggaaccaacagaagcgacggaattgtgtataaagcggtgttagagaacggtgcggcttttgcagtgcggcggattggggcggagagttgtccggcggcgaaatttaaggaattcgaaaaggaggttcagggtatcgctaaacttcgtcacccaaatctcgttagggttcgtggcttcgtttgggggaaagaagagaagcttctcatctccgactatgtcccaaatggaaacctacctctatcctccatctccgcaaaatcaagctcgttttctcataaacctctctcctttgaggcacggctcaagttagcaagaggaatagctagaggaattgcttatatccacgacaagaagcatgtgcacggcaacatcaaggccaataacattctcttggactccgagtttgagcctgtaattacagatatgggccttgatcgtattatgacttcggcccatttactcacggacgggccattgtcgagcttacaagaccaaccaccagagtggtcgacaagccagaagccaaaccccaaatgggatgtatattcatttggtgttatactcttggaacttctcacaggcatagttttttcggtcgatcgagatttggttcgcgattctgagactgatgagaaaagttggttcttgaagttggtcgatggggaaattagggttgaggtggctcaccgcgaggatgaggcggtcgcatgcttgaagttaggctatgaatgtgtctcctccttgcctcaaaagcgaccgtctatgaaggaagtggtgcaagtgctagagaaaatgtttgtttag

SEQ ID NO: 95855 - protein, 744 aa, Arabidopsis thaliana
  peptide (1)..(744): Ceres Seq. ID no. 12730670
  misc_feature (1)..(744): Homolog of NCBI NO: 18418404 NR Description: leucine-rich repeat transmembrane protein kinase, protein id: At4g34220.1, supported by cDNA: gi_14334871, by cDNA: gi_21281266 [Arabidopsis thaliana]
  misc_feature (1)..(744): Homolog of NCBI NO: 7488258 NR Description: protein kinase homolog F28A23.20 - Arabidopsis
  misc_feature (23)..(626): Homolog of NCBI NO: 18086496 NR Description: AT4g37250/C7A10_110 [Arabidopsis thaliana]
  misc_feature (644)..(741): Homolog of NCBI NO: 18086496 NR Description: AT4g37250/C7A10_110 [Arabidopsis thaliana]
  misc_feature (23)..(626): Homolog of NCBI NO: 25387059 NR Description: receptor kinase-like protein [imported] -
  misc_feature (23)..(626): Homolog of NCBI NO: 30690913 NR Description: leucine rich repeat protein family [Arabidopsis
  misc_feature (644)..(741): Homolog of NCBI NO: 30690913 NR Description: leucine rich repeat protein family [Arabidopsis
  misc_feature (644)..(741): Homolog of NCBI NO: 25387059 NR Description: receptor kinase-like protein [imported] -
  misc_feature (23)..(399): Homolog of NCBI NO: 15240265 NR Description: leucine-rich repeat transmembrane protein kinase, protein id: At5g67280.1, supported by cDNA: 110712., supported by
  misc_feature (419)..(654): Homolog of NCBI NO: 15240265 NR Description: leucine-rich repeat transmembrane protein kinase, protein id: At5g67280.1, supported by cDNA: 110712., supported by
MTSNRSNLFLHLLLLHLPTLIQALNTDGVALLSFKYSILNDPLLVLRNWNYDDETPCSWTGVTCTELGIPNTPDMFRVTSLVLPNKQLLGSVSPDLFSILHLRILDLSDNFFHGSLPDSVSNASELRILSLGNNKVSGELPRSISNVASLQLLNLSANALTGKIPPNLSLPKNLTVISLAKNSFSGDIPSGFEAVQVLDISSNLLDGSLPPDFRGTSLLYLNLSNNQISGMISPPFAEKFPASAIIDLSFNNLTGPIPNTPPLLNQKTESFSGNIGLCGQPLKTLCSIPSTLSDPPNISETTSPAIAVMPTTPTPTNSSTESTNQTAKSKLKPSTIIGITLADIAGLAIIAMFILYIYQLKKRRSYQEYSTFNVLQKCLEKNDTLSVKKSKHNVADALEFTKSPPAKMGCGSWISRRYEETTSVSSESDIENQKPVEAFDRTGGGRVKHNTETQLVTVDGETQLELDTLLKASAYVLGTNRSDGIVYKAVLENGAAFAVRRIGAESCPAAKFKEFEKEVQGIAKLRHPNLVRVRGFVWGKEEKLLISDYVPNGNLPLSSISAKSSSFSHKPLSFEARLKLARGIARGIAYIHDKKHVHGNIKANNILLDSEFEPVITDMGLDRIMTSAHLLTDGPLSSLQDQPPEWSTSQKPNPKWDVYSFGVILLELLTGIVFSVDRDLVRDSETDEKSWFLKLVDGEIRVEVAHREDEAVACLKLGYECVSSLPQKRPSMKEVVQVLEKMFV

SEQ ID NO: 95856 - protein, 670 aa, Arabidopsis thaliana
  peptide (1)..(670): Ceres Seq. ID no. 12730671
  misc_feature (1)..(670): Homolog of NCBI NO: 18418404 NR Description: leucine-rich repeat transmembrane protein kinase, protein id: At4g34220.1, supported by cDNA: gi_14334871, by cDNA: gi_21281266 [Arabidopsis thaliana]
  misc_feature (1)..(670): Homolog of NCBI NO: 7488258 NR Description: protein kinase homolog F28A23.20 - Arabidopsis
  misc_feature (1)..(552): Homolog of NCBI NO: 18086496 NR Description: AT4g37250/C7A10_110 [Arabidopsis thaliana]
  misc_feature (570)..(667): Homolog of NCBI NO: 18086496 NR Description: AT4g37250/C7A10_110 [Arabidopsis thaliana]
  misc_feature (1)..(552): Homolog of NCBI NO: 25387059 NR Description: receptor kinase-like protein [imported] -
  misc_feature (1)..(552): Homolog of NCBI NO: 30690913 NR Description: leucine rich repeat protein family [Arabidopsis
  misc_feature (570)..(667): Homolog of NCBI NO: 30690913 NR Description: leucine rich repeat protein family [Arabidopsis
  misc_feature (570)..(667): Homolog of NCBI NO: 25387059 NR Description: receptor kinase-like protein [imported] -
  misc_feature (1)..(325): Homolog of NCBI NO: 15240265 NR Description: leucine-rich repeat transmembrane protein kinase, protein id: At5g67280.1, supported by cDNA: 110712., supported by
  misc_feature (345)..(580): Homolog of NCBI NO: 15240265 NR Description: leucine-rich repeat transmembrane protein kinase, protein id: At5g67280.1, supported by cDNA: 110712., supported by
MFRVTSLVLPNKQLLGSVSPDLFSILHLRILDLSDNFFHGSLPDSVSNASELRILSLGNNKVSGELPRSISNVASLQLLNLSANALTGKIPPNLSLPKNLTVISLAKNSFSGDIPSGFEAVQVLDISSNLLDGSLPPDFRGTSLLYLNLSNNQISGMISPPFAEKFPASAIIDLSFNNLTGPIPNTPPLLNQKTESFSGNIGLCGQPLKTLCSIPSTLSDPPNISETTSPAIAVMPTTPTPTNSSTESTNQTAKSKLKPSTIIGITLADIAGLAIIAMFILYIYQLKKRRSYQEYSTFNVLQKCLEKNDTLSVKKSKHNVADALEFTKSPPAKMGCGSWISRRYEETTSVSSESDIENQKPVEAFDRTGGGRVKHNTETQLVTVDGETQLELDTLLKASAYVLGTNRSDGIVYKAVLENGAAFAVRRIGAESCPAAKFKEFEKEVQGIAKLRHPNLVRVRGFVWGKEEKLLISDYVPNGNLPLSSISAKSSSFSHKPLSFEARLKLARGIARGIAYIHDKKHVHGNIKANNILLDSEFEPVITDMGLDRIMTSAHLLTDGPLSSLQDQPPEWSTSQKPNPKWDVYSFGVILLELLTGIVFSVDRDLVRDSETDEKSWFLKLVDGEIRVEVAHREDEAVACLKLGYECVSSLPQKRPSMKEVVQVLEKMFV

SEQ ID NO: 95857 - protein, 514 aa, Arabidopsis thaliana
  peptide (1)..(514): Ceres Seq. ID no. 12730672
  misc_feature (1)..(514): Homolog of NCBI NO: 18418404 NR Description: leucine-rich repeat transmembrane protein kinase, protein id: At4g34220.1, supported by cDNA: gi_14334871, by cDNA: gi_21281266 [Arabidopsis thaliana]
  misc_feature (1)..(514): Homolog of NCBI NO: 7488258 NR Description: protein kinase homolog F28A23.20 - Arabidopsis
  misc_feature (1)..(396): Homolog of NCBI NO: 18086496 NR Description: AT4g37250/C7A10_110 [Arabidopsis thaliana]
  misc_feature (414)..(511): Homolog of NCBI NO: 18086496 NR Description: AT4g37250/C7A10_110 [Arabidopsis thaliana]
  misc_feature (1)..(396): Homolog of NCBI NO: 25387059 NR Description: receptor kinase-like protein [imported] -
  misc_feature (1)..(396): Homolog of NCBI NO: 30690913 NR Description: leucine rich repeat protein family [Arabidopsis
  misc_feature (414)..(511): Homolog of NCBI NO: 30690913 NR Description: leucine rich repeat protein family [Arabidopsis
  misc_feature (414)..(511): Homolog of NCBI NO: 25387059 NR Description: receptor kinase-like protein [imported] -
  misc_feature (1)..(169): Homolog of NCBI NO: 15240265 NR Description: leucine-rich repeat transmembrane protein kinase, protein id: At5g67280.1, supported by cDNA: 110712., supported by
  misc_feature (189)..(424): Homolog of NCBI NO: 15240265 NR Description: leucine-rich repeat transmembrane protein kinase, protein id: At5g67280.1, supported by cDNA: 110712., supported by
MISPPFAEKFPASAIIDLSFNNLTGPIPNTPPLLNQKTESFSGNIGLCGQPLKTLCSIPSTLSDPPNISETTSPAIAVMPTTPTPTNSSTESTNQTAKSKLKPSTIIGITLADIAGLAIIAMFILYIYQLKKRRSYQEYSTFNVLQKCLEKNDTLSVKKSKHNVADALEFTKSPPAKMGCGSWISRRYEETTSVSSESDIENQKPVEAFDRTGGGRVKHNTETQLVTVDGETQLELDTLLKASAYVLGTNRSDGIVYKAVLENGAAFAVRRIGAESCPAAKFKEFEKEVQGIAKLRHPNLVRVRGFVWGKEEKLLISDYVPNGNLPLSSISAKSSSFSHKPLSFEARLKLARGIARGIAYIHDKKHVHGNIKANNILLDSEFEPVITDMGLDRIMTSAHLLTDGPLSSLQDQPPEWSTSQKPNPKWDVYSFGVILLELLTGIVFSVDRDLVRDSETDEKSWFLKLVDGEIRVEVAHREDEAVACLKLGYECVSSLPQKRPSMKEVVQVLEKMFV

SEQ ID NO: 95858 - DNA, 1087 bp, Arabidopsis thaliana
  misc_feature (1)..(1087): Ceres Seq. ID no. 12730673
  misc_feature: MA Experiment ID: 20000171 Result: Up-regulated in Transcription
  misc_feature: MA Experiment 20000171 PARAMETER Experiment Name: At_42deg_Heat_P Parameter: Age (day) Value: 14
  misc_feature: MA Experiment 20000171 PARAMETER Experiment Name: At_42deg_Heat_P Parameter: Organism Value: A. thaliana
  misc_feature: MA Experiment 20000171 PARAMETER Experiment Name: At_42deg_Heat_P Parameter: Plant Line Value: WS
  misc_feature: MA Experiment 20000171 PARAMETER Experiment Name: At_42deg_Heat_P Parameter: Temperature (deg C) Value: 42 vs. 22
  misc_feature: MA Experiment 20000171 PARAMETER Experiment Name: At_42deg_Heat_P Parameter: Timepoint (hr) Value: 1
  misc_feature: MA Experiment 20000171 PARAMETER Experiment Name: At_42deg_Heat_P Parameter: Tissue Value: Aerial
  misc_feature: MA Experiment ID: 20000265 Result: Down-regulated in Transcription
  misc_feature: MA Experiment 20000265 PARAMETER Experiment Name: At_Open_Flower_P Parameter: Age (day) Value: 21
  misc_feature: MA Experiment 20000265 PARAMETER Experiment Name: At_Open_Flower_P Parameter: Plant Line Value: WS
  misc_feature: MA Experiment 20000265 PARAMETER Experiment Name: At_Open_Flower_P Parameter: Tissue Value: Closed Flower vs. Whole Plant
  misc_feature: MA Experiment ID: 20000437 Result: Up-regulated in Transcription
  misc_feature: MA Experiment 20000437 PARAMETER Experiment Name: At_Drought_P Parameter: Age (day) Value: 8
  misc_feature: MA Experiment 20000437 PARAMETER Experiment Name: At_Drought_P Parameter: Organism Value: A. thaliana
  misc_feature: MA Experiment 20000437 PARAMETER Experiment Name: At_Drought_P Parameter: Plant Line Value: WS
  misc_feature: MA Experiment 20000437 PARAMETER Experiment Name: At_Drought_P Parameter: Timepoint (hr) Value: 24
  misc_feature: MA Experiment 20000437 PARAMETER Experiment Name: At_Drought_P Parameter: Tissue Value: Whole Plant
  misc_feature: MA Experiment 20000437 PARAMETER Experiment Name: At_Drought_P Parameter: Treatment Value: Drought vs. No Drought
  misc_feature: MA Experiment ID: 20000438 Result: Down-regulated in Transcription
  misc_feature: MA Experiment 20000438 PARAMETER Experiment Name: At_Shoots__P Parameter: Age (day) Value: 14
  misc_feature: MA Experiment 20000438 PARAMETER Experiment Name: At_Shoots__P Parameter: Tissue Value: Shoots vs. Whole Plant
  misc_feature: MA Experiment ID: 20001757 Result: Down-regulated in Transcription
  misc_feature: MA Experiment 20001757 PARAMETER Experiment Name: At_50mM_NH4NO3_L-to-H_P Parameter: Timepoint (hr) Value: 6
  misc_feature: MA Experiment 20001757 PARAMETER Experiment Name: At_50mM_NH4NO3_L-to-H_P Parameter: Tissue Value: Leaf
  misc_feature: MA Experiment 20001757 PARAMETER Experiment Name: At_50mM_NH4NO3_L-to-H_P Parameter: Treatment Value: 50mM NH4NO3 vs 100mM Mannitol
  misc_feature: MA Experiment ID: 20001904 Result: Up-regulated in Transcription
  misc_feature: MA Experiment 20001904 PARAMETER Experiment Name: At_Drought_Reproduction_P Parameter: Age (day) Value: 37
  misc_feature: MA Experiment 20001904 PARAMETER Experiment Name: At_Drought_Reproduction_P Parameter: Organism Value: A. thaliana
  misc_feature: MA Experiment 20001904 PARAMETER Experiment Name: At_Drought_Reproduction_P Parameter: Plant Line Value: WS
  misc_feature: MA Experiment 20001904 PARAMETER Experiment Name: At_Drought_Reproduction_P Parameter: Timepoint (day) Value: 7
  misc_feature: MA Experiment 20001904 PARAMETER Experiment Name: At_Drought_Reproduction_P Parameter: Tissue Value: Rosettes
  misc_feature: MA Experiment 20001904 PARAMETER Experiment Name: At_Drought_Reproduction_P Parameter: Treatment Value: Drought vs. No Drought
aatctgcaaatcaaactttcagttattttttcttttctctcatgtgtgtaaaatactcttcatagatctcatataagtccaagcttgaattgaaatatcagaagctgtgtttctttcactgtatctaagatccttgtttttgttttttgttctacatgggagccagattttcacgtatagcgaaaaggtttcttcctaaaagtaaagtaaggattttgatggttggtcttgatggttcagggaagactaccatcctttacaagttgaagcttggagaagttgtcacaacagtgcctactattggtttcaacctcgagacagtagaatacaaaggcatcaatttcactgtatgggatataggaggacaagagaagattcgcaaattgtggagacactatttccagaacgcgcaggggctcatctttgtagtggacagcagcgatagtgaaaggttatcagaagctcgaaacgagctgcatcgcatactaaccgataatgaactagaaggtgcatgtgtacttgtctttgcgaacaagcaagattcgagaaatgctttacctgtagccgaggttgccaacaaacttggtctacacagcctatccaaacgttgttggcttatacaaggaacctcagctatctctgggcaaggattatacgaaggacttgagtggctatcgacaacaatccccaacaaacccgaacggtctacttcggttagtagtttccggagtgattcctatgagaggaagctggtccgaggtccgaggtattaaaaggctttaaatggttactccaacgtaaaaaacagaacgcaccagaaagggcaagtgtatttttgtactagcttgtttggtatacgctctgattcgtacgagcaaccaaaatagctctcttctgcgttctatatttgtatgattatgttgttttgttttcaatgtttctcattgagaaccatatttgactattactcatattatggtgtgaataaggttttctagggtatatatctttacgagtttacgtacaccctttacatgatgaatattttctcgttcttactttagaatttaacatattttattttatt

SEQ ID NO: 95859 - protein, 205 aa, Arabidopsis thaliana
  peptide (1)..(205): Ceres Seq. ID no. 12730674
  misc_feature (4)..(177): Pfam Name: ADP-ribosylation factor family Pfam Description: ADP-ribosylation factor family
  misc_feature (1)..(205): Homolog of NCBI NO: 15226086 NR Description: putative ADP-ribosylation factor; protein id: supported by cDNA: gi_15450780, supported by cDNA: gi_20259849
  misc_feature (1)..(180): Homolog of NCBI NO: 1703374 NR Description: ADP-RIBOSYLATION FACTOR 1 >gi|2129457|pir||S66337
  misc_feature (1)..(180): Homolog of NCBI NO: 1703380 NR Description: ADP-RIBOSYLATION FACTOR >gi|25294170|pir||T52341
  misc_feature (1)..(180): Homolog of NCBI NO: 17154685 NR Description: ADP-ribosylation factor [Gossypium hirsutum]
  misc_feature (1)..(180): Homolog of NCBI NO: 25294169 NR Description: ADP-ribosylation factor [imported] - pepper
  misc_feature (1)..(180): Homolog of NCBI NO: 11131026 NR Description: ADP-ribosylation factor
  misc_feature (1)..(180): Homolog of NCBI NO: 34903082 NR Description: unnamed protein product [Oryza sativa (japonica group)] >gi|6815060|dbj|BAA90347.1| unnamed protein product
  misc_feature (1)..(180): Homolog of NCBI NO: 34909214 NR Description: putative ADP-ribosylation factor [Oryza sativa
  misc_feature (1)..(180): Homolog of NCBI NO: 11131023 NR Description: ADP-ribosylation factor 1
  misc_feature (1)..(180): Homolog of NCBI NO: 15228723 NR Description: ADP-ribosylation factor-like protein; protein id: supported by cDNA: 14909., supported by cDNA: gi_13926301, by cDNA: gi_16323247 [Arabidopsis thaliana]
MGARFSRIAKRFLPKSKVRILMVGLDGSGKTTILYKLKLGEVVTTVPTIGFNLETVEYKGINFTVWDIGGQEKIRKLWRHYFQNAQGLIFVVDSSDSERLSEARNELHRILTDNELEGACVLVFANKQDSRNALPVAEVANKLGLHSLSKRCWLIQGTSAISGQGLYEGLEWLSTTIPNKPERSTSVSSFRSDSYERKLVRGPRY

SEQ ID NO: 95860 - protein, 184 aa, Arabidopsis thaliana
  peptide (1)..(184): Ceres Seq. ID no. 12730675
  misc_feature (1)..(156): Pfam Name: ADP-ribosylation factor family Pfam Description: ADP-ribosylation factor family
  misc_feature (1)..(184): Homolog of NCBI NO: 15226086 NR Description: putative ADP-ribosylation factor; protein id: supported by cDNA: gi_15450780, supported by cDNA: gi_20259849
  misc_feature (1)..(159): Homolog of NCBI NO: 1703374 NR Description: ADP-RIBOSYLATION FACTOR 1 >gi|2129457|pir||S66337
  misc_feature (1)..(159): Homolog of NCBI NO: 1703380 NR Description: ADP-RIBOSYLATION FACTOR >gi|25294170|pir||T52341
  misc_feature (1)..(159): Homolog of NCBI NO: 17154685 NR Description: ADP-ribosylation factor [Gossypium hirsutum]
  misc_feature (1)..(159): Homolog of NCBI NO: 25294169 NR Description: ADP-ribosylation factor [imported] - pepper
  misc_feature (1)..(159): Homolog of NCBI NO: 11131026 NR Description: ADP-ribosylation factor
  misc_feature (1)..(159): Homolog of NCBI NO: 34903082 NR Description: unnamed protein product [Oryza sativa (japonica group)] >gi|6815060|dbj|BAA90347.1| unnamed protein product
  misc_feature (1)..(159): Homolog of NCBI NO: 34909214 NR Description: putative ADP-ribosylation factor [Oryza sativa
  misc_feature (1)..(159): Homolog of NCBI NO: 11131023 NR Description: ADP-ribosylation factor 1
  misc_feature (1)..(159): Homolog of NCBI NO: 15228723 NR Description: ADP-ribosylation factor-like protein; protein id: supported by cDNA: 14909., supported by cDNA: gi_13926301, by cDNA: gi_16323247 [Arabidopsis thaliana]
MVGLDGSGKTTILYKLKLGEVVTTVPTIGFNLETVEYKGINFTVWDIGGQEKIRKLWRHYFQNAQGLIFVVDSSDSERLSEARNELHRILTDNELEGACVLVFANKQDSRNALPVAEVANKLGLHSLSKRCWLIQGTSAISGQGLYEGLEWLSTTIPNKPERSTSVSSFRSDSYERKLVRGPRY

SEQ ID NO: 95861 - DNA, 1542 bp, Arabidopsis thaliana
  misc_feature (1)..(1542): Ceres Seq. ID no. 12730756
  misc_feature: MA Experiment ID: 20000171 Result: Down-regulated in Transcription
  misc_feature: MA Experiment 20000171 PARAMETER Experiment Name: At_42deg_Heat_P Parameter: Age (day) Value: 14
  misc_feature: MA Experiment 20000171 PARAMETER Experiment Name: At_42deg_Heat_P Parameter: Organism Value: A. thaliana
  misc_feature: MA Experiment 20000171 PARAMETER Experiment Name: At_42deg_Heat_P Parameter: Plant Line Value: WS
  misc_feature: MA Experiment 20000171 PARAMETER Experiment Name: At_42deg_Heat_P Parameter: Temperature (deg C) Value: 42 vs. 22
  misc_feature: MA Experiment 20000171 PARAMETER Experiment Name: At_42deg_Heat_P Parameter: Timepoint (hr) Value: 1
  misc_feature: MA Experiment 20000171 PARAMETER Experiment Name: At_42deg_Heat_P Parameter: Tissue Value: Aerial
  misc_feature: MA Experiment ID: 20000173 Result: Down-regulated in Transcription
  misc_feature: MA Experiment 20000173 PARAMETER Experiment Name: At_42deg_Heat_P Parameter: Age (day) Value: 14
  misc_feature: MA Experiment 20000173 PARAMETER Experiment Name: At_42deg_Heat_P Parameter: Organism Value: A. thaliana
  misc_feature: MA Experiment 20000173 PARAMETER Experiment Name: At_42deg_Heat_P Parameter: Plant Line Value: WS
  misc_feature: MA Experiment 20000173 PARAMETER Experiment Name: At_42deg_Heat_P Parameter: Temperature (deg C) Value: 42 vs. 22
  misc_feature: MA Experiment 20000173 PARAMETER Experiment Name: At_42deg_Heat_P Parameter: Timepoint (hr) Value: 6
  misc_feature: MA Experiment 20000173 PARAMETER Experiment Name: At_42deg_Heat_P Parameter: Tissue Value: Aerial
  misc_feature: MA Experiment ID: 20000182 Result: Up-regulated in Transcription
  misc_feature: MA Experiment 20000182 PARAMETER Experiment Name: At_2mM_SA_P Parameter: Age (day) Value: 14
  misc_feature: MA Experiment 20000182 PARAMETER Experiment Name: At_2mM_SA_P Parameter: Organism Value: A. thaliana
  misc_feature: MA Experiment 20000182 PARAMETER Experiment Name: At_2mM_SA_P Parameter: Plant Line Value: WS
  misc_feature: MA Experiment 20000182 PARAMETER Experiment Name: At_2mM_SA_P Parameter: Timepoint (hr) Value: 6
  misc_feature: MA Experiment 20000182 PARAMETER Experiment Name: At_2mM_SA_P Parameter: Tissue Value: Aerial
  misc_feature: MA Experiment 20000182 PARAMETER Experiment Name: At_2mM_SA_P Parameter: Treatment Value: 2mM SA vs. No Treatment
  misc_feature: MA Experiment ID: 20000184 Result: Down-regulated in Transcription
  misc_feature: MA Experiment 20000184 PARAMETER Experiment Name: At_Shoots__P Parameter: Age (day) Value: 7
  misc_feature: MA Experiment 20000184 PARAMETER Experiment Name: At_Shoots__P Parameter: Tissue Value: Shoots vs. Whole Plant
  misc_feature: MA Experiment ID: 20000213 Result: Up-regulated in Transcription
  misc_feature: MA Experiment 20000213 PARAMETER Experiment Name: At_4deg_Cold_P Parameter: Timepoint (hr) Value: 2
  misc_feature: MA Experiment ID: 20000227 Result: Down-regulated in Transcription
  misc_feature: MA Experiment 20000227 PARAMETER Experiment Name: At_Root-Tips-vs-Tops_P Parameter: Tissue Value: Root Tips vs. Root Tops
  misc_feature: MA Experiment ID: 20000234 Result: Down-regulated in Transcription
  misc_feature: MA Experiment 20000234 PARAMETER Experiment Name: At_Siliques_P Parameter: Age (day) Value: 21
  misc_feature: MA Experiment 20000234 PARAMETER Experiment Name: At_Siliques_P Parameter: Organism Value: A. thaliana
  misc_feature: MA Experiment 20000234 PARAMETER Experiment Name: At_Siliques_P Parameter: Plant Line Value: WS
  misc_feature: MA Experiment 20000234 PARAMETER Experiment Name: At_Siliques_P Parameter: Tissue Value: Less Than 5mm Siliques vs. Whole Plant
  misc_feature: MA Experiment ID: 20000264 Result: Down-regulated in Transcription
  misc_feature: MA Experiment 20000264 PARAMETER Experiment Name: At_Open_Flower_P Parameter: Age (day) Value: 21
  misc_feature: MA Experiment 20000264 PARAMETER Experiment Name: At_Open_Flower_P Parameter: Plant Line Value: WS
  misc_feature: MA Experiment 20000264 PARAMETER Experiment Name: At_Open_Flower_P Parameter: Tissue Value: Open Flower vs. Whole Plant
  misc_feature: MA Experiment ID: 20000265 Result: Down-regulated in Transcription
  misc_feature: MA Experiment 20000265 PARAMETER Experiment Name: At_Open_Flower_P Parameter: Age (day) Value: 21
  misc_feature: MA Experiment 20000265 PARAMETER Experiment Name: At_Open_Flower_P Parameter: Plant Line Value: WS
  misc_feature: MA Experiment 20000265 PARAMETER Experiment Name: At_Open_Flower_P Parameter: Tissue Value: Closed Flower vs. Whole Plant
  misc_feature: MA Experiment ID: 20000286 Result: Down-regulated in Transcription
  misc_feature: MA Experiment 20000286 PARAMETER Experiment Name: At_Open_Flower_P Parameter: Age (day) Value: 21
  misc_feature: MA Experiment 20000286 PARAMETER Experiment Name: At_Open_Flower_P Parameter: Plant Line Value: WS
  misc_feature: MA Experiment 20000286 PARAMETER Experiment Name: At_Open_Flower_P Parameter: Tissue Value: Half Open vs. Whole Plant
  misc_feature: MA Experiment ID: 20000438 Result: Down-regulated in Transcription
  misc_feature: MA Experiment 20000438 PARAMETER Experiment Name: At_Shoots__P Parameter: Age (day) Value: 14
  misc_feature: MA Experiment 20000438 PARAMETER Experiment Name: At_Shoots__P Parameter: Tissue Value: Shoots vs. Whole Plant
  misc_feature: MA Experiment ID: 20000452 Result: Up-regulated in Transcription
  misc_feature: MA Experiment 20000452 PARAMETER Experiment Name: At_CS6879_Shoots-Roots_P Parameter: Age (day) Value: 14
  misc_feature: MA Experiment 20000452 PARAMETER Experiment Name: At_CS6879_Shoots-Roots_P Parameter: Organism Value: A. thaliana
  misc_feature: MA Experiment 20000452 PARAMETER Experiment Name: At_CS6879_Shoots-Roots_P Parameter: Plant Line Value: CS6879 vs. WS
  misc_feature: MA Experiment 20000452 PARAMETER Experiment Name: At_CS6879_Shoots-Roots_P Parameter: Tissue Value: Shoots
  misc_feature: MA Experiment ID: 20000573 Result: Down-regulated in Transcription
  misc_feature: MA Experiment 20000573 PARAMETER Experiment Name: At_100uM_ABA_Mutants__P Parameter: Organism Value: A. thaliana
  misc_feature: MA Experiment 20000573 PARAMETER Experiment Name: At_100uM_ABA_Mutants__P Parameter: Plant Line Value: CS22 vs. Ler wt
  misc_feature: MA Experiment 20000573 PARAMETER Experiment Name: At_100uM_ABA_Mutants__P Parameter: Timepoint (hr) Value: N/A
  misc_feature: MA Experiment 20000573 PARAMETER Experiment Name: At_100uM_ABA_Mutants__P Parameter: Tissue Value: Whole Plant
  misc_feature: MA Experiment 20000573 PARAMETER Experiment Name: At_100uM_ABA_Mutants__P Parameter: Treatment Value: None
  misc_feature: MA Experiment ID: 20000794 Result: Down-regulated in Transcription
  misc_feature: MA Experiment 20000794 PARAMETER Experiment Name: At_Petals_P Parameter: Age (day) Value: 23-25 days
  misc_feature: MA Experiment 20000794 PARAMETER Experiment Name: At_Petals_P Parameter: Plant Line Value: WS
  misc_feature: MA Experiment 20000794 PARAMETER Experiment Name: At_Petals_P Parameter: Tissue Value: Petals vs. Whole plant
  misc_feature: MA Experiment ID: 20001248 Result: Down-regulated in Transcription
  misc_feature: MA Experiment 20001248 PARAMETER Experiment Name: At_Far-red-induction_P Parameter: Age (day) Value: 7
  misc_feature: MA Experiment 20001248 PARAMETER Experiment Name: At_Far-red-induction_P Parameter: Light Value: Far-red vs. White
  misc_feature: MA Experiment 20001248 PARAMETER Experiment Name: At_Far-red-induction_P Parameter: Organism Value: A. thaliana
  misc_feature: MA Experiment 20001248 PARAMETER Experiment Name: At_Far-red-induction_P Parameter: Plant Line Value: Columbia
  misc_feature: MA Experiment 20001248 PARAMETER Experiment Name: At_Far-red-induction_P Parameter: Timepoint (hr) Value: 4
  misc_feature: MA Experiment 20001248 PARAMETER Experiment Name: At_Far-red-induction_P Parameter: Tissue Value: Whole Plant
  misc_feature: MA Experiment ID: 20001904 Result: Down-regulated in Transcription
  misc_feature: MA Experiment 20001904 PARAMETER Experiment Name: At_Drought_Reproduction_P Parameter: Age (day) Value: 37
  misc_feature: MA Experiment 20001904 PARAMETER Experiment Name: At_Drought_Reproduction_P Parameter: Organism Value: A. thaliana
  misc_feature: MA Experiment 20001904 PARAMETER Experiment Name: At_Drought_Reproduction_P Parameter: Plant Line Value: WS
  misc_feature: MA Experiment 20001904 PARAMETER Experiment Name: At_Drought_Reproduction_P Parameter: Timepoint (day) Value: 7
  misc_feature: MA Experiment 20001904 PARAMETER Experiment Name: At_Drought_Reproduction_P Parameter: Tissue Value: Rosettes
  misc_feature: MA Experiment 20001904 PARAMETER Experiment Name: At_Drought_Reproduction_P Parameter: Treatment Value: Drought vs. No Drought
aaacaagaagaagaaaagaaacacaaaatcaacaacaatggcggtgaagaagaaagtttcatggagatcactaatcgttggatgtttaggagatccagaaaccctaatggcatcttcaaagaaacctaaaagaaaaaatgacgtcatcaagaaacagagctcttttcaaagactatcgatacttgatatgagcaatccaagttccaacactttgtcagaagatctatcgatttctttggccggatcagatcttcatgtgtttaccctagcggagcttaaagtcattacacaaagcttttcatcgaccaattttctaggtgaaggtgggtttggtcctgttcataagggtttcattgatgataagctacgtcctggtcttaaagctcagcctgttgctgttaaattgcttgatcttgaaggtcttcaaggtcaccgtgaatggctgacggaagttatgtttttgggacaattgaagcacaaaaatttggtgaaattgattggttattgttgtgaggaagaacatagaactcttgtttatgagttcatgcctcgtggaagcttagagaatcaacttttcagaagatactctgcctcgcttccatggtcaacaagaatgaagatcgctcatggagctgcaacaggacttcaatttctacacgaagctgaaaatcctgttatctatcgggatttcaaagcctccaatatcttgttagattccgattacacggcgaaactctctgacttcgggttagccaaagacggaccagaaggagacgacactcatgtgtcaactcgagtgatgggcacacaaggctacgcagctcctgaatacatcatgaccggtcatttaacagcaagaagtgacgtatacagctttggagttgtgttgctagagcttttgaccggacggagatcagtagacaaaaagagatcatcgagggaacaaaaccttgtggactgggctcgtccaatgctcaatgacccacgtaaactatctcgaatcatggacccgagacttgaaggtcagtactcagagacaggagcaagaaaagcagcaacattggcttaccaatgcttaagccatcgacccaagaaccggccatgtatgagtgccgtcgtctctatactcaatgatcttaaagactataatgatattcctatggggactttcacttacacggtgccaaacactccggacaataaagaagatgatggtcgtgttggtaataagccacgtaagagtagtcatcatcatcatcatcaacaacaacaaagtaatcatccccggtcgtctccatctccgacaaccaagtctccatctcccacggccaagtcgccgaggaattcaacggaaaatcaccggagaacgttgagaaatggagtgaattcgccgttgagaagtgaggcaggtggggaacggtactaagtttttctagtcacaccaactcttaaaattcattttttttcctttaatctaatgtaaataattcatacgtttgtcttttcgtaatgtaagaatatataattatatttttttttgtg

SEQ ID NO: 95862 - protein, 474 aa, Arabidopsis thaliana
  peptide (1)..(474): Ceres Seq. ID no. 12730757
  misc_feature (13)..(474): Homolog of NCBI NO: 15225019 NR Description: putative protein kinase; protein id: At2g05940.1, by cDNA: gi_15810412, supported by cDNA: gi_21280976 [Arabidopsis >gi|25287639|pir||C84473 probable protein kinase putative protein
  misc_feature (13)..(474): Homolog of NCBI NO: 10176804 NR Description: serine/threonine protein kinase-like [Arabidopsis
  misc_feature (13)..(474): Homolog of NCBI NO: 15238553 NR Description: serine/threonine protein kinase-like; protein id:
  misc_feature (18)..(454): Homolog of NCBI NO: 30013675 NR Description: Avr9/Cf-9 rapidly elicited protein 264 [Nicotiana
  misc_feature (19)..(410): Homolog of NCBI NO: 14484938 NR Description: auxin-regulated dual specificity cytosolic kinase
  misc_feature (139)..(412): Homolog of NCBI NO: 27436752 NR Description: Putative serine/threonine protein kinase [Oryza
  misc_feature (18)..(148): Homolog of NCBI NO: 27436752 NR Description: Putative serine/threonine protein kinase [Oryza
  misc_feature (21)..(448): Homolog of NCBI NO: 33147001 NR Description: putative auxin-regulated dual specificity
  misc_feature (13)..(381): Homolog of NCBI NO: 15225277 NR Description: putative protein kinase; protein id: At2g26290.1
  misc_feature (10)..(412): Homolog of NCBI NO: 15220535 NR Description: serine/threonine protein kinase, putative; id: At1g61590.1, supported by cDNA: gi_17381260, supported by gi_20453380 [Arabidopsis thaliana] >gi|25287627|pir||C96641
NKKKKRNTKSTTMAVKKKVSWRSLIVGCLGDPETLMASSKKPKRKNDVIKKQSSFQRLSILDMSNPSSNTLSEDLSISLAGSDLHVFTLAELKVITQSFSSTNFLGEGGFGPVHKGFIDDKLRPGLKAQPVAVKLLDLEGLQGHREWLTEVMFLGQLKHKNLVKLIGYCCEEEHRTLVYEFMPRGSLENQLFRRYSASLPWSTRMKIAHGAATGLQFLHEAENPVIYRDFKASNILLDSDYTAKLSDFGLAKDGPEGDDTHVSTRVMGTQGYAAPEYIMTGHLTARSDVYSFGVVLLELLTGRRSVDKKRSSREQNLVDWARPMLNDPRKLSRIMDPRLEGQYSETGARKAATLAYQCLSHRPKNRPCMSAVVSILNDLKDYNDIPMGTFTYTVPNTPDNKEDDGRVGNKPRKSSHHHHHQQQQSNHPRSSPSPTTKSPSPTAKSPRNSTENHRRTLRNGVNSPLRSEAGGERY

SEQ ID NO: 95863 - protein, 462 aa, Arabidopsis thaliana
  peptide (1)..(462): Ceres Seq. ID no. 12730758
  misc_feature (1)..(462): Homolog of NCBI NO: 15225019 NR Description: putative protein kinase; protein id: At2g05940.1, by cDNA: gi_15810412, supported by cDNA: gi_21280976 [Arabidopsis >gi|25287639|pir||C84473 probable protein kinase putative protein
  misc_feature (1)..(462): Homolog of NCBI NO: 10176804 NR Description: serine/threonine protein kinase-like [Arabidopsis
  misc_feature (1)..(462): Homolog of NCBI NO: 15238553 NR Description: serine/threonine protein kinase-like; protein id:
  misc_feature (6)..(442): Homolog of NCBI NO: 30013675 NR Description: Avr9/Cf-9 rapidly elicited protein 264 [Nicotiana
  misc_feature (7)..(398): Homolog of NCBI NO: 14484938 NR Description: auxin-regulated dual specificity cytosolic kinase
  misc_feature (127)..(400): Homolog of NCBI NO: 27436752 NR Description: Putative serine/threonine protein kinase [Oryza
  misc_feature (6)..(136): Homolog of NCBI NO: 27436752 NR Description: Putative serine/threonine protein kinase [Oryza
  misc_feature (9)..(436): Homolog of NCBI NO: 33147001 NR Description: putative auxin-regulated dual specificity
  misc_feature (1)..(369): Homolog of NCBI NO: 15225277 NR Description: putative protein kinase; protein id: At2g26290.1
  misc_feature (1)..(400): Homolog of NCBI NO: 15220535 NR Description: serine/threonine protein kinase, putative; id: At1g61590.1, supported by cDNA: gi_17381260, supported by gi_20453380 [Arabidopsis thaliana] >gi|25287627|pir||C96641
MAVKKKVSWRSLIVGCLGDPETLMASSKKPKRKNDVIKKQSSFQRLSILDMSNPSSNTLSEDLSISLAGSDLHVFTLAELKVITQSFSSTNFLGEGGFGPVHKGFIDDKLRPGLKAQPVAVKLLDLEGLQGHREWLTEVMFLGQLKHKNLVKLIGYCCEEEHRTLVYEFMPRGSLENQLFRRYSASLPWSTRMKIAHGAATGLQFLHEAENPVIYRDFKASNILLDSDYTAKLSDFGLAKDGPEGDDTHVSTRVMGTQGYAAPEYIMTGHLTARSDVYSFGVVLLELLTGRRSVDKKRSSREQNLVDWARPMLNDPRKLSRIMDPRLEGQYSETGARKAATLAYQCLSHRPKNRPCMSAVVSILNDLKDYNDIPMGTFTYTVPNTPDNKEDDGRVGNKPRKSSHHHHHQQQQSNHPRSSPSPTTKSPSPTAKSPRNSTENHRRTLRNGVNSPLRSEAGGERY

SEQ ID NO: 95864 - protein, 439 aa, Arabidopsis thaliana
  peptide (1)..(439): Ceres Seq. ID no. 12730759
  misc_feature (1)..(439): Homolog of NCBI NO: 15225019 NR Description: putative protein kinase; protein id: At2g05940.1, by cDNA: gi_15810412, supported by cDNA: gi_21280976 [Arabidopsis >gi|25287639|pir||C84473 probable protein kinase putative protein
  misc_feature (1)..(439): Homolog of NCBI NO: 10176804 NR Description: serine/threonine protein kinase-like [Arabidopsis
  misc_feature (1)..(439): Homolog of NCBI NO: 15238553 NR Description: serine/threonine protein kinase-like; protein id:
  misc_feature (1)..(419): Homolog of NCBI NO: 30013675 NR Description: Avr9/Cf-9 rapidly elicited protein 264 [Nicotiana
  misc_feature (1)..(375): Homolog of NCBI NO: 14484938 NR Description: auxin-regulated dual specificity cytosolic kinase
  misc_feature (104)..(377): Homolog of NCBI NO: 27436752 NR Description: Putative serine/threonine protein kinase [Oryza
  misc_feature (1)..(113): Homolog of NCBI NO: 27436752 NR Description: Putative serine/threonine protein kinase [Oryza
  misc_feature (1)..(413): Homolog of NCBI NO: 33147001 NR Description: putative auxin-regulated dual specificity
  misc_feature (1)..(346): Homolog of NCBI NO: 15225277 NR Description: putative protein kinase; protein id: At2g26290.1
  misc_feature (1)..(377): Homolog of NCBI NO: 15220535 NR Description: serine/threonine protein kinase, putative; id: At1g61590.1, supported by cDNA: gi_17381260, supported by gi_20453380 [Arabidopsis thaliana] >gi|25287627|pir||C96641
MASSKKPKRKNDVIKKQSSFQRLSILDMSNPSSNTLSEDLSISLAGSDLHVFTLAELKVITQSFSSTNFLGEGGFGPVHKGFIDDKLRPGLKAQPVAVKLLDLEGLQGHREWLTEVMFLGQLKHKNLVKLIGYCCEEEHRTLVYEFMPRGSLENQLFRRYSASLPWSTRMKIAHGAATGLQFLHEAENPVIYRDFKASNILLDSDYTAKLSDFGLAKDGPEGDDTHVSTRVMGTQGYAAPEYIMTGHLTARSDVYSFGVVLLELLTGRRSVDKKRSSREQNLVDWARPMLNDPRKLSRIMDPRLEGQYSETGARKAATLAYQCLSHRPKNRPCMSAVVSILNDLKDYNDIPMGTFTYTVPNTPDNKEDDGRVGNKPRKSSHHHHHQQQQSNHPRSSPSPTTKSPSPTAKSPRNSTENHRRTLRNGVNSPLRSEAGGERY

SEQ ID NO: 95865 - DNA, 1176 bp, Arabidopsis thaliana
  misc_feature (1)..(1176): Ceres Seq. ID no. 12730771
  misc_feature: MA Experiment ID: 108434 Result: Down-regulated in Transcription
  misc_feature: MA Experiment 108434 PARAMETER Experiment Name: At_Root_Tips_cDNA_P Parameter: Tissue Value: Root Tips
  misc_feature: MA Experiment ID: 108463 Result: Up-regulated in Transcription
  misc_feature: MA Experiment 108463 PARAMETER Experiment Name: At_Germinating_Seeds_cDNA_P Parameter: Age (day) Value: 3 vs. 0
  misc_feature: MA Experiment 108463 PARAMETER Experiment Name: At_Germinating_Seeds_cDNA_P Parameter: Tissue Value: Germinating Seeds
  misc_feature: MA Experiment ID: 108464 Result: Up-regulated in Transcription
  misc_feature: MA Experiment 108464 PARAMETER Experiment Name: At_Germinating_Seeds_cDNA_P Parameter: Age (day) Value: 4 vs. 0
  misc_feature: MA Experiment 108464 PARAMETER Experiment Name: At_Germinating_Seeds_cDNA_P Parameter: Tissue Value: Germinating Seeds
  misc_feature: MA Experiment ID: 108569 Result: Up-regulated in Transcription
  misc_feature: MA Experiment 108569 PARAMETER Experiment Name: At_0.001%_MeJA__cDNA_P Parameter: Timepoint (hr) Value: 6
  misc_feature: MA Experiment 108569 PARAMETER Experiment Name: At_0.001%_MeJA__cDNA_P Parameter: Tissue Value: Aerial
  misc_feature: MA Experiment 108569 PARAMETER Experiment Name: At_0.001%_MeJA__cDNA_P Parameter: Treatment Value: 0.001% MeJA vs. No Treatment
  misc_feature: MA Experiment ID: 108573 Result: Up-regulated in Transcription
  misc_feature: MA Experiment 108573 PARAMETER Experiment Name: At_Drought_cDNA_P Parameter: Timepoint (hr) Value: 6
  misc_feature: MA Experiment 108573 PARAMETER Experiment Name: At_Drought_cDNA_P Parameter: Tissue Value: Aerial
  misc_feature: MA Experiment 108573 PARAMETER Experiment Name: At_Drought_cDNA_P Parameter: Treatment Value: Drought vs. No Drought
  misc_feature: MA Experiment ID: 108574 Result: Up-regulated in Transcription
  misc_feature: MA Experiment 108574 PARAMETER Experiment Name: At_Wounding__cDNA_P Parameter: Timepoint (hr) Value: 1
  misc_feature: MA Experiment 108574 PARAMETER Experiment Name: At_Wounding__cDNA_P Parameter: Tissue Value: Aerial
  misc_feature: MA Experiment 108574 PARAMETER Experiment Name: At_Wounding__cDNA_P Parameter: Treatment Value: Wounding vs. No Wounding
  misc_feature: MA Experiment ID: 108577 Result: Down-regulated in Transcription
  misc_feature: MA Experiment 108577 PARAMETER Experiment Name: At_42deg_Heat_cDNA_P Parameter: Temperature (deg C) Value: 42 vs. 22
  misc_feature: MA Experiment 108577 PARAMETER Experiment Name: At_42deg_Heat_cDNA_P Parameter: Timepoint (hr) Value: 6
  misc_feature: MA Experiment 108577 PARAMETER Experiment Name: At_42deg_Heat_cDNA_P Parameter: Tissue Value: Aerial
  misc_feature: MA Experiment ID: 108595 Result: Up-regulated in Transcription
  misc_feature: MA Experiment 108595 PARAMETER Experiment Name: At_Ler-pi_Ovule_cDNA_P Parameter: Plant Line Value: null
  misc_feature: MA Experiment ID: 108667 Result: Up-regulated in Transcription
  misc_feature: MA Experiment 108667 PARAMETER Experiment Name: At_2mM_SA_cDNA_P Parameter: Plant Line Value: WS
  misc_feature: MA Experiment 108667 PARAMETER Experiment Name: At_2mM_SA_cDNA_P Parameter: Timepoint (hr) Value: 1
  misc_feature: MA Experiment 108667 PARAMETER Experiment Name: At_2mM_SA_cDNA_P Parameter: Treatment Value: 2mM SA vs. No Treatment
  misc_feature: MA Experiment ID: 20000030 Result: Down-regulated in Transcription
  misc_feature: MA Experiment 20000030 PARAMETER Experiment Name: At_CS6630_Roots_cDNA_P Parameter: Plant Line Value: CS6630 vs. WS
  misc_feature: MA Experiment 20000030 PARAMETER Experiment Name: At_CS6630_Roots_cDNA_P Parameter: Tissue Value: Roots
  misc_feature: MA Experiment ID: 20000068 Result: Down-regulated in Transcription
  misc_feature: MA Experiment ID: 20000113 Result: Down-regulated in Transcription
  misc_feature: MA Experiment 20000113 PARAMETER Experiment Name: At_42deg_Heat_cDNA_P Parameter: Temperature (deg C) Value: 42 vs. 22
  misc_feature: MA Experiment 20000113 PARAMETER Experiment Name: At_42deg_Heat_cDNA_P Parameter: Timepoint (hr) Value: 8
  misc_feature: MA Experiment 20000113 PARAMETER Experiment Name: At_42deg_Heat_cDNA_P Parameter: Tissue Value: Aerial
atgacggcggcacaagggaactctaacgagactctgttttcttcttacaagatgggaagattcgatctctctcatcgagtggttctggcgccgatgacgcggtgcagggcgttgaacggagtaccaaacgcggcgttggcagagtattatgctcaacggaccactcccggcggttttctcatctccgaaggcaccatggtctctcccggatccgcagggttcccacatgtgcctggaatctattcagatgaacaagtagaagcatggaagcaagttgtggaagcagttcacgctaagggaggtttcatcttttgtcaattatggcatgttggacgtgcttctcatgcagtgtatcaacctaatggaggatcaccaatatcgtcaacgaacaaaccaatctcggaaaacaggtggcgagttttgttgcccgatggttcccacgtgaagtacccgaaacctcgggctttagaagcttccgagatacctcgggtggtggaggattattgcctttctgctttgaatgcgattcgagctggtttcgatgggattgagatccacggggcgcatggttaccttattgatcagtttttgaaagatgggatcaatgaccgtactgaccaatacggaggatccattgcaaaccgttgtagattcttgaaacaagtagtggaaggtgtagtttcagccataggagctagtaaagttggtgtgagggtatctccggctatagatcacttggacgcaactgattctgacccactatcactcgggctagccgtggttggcatgctcaataagttacaaggtgttaatggctcaaagctcgcttaccttcacgttacacaacctcgctaccacgcctacgggcaaacagagtctggaaggcaagggagtgatgaggaagaagctaagctaatgaagagcttgaggatggcttataatggaacctttatgtctagtggaggattcaataaggaactaggtatgcaagctgttcaacaaggtgatgctgatttggtttcatatggcagactgtttatcgcaaacccggatttggtttcgcggttcaagattgatggagagttgaataaatataatcggaagacgttttacactcaagatccagttgttggctacacggattatcctttcttggctcctttttcccgcctctga

SEQ ID NO: 95866 - protein, 391 aa, Arabidopsis thaliana
  peptide (1)..(391): Ceres Seq. ID no. 12730772
  misc_feature (11)..(363): Pfam Name: NADH:flavin oxidoreductase / NADH oxidase family Pfam Description: NADH:flavin oxidoreductase / NADH oxidase family
  misc_feature (1)..(391): Homolog of NCBI NO: 15225045 NR Description: 12-oxophytodienoate reductase (OPR3)(DDE1); id: At2g06050.1, supported by cDNA: gi_10242313, supported by
  misc_feature (1)..(391): Homolog of NCBI NO: 6707797 NR Description: 12-oxo-phytodienoate reductase [Arabidopsis
  misc_feature (1)..(391): Homolog of NCBI NO: 7688991 NR Description: 12-oxo-phytodienoate reductase [Arabidopsis
  misc_feature (1)..(391): Homolog of NCBI NO: 5059115 NR Description: OPDA-reductase homolog [Arabidopsis thaliana]
  misc_feature (1)..(391): Homolog of NCBI NO: 10242314 NR Description: 12-oxo-phytodienoate reductase [Arabidopsis
  misc_feature (1)..(391): Homolog of NCBI NO: 12056507 NR Description: 12-oxophytodienoate reductase 3 [Lycopersicon
  misc_feature (12)..(385): Homolog of NCBI NO: 23495288 NR Description: 12-oxophytodienoic acid reductase [Oryza sativa]
  misc_feature (8)..(385): Homolog of NCBI NO: 5701740 NR Description: LEDI-5a protein [Lithospermum erythrorhizon]
  misc_feature (8)..(385): Homolog of NCBI NO: 5701742 NR Description: LEDI-5b protein [Lithospermum erythrorhizon]
  misc_feature (1)..(385): Homolog of NCBI NO: 2765083 NR Description: 12-oxophytodienoate reductase [Arabidopsis
MTAAQGNSNETLFSSYKMGRFDLSHRVVLAPMTRCRALNGVPNAALAEYYAQRTTPGGFLISEGTMVSPGSAGFPHVPGIYSDEQVEAWKQVVEAVHAKGGFIFCQLWHVGRASHAVYQPNGGSPISSTNKPISENRWRVLLPDGSHVKYPKPRALEASEIPRVVEDYCLSALNAIRAGFDGIEIHGAHGYLIDQFLKDGINDRTDQYGGSIANRCRFLKQVVEGVVSAIGASKVGVRVSPAIDHLDATDSDPLSLGLAVVGMLNKLQGVNGSKLAYLHVTQPRYHAYGQTESGRQGSDEEEAKLMKSLRMAYNGTFMSSGGFNKELGMQAVQQGDADLVSYGRLFIANPDLVSRFKIDGELNKYNRKTFYTQDPVVGYTDYPFLAPFSRL

SEQ ID NO: 95867 - protein, 374 aa, Arabidopsis thaliana
  peptide (1)..(374): Ceres Seq. ID no. 12730773
  misc_feature (1)..(346): Pfam Name: NADH:flavin oxidoreductase / NADH oxidase family Pfam Description: NADH:flavin oxidoreductase / NADH oxidase family
  misc_feature (1)..(374): Homolog of NCBI NO: 15225045 NR Description: 12-oxophytodienoate reductase (OPR3)(DDE1); id: At2g06050.1, supported by cDNA: gi_10242313, supported by
  misc_feature (1)..(374): Homolog of NCBI NO: 6707797 NR Description: 12-oxo-phytodienoate reductase [Arabidopsis
  misc_feature (1)..(374): Homolog of NCBI NO: 7688991 NR Description: 12-oxo-phytodienoate reductase [Arabidopsis
  misc_feature (1)..(374): Homolog of NCBI NO: 5059115 NR Description: OPDA-reductase homolog [Arabidopsis thaliana]
  misc_feature (1)..(374): Homolog of NCBI NO: 10242314 NR Description: 12-oxo-phytodienoate reductase [Arabidopsis
  misc_feature (1)..(374): Homolog of NCBI NO: 12056507 NR Description: 12-oxophytodienoate reductase 3 [Lycopersicon
  misc_feature (1)..(368): Homolog of NCBI NO: 23495288 NR Description: 12-oxophytodienoic acid reductase [Oryza sativa]
  misc_feature (1)..(368): Homolog of NCBI NO: 5701740 NR Description: LEDI-5a protein [Lithospermum erythrorhizon]
  misc_feature (1)..(368): Homolog of NCBI NO: 5701742 NR Description: LEDI-5b protein [Lithospermum erythrorhizon]
  misc_feature (1)..(368): Homolog of NCBI NO: 2765083 NR Description: 12-oxophytodienoate reductase [Arabidopsis
MGRFDLSHRVVLAPMTRCRALNGVPNAALAEYYAQRTTPGGFLISEGTMVSPGSAGFPHVPGIYSDEQVEAWKQVVEAVHAKGGFIFCQLWHVGRASHAVYQPNGGSPISSTNKPISENRWRVLLPDGSHVKYPKPRALEASEIPRVVEDYCLSALNAIRAGFDGIEIHGAHGYLIDQFLKDGINDRTDQYGGSIANRCRFLKQVVEGVVSAIGASKVGVRVSPAIDHLDATDSDPLSLGLAVVGMLNKLQGVNGSKLAYLHVTQPRYHAYGQTESGRQGSDEEEAKLMKSLRMAYNGTFMSSGGFNKELGMQAVQQGDADLVSYGRLFIANPDLVSRFKIDGELNKYNRKTFYTQDPVVGYTDYPFLAPFSRL

SEQ ID NO: 95868 - protein, 360 aa, Arabidopsis thaliana
  peptide (1)..(360): Ceres Seq. ID no. 12730774
  misc_feature (1)..(332): Pfam Name: NADH:flavin oxidoreductase / NADH oxidase family Pfam Description: NADH:flavin oxidoreductase / NADH oxidase family
  misc_feature (1)..(360): Homolog of NCBI NO: 15225045 NR Description: 12-oxophytodienoate reductase (OPR3)(DDE1); id: At2g06050.1, supported by cDNA: gi_10242313, supported by
  misc_feature (1)..(360): Homolog of NCBI NO: 6707797 NR Description: 12-oxo-phytodienoate reductase [Arabidopsis
  misc_feature (1)..(360): Homolog of NCBI NO: 7688991 NR Description: 12-oxo-phytodienoate reductase [Arabidopsis
  misc_feature (1)..(360): Homolog of NCBI NO: 5059115 NR Description: OPDA-reductase homolog [Arabidopsis thaliana]
  misc_feature (1)..(360): Homolog of NCBI NO: 10242314 NR Description: 12-oxo-phytodienoate reductase [Arabidopsis
  misc_feature (1)..(360): Homolog of NCBI NO: 12056507 NR Description: 12-oxophytodienoate reductase 3 [Lycopersicon
  misc_feature (1)..(354): Homolog of NCBI NO: 23495288 NR Description: 12-oxophytodienoic acid reductase [Oryza sativa]
  misc_feature (1)..(354): Homolog of NCBI NO: 5701740 NR Description: LEDI-5a protein [Lithospermum erythrorhizon]
  misc_feature (1)..(354): Homolog of NCBI NO: 5701742 NR Description: LEDI-5b protein [Lithospermum erythrorhizon]
  misc_feature (1)..(354): Homolog of NCBI NO: 2765083 NR Description: 12-oxophytodienoate reductase [Arabidopsis
MTRCRALNGVPNAALAEYYAQRTTPGGFLISEGTMVSPGSAGFPHVPGIYSDEQVEAWKQVVEAVHAKGGFIFCQLWHVGRASHAVYQPNGGSPISSTNKPISENRWRVLLPDGSHVKYPKPRALEASEIPRVVEDYCLSALNAIRAGFDGIEIHGAHGYLIDQFLKDGINDRTDQYGGSIANRCRFLKQVVEGVVSAIGASKVGVRVSPAIDHLDATDSDPLSLGLAVVGMLNKLQGVNGSKLAYLHVTQPRYHAYGQTESGRQGSDEEEAKLMKSLRMAYNGTFMSSGGFNKELGMQAVQQGDADLVSYGRLFIANPDLVSRFKIDGELNKYNRKTFYTQDPVVGYTDYPFLAPFSRL

SEQ ID NO: 95869 - DNA, 1669 bp, Arabidopsis thaliana
  misc_feature (1)..(1669): Ceres Seq. ID no. 12730879
  misc_feature: MA Experiment ID: 20000173 Result: Down-regulated in Transcription
  misc_feature: MA Experiment 20000173 PARAMETER Experiment Name: At_42deg_Heat_P Parameter: Age (day) Value: 14
  misc_feature: MA Experiment 20000173 PARAMETER Experiment Name: At_42deg_Heat_P Parameter: Organism Value: A. thaliana
  misc_feature: MA Experiment 20000173 PARAMETER Experiment Name: At_42deg_Heat_P Parameter: Plant Line Value: WS
  misc_feature: MA Experiment 20000173 PARAMETER Experiment Name: At_42deg_Heat_P Parameter: Temperature (deg C) Value: 42 vs. 22
  misc_feature: MA Experiment 20000173 PARAMETER Experiment Name: At_42deg_Heat_P Parameter: Timepoint (hr) Value: 6
  misc_feature: MA Experiment 20000173 PARAMETER Experiment Name: At_42deg_Heat_P Parameter: Tissue Value: Aerial
  misc_feature: MA Experiment ID: 20000180 Result: Up-regulated in Transcription
  misc_feature: MA Experiment 20000180 PARAMETER Experiment Name: At_Germinating_Seeds_P Parameter: Age (hr) Value: 24 vs. 0
  misc_feature: MA Experiment 20000180 PARAMETER Experiment Name: At_Germinating_Seeds_P Parameter: Tissue Value: Germinating Seeds
  misc_feature: MA Experiment ID: 20000182 Result: Up-regulated in Transcription
  misc_feature: MA Experiment 20000182 PARAMETER Experiment Name: At_2mM_SA_P Parameter: Age (day) Value: 14
  misc_feature: MA Experiment 20000182 PARAMETER Experiment Name: At_2mM_SA_P Parameter: Organism Value: A. thaliana
  misc_feature: MA Experiment 20000182 PARAMETER Experiment Name: At_2mM_SA_P Parameter: Plant Line Value: WS
  misc_feature: MA Experiment 20000182 PARAMETER Experiment Name: At_2mM_SA_P Parameter: Timepoint (hr) Value: 6
  misc_feature: MA Experiment 20000182 PARAMETER Experiment Name: At_2mM_SA_P Parameter: Tissue Value: Aerial
  misc_feature: MA Experiment 20000182 PARAMETER Experiment Name: At_2mM_SA_P Parameter: Treatment Value: 2mM SA vs. No Treatment
  misc_feature: MA Experiment ID: 20000184 Result: Down-regulated in Transcription
  misc_feature: MA Experiment 20000184 PARAMETER Experiment Name: At_Shoots__P Parameter: Age (day) Value: 7
  misc_feature: MA Experiment 20000184 PARAMETER Experiment Name: At_Shoots__P Parameter: Tissue Value: Shoots vs. Whole Plant
  misc_feature: MA Experiment ID: 20000185 Result: Down-regulated in Transcription
  misc_feature: MA Experiment 20000185 PARAMETER Experiment Name: At_Roots__P Parameter: Age (day) Value: 7 vs. 21
  misc_feature: MA Experiment 20000185 PARAMETER Experiment Name: At_Roots__P Parameter: Organism Value: A. thaliana
  misc_feature: MA Experiment 20000185 PARAMETER Experiment Name: At_Roots__P Parameter: Tissue Value: Roots vs. Whole Plant
  misc_feature: MA Experiment ID: 20000214 Result: Down-regulated in Transcription
  misc_feature: MA Experiment 20000214 PARAMETER Experiment Name: At_4deg_Cold_P Parameter: Timepoint (hr) Value: 6
  misc_feature: MA Experiment ID: 20000234 Result: Down-regulated in Transcription
  misc_feature: MA Experiment 20000234 PARAMETER Experiment Name: At_Siliques_P Parameter: Age (day) Value: 21
  misc_feature: MA Experiment 20000234 PARAMETER Experiment Name: At_Siliques_P Parameter: Organism Value: A. thaliana
  misc_feature: MA Experiment 20000234 PARAMETER Experiment Name: At_Siliques_P Parameter: Plant Line Value: WS
  misc_feature: MA Experiment 20000234 PARAMETER Experiment Name: At_Siliques_P Parameter: Tissue Value: Less Than 5mm Siliques vs. Whole Plant
  misc_feature: MA Experiment ID: 20000235 Result: Down-regulated in Transcription
  misc_feature: MA Experiment 20000235 PARAMETER Experiment Name: At_Siliques_P Parameter: Age (day) Value: 21
  misc_feature: MA Experiment 20000235 PARAMETER Experiment Name: At_Siliques_P Parameter: Organism Value: A. thaliana
  misc_feature: MA Experiment 20000235 PARAMETER Experiment Name: At_Siliques_P Parameter: Plant Line Value: WS
  misc_feature: MA Experiment 20000235 PARAMETER Experiment Name: At_Siliques_P Parameter: Tissue Value: 5-10mm Siliques vs. Whole Plant
  misc_feature: MA Experiment ID: 20001248 Result: Up-regulated in Transcription
  misc_feature: MA Experiment 20001248 PARAMETER Experiment Name: At_Far-red-induction_P Parameter: Age (day) Value: 7
  misc_feature: MA Experiment 20001248 PARAMETER Experiment Name: At_Far-red-induction_P Parameter: Light Value: Far-red vs. White
  misc_feature: MA Experiment 20001248 PARAMETER Experiment Name: At_Far-red-induction_P Parameter: Organism Value: A. thaliana
  misc_feature: MA Experiment 20001248 PARAMETER Experiment Name: At_Far-red-induction_P Parameter: Plant Line Value: Columbia
  misc_feature: MA Experiment 20001248 PARAMETER Experiment Name: At_Far-red-induction_P Parameter: Timepoint (hr) Value: 4
  misc_feature: MA Experiment 20001248 PARAMETER Experiment Name: At_Far-red-induction_P Parameter: Tissue Value: Whole Plant
  misc_feature: MA Experiment ID: 20001450 Result: Up-regulated in Transcription
  misc_feature: MA Experiment 20001450 PARAMETER Experiment Name: At_Far-red-induction_P Parameter: Age (day) Value: 7
  misc_feature: MA Experiment 20001450 PARAMETER Experiment Name: At_Far-red-induction_P Parameter: Light Value: Far-red vs. White
  misc_feature: MA Experiment 20001450 PARAMETER Experiment Name: At_Far-red-induction_P Parameter: Organism Value: A. thaliana
  misc_feature: MA Experiment 20001450 PARAMETER Experiment Name: At_Far-red-induction_P Parameter: Plant Line Value: Columbia
  misc_feature: MA Experiment 20001450 PARAMETER Experiment Name: At_Far-red-induction_P Parameter: Timepoint (hr) Value: 8
  misc_feature: MA Experiment 20001450 PARAMETER Experiment Name: At_Far-red-induction_P Parameter: Tissue Value: Whole Plant
  misc_feature: MA Experiment ID: 20001451 Result: Up-regulated in Transcription
  misc_feature: MA Experiment 20001451 PARAMETER Experiment Name: At_Far-red-induction_P Parameter: Age (day) Value: 7
  misc_feature: MA Experiment 20001451 PARAMETER Experiment Name: At_Far-red-induction_P Parameter: Light Value: Far-red vs. White
  misc_feature: MA Experiment 20001451 PARAMETER Experiment Name: At_Far-red-induction_P Parameter: Organism Value: A. thaliana
  misc_feature: MA Experiment 20001451 PARAMETER Experiment Name: At_Far-red-induction_P Parameter: Plant Line Value: Columbia
  misc_feature: MA Experiment 20001451 PARAMETER Experiment Name: At_Far-red-induction_P Parameter: Timepoint (hr) Value: 24
  misc_feature: MA Experiment 20001451 PARAMETER Experiment Name: At_Far-red-induction_P Parameter: Tissue Value: Whole Plant
  misc_feature: MA Experiment ID: 20001555 Result: Down-regulated in Transcription
  misc_feature: MA Experiment 20001555 PARAMETER Experiment Name: At_Drought_Soil_Dry_P Parameter: Age (day) Value: 24
  misc_feature: MA Experiment 20001555 PARAMETER Experiment Name: At_Drought_Soil_Dry_P Parameter: Organism Value: A. thaliana
  misc_feature: MA Experiment 20001555 PARAMETER Experiment Name: At_Drought_Soil_Dry_P Parameter: Plant Line Value: WS
  misc_feature: MA Experiment 20001555 PARAMETER Experiment Name: At_Drought_Soil_Dry_P Parameter: Post Timepoint (hr) Value: None
  misc_feature: MA Experiment 20001555 PARAMETER Experiment Name: At_Drought_Soil_Dry_P Parameter: Post-Treatment Value: None
  misc_feature: MA Experiment 20001555 PARAMETER Experiment Name: At_Drought_Soil_Dry_P Parameter: Timepoint (day) Value: 10
  misc_feature: MA Experiment 20001555 PARAMETER Experiment Name: At_Drought_Soil_Dry_P Parameter: Treatment Value: Drought vs. No Drought
  misc_feature: MA Experiment ID: 20001556 Result: Down-regulated in Transcription
  misc_feature: MA Experiment 20001556 PARAMETER Experiment Name: At_Drought_Soil_Dry_P Parameter: Age (day) Value: 26
  misc_feature: MA Experiment 20001556 PARAMETER Experiment Name: At_Drought_Soil_Dry_P Parameter: Organism Value: A. thaliana
  misc_feature: MA Experiment 20001556 PARAMETER Experiment Name: At_Drought_Soil_Dry_P Parameter: Plant Line Value: WS
  misc_feature: MA Experiment 20001556 PARAMETER Experiment Name: At_Drought_Soil_Dry_P Parameter: Post Timepoint (hr) Value: None
  misc_feature: MA Experiment 20001556 PARAMETER Experiment Name: At_Drought_Soil_Dry_P Parameter: Post-Treatment Value: None
  misc_feature: MA Experiment 20001556 PARAMETER Experiment Name: At_Drought_Soil_Dry_P Parameter: Timepoint (day) Value: 12
  misc_feature: MA Experiment 20001556 PARAMETER Experiment Name: At_Drought_Soil_Dry_P Parameter: Treatment Value: Drought vs. No Drought
  misc_feature: MA Experiment ID: 20001557 Result: Down-regulated in Transcription
  misc_feature: MA Experiment 20001557 PARAMETER Experiment Name: At_Drought_Soil_Dry_P Parameter: Age (day) Value: 27
  misc_feature: MA Experiment 20001557 PARAMETER Experiment Name: At_Drought_Soil_Dry_P Parameter: Organism Value: A. thaliana
  misc_feature: MA Experiment 20001557 PARAMETER Experiment Name: At_Drought_Soil_Dry_P Parameter: Plant Line Value: WS
  misc_feature: MA Experiment 20001557 PARAMETER Experiment Name: At_Drought_Soil_Dry_P Parameter: Post Timepoint (hr) Value: 3
  misc_feature: MA Experiment 20001557 PARAMETER Experiment Name: At_Drought_Soil_Dry_P Parameter: Post-Treatment Value: Re-Water vs. No Drought
  misc_feature: MA Experiment 20001557 PARAMETER Experiment Name: At_Drought_Soil_Dry_P Parameter: Timepoint (day) Value: 13
  misc_feature: MA Experiment 20001557 PARAMETER Experiment Name: At_Drought_Soil_Dry_P Parameter: Treatment Value: Drought vs. No Drought
  misc_feature: MA Experiment ID: 20001558 Result: Down-regulated in Transcription
  misc_feature: MA Experiment 20001558 PARAMETER Experiment Name: At_Drought_Soil_Dry_P Parameter: Age (day) Value: 27
  misc_feature: MA Experiment 20001558 PARAMETER Experiment Name: At_Drought_Soil_Dry_P Parameter: Organism Value: A. thaliana
  misc_feature: MA Experiment 20001558 PARAMETER Experiment Name: At_Drought_Soil_Dry_P Parameter: Plant Line Value: WS
  misc_feature: MA Experiment 20001558 PARAMETER Experiment Name: At_Drought_Soil_Dry_P Parameter: Post Timepoint (hr) Value: 6
  misc_feature: MA Experiment 20001558 PARAMETER Experiment Name: At_Drought_Soil_Dry_P Parameter: Post-Treatment Value: Re-Water vs. No Drought
  misc_feature: MA Experiment 20001558 PARAMETER Experiment Name: At_Drought_Soil_Dry_P Parameter: Timepoint (day) Value: 13
  misc_feature: MA Experiment 20001558 PARAMETER Experiment Name: At_Drought_Soil_Dry_P Parameter: Treatment Value: Drought vs. No Drought
  misc_feature: MA Experiment ID: 20001559 Result: Down-regulated in Transcription
  misc_feature: MA Experiment 20001559 PARAMETER Experiment Name: At_Drought_Soil_Dry_P Parameter: Age (day) Value: 28
  misc_feature: MA Experiment 20001559 PARAMETER Experiment Name: At_Drought_Soil_Dry_P Parameter: Organism Value: A. thaliana
  misc_feature: MA Experiment 20001559 PARAMETER Experiment Name: At_Drought_Soil_Dry_P Parameter: Plant Line Value: WS
  misc_feature: MA Experiment 20001559 PARAMETER Experiment Name: At_Drought_Soil_Dry_P Parameter: Post Timepoint (hr) Value: 29
  misc_feature: MA Experiment 20001559 PARAMETER Experiment Name: At_Drought_Soil_Dry_P Parameter: Post-Treatment Value: Re-Water vs. No Drought
  misc_feature: MA Experiment 20001559 PARAMETER Experiment Name: At_Drought_Soil_Dry_P Parameter: Timepoint (day) Value: 14
  misc_feature: MA Experiment 20001559 PARAMETER Experiment Name: At_Drought_Soil_Dry_P Parameter: Treatment Value: Drought vs. No Drought
  misc_feature: MA Experiment ID: 20001560 Result: Down-regulated in Transcription
  misc_feature: MA Experiment 20001560 PARAMETER Experiment Name: At_Drought_Soil_Dry_P Parameter: Age (day) Value: 28
  misc_feature: MA Experiment 20001560 PARAMETER Experiment Name: At_Drought_Soil_Dry_P Parameter: Organism Value: A. thaliana
  misc_feature: MA Experiment 20001560 PARAMETER Experiment Name: At_Drought_Soil_Dry_P Parameter: Plant Line Value: WS
  misc_feature: MA Experiment 20001560 PARAMETER Experiment Name: At_Drought_Soil_Dry_P Parameter: Post Timepoint (hr) Value: None
  misc_feature: MA Experiment 20001560 PARAMETER Experiment Name: At_Drought_Soil_Dry_P Parameter: Post-Treatment Value: None
  misc_feature: MA Experiment 20001560 PARAMETER Experiment Name: At_Drought_Soil_Dry_P Parameter: Timepoint (day) Value: 14
  misc_feature: MA Experiment 20001560 PARAMETER Experiment Name: At_Drought_Soil_Dry_P Parameter: Treatment Value: Drought vs. No Drought
  misc_feature: MA Experiment ID: 20001904 Result: Down-regulated in Transcription
  misc_feature: MA Experiment 20001904 PARAMETER Experiment Name: At_Drought_Reproduction_P Parameter: Age (day) Value: 37
  misc_feature: MA Experiment 20001904 PARAMETER Experiment Name: At_Drought_Reproduction_P Parameter: Organism Value: A. thaliana
  misc_feature: MA Experiment 20001904 PARAMETER Experiment Name: At_Drought_Reproduction_P Parameter: Plant Line Value: WS
  misc_feature: MA Experiment 20001904 PARAMETER Experiment Name: At_Drought_Reproduction_P Parameter: Timepoint (day) Value: 7
  misc_feature: MA Experiment 20001904 PARAMETER Experiment Name: At_Drought_Reproduction_P Parameter: Tissue Value: Rosettes
  misc_feature: MA Experiment 20001904 PARAMETER Experiment Name: At_Drought_Reproduction_P Parameter: Treatment Value: Drought vs. No Drought
  misc_feature: MA Experiment ID: 20001905 Result: Down-regulated in Transcription
  misc_feature: MA Experiment 20001905 PARAMETER Experiment Name: At_Drought_Reproduction_P Parameter: Age (day) Value: 40
  misc_feature: MA Experiment 20001905 PARAMETER Experiment Name: At_Drought_Reproduction_P Parameter: Organism Value: A. thaliana
  misc_feature: MA Experiment 20001905 PARAMETER Experiment Name: At_Drought_Reproduction_P Parameter: Plant Line Value: WS
  misc_feature: MA Experiment 20001905 PARAMETER Experiment Name: At_Drought_Reproduction_P Parameter: Timepoint (day) Value: 10
  misc_feature: MA Experiment 20001905 PARAMETER Experiment Name: At_Drought_Reproduction_P Parameter: Tissue Value: Rosettes
  misc_feature: MA Experiment 20001905 PARAMETER Experiment Name: At_Drought_Reproduction_P Parameter: Treatment Value: Drought vs. No Drought
  misc_feature: MA Experiment ID: 20001910 Result: Up-regulated in Transcription
  misc_feature: MA Experiment 20001910 PARAMETER Experiment Name: At_Drought_Reproduction_P Parameter: Age (day) Value: 37
  misc_feature: MA Experiment 20001910 PARAMETER Experiment Name: At_Drought_Reproduction_P Parameter: Organism Value: A. thaliana
  misc_feature: MA Experiment 20001910 PARAMETER Experiment Name: At_Drought_Reproduction_P Parameter: Plant Line Value: WS
  misc_feature: MA Experiment 20001910 PARAMETER Experiment Name: At_Drought_Reproduction_P Parameter: Timepoint (day) Value: 7
  misc_feature: MA Experiment 20001910 PARAMETER Experiment Name: At_Drought_Reproduction_P Parameter: Tissue Value: Flowers
  misc_feature: MA Experiment 20001910 PARAMETER Experiment Name: At_Drought_Reproduction_P Parameter: Treatment Value: Drought vs. No Drought
ctctttctccgacctcctccgagaaacccatctctcctcctccatttttgcccttggagtttcatcagcaagtttctcggagtctcgtcggagagatcggagttttttttttttttttttcctggatctgtcgactatgtgatgggaatccaataacagagaacgcagagagagtgttttcggatggggatttgctttagcgctgaagatcagcactaccaattttctcaacaacaaaactatcctaagaaaacaactccagggaaaaaagcagcagtgtatctaatgaagtcagattgtgaagatgtagttggtaaagtgagtggaagtggaagtggtggtggtggtttgccattggctccaaaaaacattaaagatcttcaatcaaatccaggatatgaaaatgttgatattttcacttacgaagagatgaagattgctactaagcagttcaggccggattatattctcggtgagggaggtttcggagtggtgtataaaggagttatagatgagtctgtgagggttggtttcaagtctacaaaagttgctatcaaagaacttaatcctgagggtttccaaggagatagagagtggctggctgaagtcaactatttaggacagctgagtcacccgaatttggtgaaacttattggctactgctgtgaagatgatcatagattgttagtctatgaatacatggcaatggggagccttgagaaacatcttttccgaagagttggatgcactttgacatggacaaaaagaatgaagattgcgctagacgcagccaagggtcttgcatttcttcatggtgctgaacgctccatcatataccgggatctgaagacagcaaatatattgcttgatgagggttacaatgctaaactctctgactttggactggcaaaggatggtccaagaggagaccaaacacatgtgtctacacgtgttatggggacttacggatacgctgctccagagtatgtcatgacagggcatttgacatccagaagtgatgtgtatggattcggtgtacttctccttgagatgctccttgggaagagggcaatggacaaaagcagagcttgcagggagcataacttggtagagtgggcacgacctcttttgaatcacaacaaaaagcttttgaggatcatagaccctcgaatggatggacagtacggcactaaggcgttgatgaaagtagctggtttggcataccaatgcctaagccaaaacccgaaaggaaggcctctcatgaatcatgttgtagaagttcttgagactctcaaggacgacggagatgctcaggaggaagtcatgactaatcttcatagtaggggaaagtctgtaaccttatatgaagcttctagcgattctcaaggcacaagagatgggaatggacagaggaggagaagaccggaaagtggtagaagcaagagcgaagccgcggtcgacactgaaaaatatgtttctactctttcggaaccggatactaccaaaatttaagactcaagacagaatgattcaccagtgatttgagactgtaagataagaaagtagcagagttggcttaaaatgtataaataagttgagtcttcgtttcgggttcttcttctttttgaattacaaatattagtgcaatatgcaatttgatgtttctttg

SEQ ID NO: 95870 - protein, 442 aa, Arabidopsis thaliana
  peptide (1)..(442): Ceres Seq. ID no. 12730880
  misc_feature (1)..(442): Homolog of NCBI NO: 22325532 NR Description: putative protein kinase; protein id: At2g07180.1, by cDNA: gi_19423981 [Arabidopsis thaliana]
  misc_feature (1)..(442): Homolog of NCBI NO: 19423982 NR Description: putative protein kinase [Arabidopsis thaliana]
  misc_feature (27)..(442): Homolog of NCBI NO: 25287636 NR Description: probable protein kinase [imported] - Arabidopsis >gi|3805765|gb|AAC69121.1| putative protein kinase [Arabidopsis
  misc_feature (29)..(376): Homolog of NCBI NO: 30679085 NR Description: protein kinase family [Arabidopsis thaliana]
  misc_feature (29)..(376): Homolog of NCBI NO: 9542860 NR Description: protein kinase-like protein [Arabidopsis thaliana]
  misc_feature (39)..(413): Homolog of NCBI NO: 34912198 NR Description: putative protein kinase [Oryza sativa (japonica group)] >gi|20160990|dbj|BAB89924.1| putative protein kinase
  misc_feature (22)..(393): Homolog of NCBI NO: 15227001 NR Description: putative protein kinase; protein id: At2g28930.1
  misc_feature (64)..(375): Homolog of NCBI NO: 15225019 NR Description: putative protein kinase; protein id: At2g05940.1, by cDNA: gi_15810412, supported by cDNA: gi_21280976 [Arabidopsis >gi|25287639|pir||C84473 probable protein kinase putative protein
  misc_feature (56)..(371): Homolog of NCBI NO: 15241220 NR Description: protein kinase-like protein; protein id:
  misc_feature (56)..(371): Homolog of NCBI NO: 22773239 NR Description: Putative protein kinase [Oryza sativa (japonica
MGICFSAEDQHYQFSQQQNYPKKTTPGKKAAVYLMKSDCEDVVGKVSGSGSGGGGLPLAPKNIKDLQSNPGYENVDIFTYEEMKIATKQFRPDYILGEGGFGVVYKGVIDESVRVGFKSTKVAIKELNPEGFQGDREWLAEVNYLGQLSHPNLVKLIGYCCEDDHRLLVYEYMAMGSLEKHLFRRVGCTLTWTKRMKIALDAAKGLAFLHGAERSIIYRDLKTANILLDEGYNAKLSDFGLAKDGPRGDQTHVSTRVMGTYGYAAPEYVMTGHLTSRSDVYGFGVLLLEMLLGKRAMDKSRACREHNLVEWARPLLNHNKKLLRIIDPRMDGQYGTKALMKVAGLAYQCLSQNPKGRPLMNHVVEVLETLKDDGDAQEEVMTNLHSRGKSVTLYEASSDSQGTRDGNGQRRRRPESGRSKSEAAVDTEKYVSTLSEPDTTKI

SEQ ID NO: 95871 - protein, 408 aa, Arabidopsis thaliana
  peptide (1)..(408): Ceres Seq. ID no. 12730881
  misc_feature (1)..(408): Homolog of NCBI NO: 22325532 NR Description: putative protein kinase; protein id: At2g07180.1, by cDNA: gi_19423981 [Arabidopsis thaliana]
  misc_feature (1)..(408): Homolog of NCBI NO: 19423982 NR Description: putative protein kinase [Arabidopsis thaliana]
  misc_feature (1)..(408): Homolog of NCBI NO: 25287636 NR Description: probable protein kinase [imported] - Arabidopsis >gi|3805765|gb|AAC69121.1| putative protein kinase [Arabidopsis
  misc_feature (1)..(342): Homolog of NCBI NO: 30679085 NR Description: protein kinase family [Arabidopsis thaliana]
  misc_feature (1)..(342): Homolog of NCBI NO: 9542860 NR Description: protein kinase-like protein [Arabidopsis thaliana]
  misc_feature (5)..(379): Homolog of NCBI NO: 34912198 NR Description: putative protein kinase [Oryza sativa (japonica group)] >gi|20160990|dbj|BAB89924.1| putative protein kinase
  misc_feature (1)..(359): Homolog of NCBI NO: 15227001 NR Description: putative protein kinase; protein id: At2g28930.1
  misc_feature (30)..(341): Homolog of NCBI NO: 15225019 NR Description: putative protein kinase; protein id: At2g05940.1, by cDNA: gi_15810412, supported by cDNA: gi_21280976 [Arabidopsis >gi|25287639|pir||C84473 probable protein kinase putative protein
  misc_feature (22)..(337): Homolog of NCBI NO: 15241220 NR Description: protein kinase-like protein; protein id:
  misc_feature (22)..(337): Homolog of NCBI NO: 22773239 NR Description: Putative protein kinase [Oryza sativa (japonica
MKSDCEDVVGKVSGSGSGGGGLPLAPKNIKDLQSNPGYENVDIFTYEEMKIATKQFRPDYILGEGGFGVVYKGVIDESVRVGFKSTKVAIKELNPEGFQGDREWLAEVNYLGQLSHPNLVKLIGYCCEDDHRLLVYEYMAMGSLEKHLFRRVGCTLTWTKRMKIALDAAKGLAFLHGAERSIIYRDLKTANILLDEGYNAKLSDFGLAKDGPRGDQTHVSTRVMGTYGYAAPEYVMTGHLTSRSDVYGFGVLLLEMLLGKRAMDKSRACREHNLVEWARPLLNHNKKLLRIIDPRMDGQYGTKALMKVAGLAYQCLSQNPKGRPLMNHVVEVLETLKDDGDAQEEVMTNLHSRGKSVTLYEASSDSQGTRDGNGQRRRRPESGRSKSEAAVDTEKYVSTLSEPDTTKI

SEQ ID NO: 95872 - protein, 360 aa, Arabidopsis thaliana
  peptide (1)..(360): Ceres Seq. ID no. 12730882
  misc_feature (1)..(360): Homolog of NCBI NO: 22325532 NR Description: putative protein kinase; protein id: At2g07180.1, by cDNA: gi_19423981 [Arabidopsis thaliana]
  misc_feature (1)..(360): Homolog of NCBI NO: 19423982 NR Description: putative protein kinase [Arabidopsis thaliana]
  misc_feature (1)..(360): Homolog of NCBI NO: 25287636 NR Description: probable protein kinase [imported] - Arabidopsis >gi|3805765|gb|AAC69121.1| putative protein kinase [Arabidopsis
  misc_feature (1)..(294): Homolog of NCBI NO: 30679085 NR Description: protein kinase family [Arabidopsis thaliana]
  misc_feature (1)..(294): Homolog of NCBI NO: 9542860 NR Description: protein kinase-like protein [Arabidopsis thaliana]
  misc_feature (1)..(331): Homolog of NCBI NO: 34912198 NR Description: putative protein kinase [Oryza sativa (japonica group)] >gi|20160990|dbj|BAB89924.1| putative protein kinase
  misc_feature (1)..(311): Homolog of NCBI NO: 15227001 NR Description: putative protein kinase; protein id: At2g28930.1
  misc_feature (1)..(293): Homolog of NCBI NO: 15225019 NR Description: putative protein kinase; protein id: At2g05940.1, by cDNA: gi_15810412, supported by cDNA: gi_21280976 [Arabidopsis >gi|25287639|pir||C84473 probable protein kinase putative protein
  misc_feature (1)..(289): Homolog of NCBI NO: 15241220 NR Description: protein kinase-like protein; protein id:
  misc_feature (1)..(289): Homolog of NCBI NO: 22773239 NR Description: Putative protein kinase [Oryza sativa (japonica
MKIATKQFRPDYILGEGGFGVVYKGVIDESVRVGFKSTKVAIKELNPEGFQGDREWLAEVNYLGQLSHPNLVKLIGYCCEDDHRLLVYEYMAMGSLEKHLFRRVGCTLTWTKRMKIALDAAKGLAFLHGAERSIIYRDLKTANILLDEGYNAKLSDFGLAKDGPRGDQTHVSTRVMGTYGYAAPEYVMTGHLTSRSDVYGFGVLLLEMLLGKRAMDKSRACREHNLVEWARPLLNHNKKLLRIIDPRMDGQYGTKALMKVAGLAYQCLSQNPKGRPLMNHVVEVLETLKDDGDAQEEVMTNLHSRGKSVTLYEASSDSQGTRDGNGQRRRRPESGRSKSEAAVDTEKYVSTLSEPDTTKI

SEQ ID NO: 95873 - DNA, 1778 bp, Arabidopsis thaliana
  misc_feature (1)..(1778): Ceres Seq. ID no. 12730893
  misc_feature: MA Experiment ID: 20000182 Result: Up-regulated in Transcription
  misc_feature: MA Experiment 20000182 PARAMETER Experiment Name: At_2mM_SA_P Parameter: Age (day) Value: 14
  misc_feature: MA Experiment 20000182 PARAMETER Experiment Name: At_2mM_SA_P Parameter: Organism Value: A. thaliana
  misc_feature: MA Experiment 20000182 PARAMETER Experiment Name: At_2mM_SA_P Parameter: Plant Line Value: WS
  misc_feature: MA Experiment 20000182 PARAMETER Experiment Name: At_2mM_SA_P Parameter: Timepoint (hr) Value: 6
  misc_feature: MA Experiment 20000182 PARAMETER Experiment Name: At_2mM_SA_P Parameter: Tissue Value: Aerial
  misc_feature: MA Experiment 20000182 PARAMETER Experiment Name: At_2mM_SA_P Parameter: Treatment Value: 2mM SA vs. No Treatment
  misc_feature: MA Experiment ID: 20000184 Result: Down-regulated in Transcription
  misc_feature: MA Experiment 20000184 PARAMETER Experiment Name: At_Shoots__P Parameter: Age (day) Value: 7
  misc_feature: MA Experiment 20000184 PARAMETER Experiment Name: At_Shoots__P Parameter: Tissue Value: Shoots vs. Whole Plant
  misc_feature: MA Experiment ID: 20000495 Result: Down-regulated in Transcription
  misc_feature: MA Experiment 20000495 PARAMETER Experiment Name: At_Guard_Cells_P Parameter: Harvest Date Value: 8/2/2002
  misc_feature: MA Experiment 20000495 PARAMETER Experiment Name: At_Guard_Cells_P Parameter: Organism Value: A. thaliana
  misc_feature: MA Experiment 20000495 PARAMETER Experiment Name: At_Guard_Cells_P Parameter: Tissue Value: Guard Cells vs. Leaves
  misc_feature: MA Experiment ID: 20001451 Result: Down-regulated in Transcription
  misc_feature: MA Experiment 20001451 PARAMETER Experiment Name: At_Far-red-induction_P Parameter: Age (day) Value: 7
  misc_feature: MA Experiment 20001451 PARAMETER Experiment Name: At_Far-red-induction_P Parameter: Light Value: Far-red vs. White
  misc_feature: MA Experiment 20001451 PARAMETER Experiment Name: At_Far-red-induction_P Parameter: Organism Value: A. thaliana
  misc_feature: MA Experiment 20001451 PARAMETER Experiment Name: At_Far-red-induction_P Parameter: Plant Line Value: Columbia
  misc_feature: MA Experiment 20001451 PARAMETER Experiment Name: At_Far-red-induction_P Parameter: Timepoint (hr) Value: 24
  misc_feature: MA Experiment 20001451 PARAMETER Experiment Name: At_Far-red-induction_P Parameter: Tissue Value: Whole Plant
aagttaacggcgattatcttcgttcacacaagcaacacaaaagagaaaacatgaatcatctctctctccctctctccggttccacagtaaagaattgattcctcaatctcacgcggaagcaaaatccaaattctaaaattctaagaaaccactctaatcacatcgctctatcgatcaaaatcgaaacccttattcaaaaatctcttattttttccatttttctctcaatcatctgaatcggttttgagatgagctccgattcaccggcggctggagacggtggcgaacaagccgctgcgggaacaagcgtgccttcaccttcatacgacaaacaaaaggagaaggcacgtgtgagtagaacatctctgatactatggcacgcgcaccaaaacgacgcagctgcagttcggaaactcttggaggaagatccgactttggttcacgctagagactatgacaaacgaacgcctctccacgtggcgtcgcttcatggatggatcgatgttgttaaatgtctgcttgagtttggtgctgatgtcaatgctcaggataggtggaagaacacgccactggctgatgcagaaggagctaggaagcagaaaatgattgaactgctgaaatctcatggtggtttgtcttatggtcaaaacggaagtcactttgaaccaaagcctgtgccaccaccaattccaaagaaatgtgactgggaaattgaacctgctgagctggatttttcaaatgctgcaatgattggaaagggttcatttggtgagattgtgaaagcctattggagaggaacaccggtagctgtgaaacgtattcttccttctctttcagatgatagactggttattcaggacttcaggcatgaggttgatttgctagttaagcttcgccatccaaatatagtccaattcttaggagcggtaaccgaaagaaagccccttatgttaatcactgagtacttacgcgggggagatcttcatcaatacctcaaggagaagggcggtcttactccaacaactgctgtcaactttgctttggatatcgcgagaggaatgacatatcttcacaatgaacctaatgttatcattcaccgagatcttaaaccaaggaacgttcttctggttaattctagtgcagaccacttgaaagttggagactttggacttagtaagctcataaaagttcaaaactctcatgatgtctacaaaatgactggagaaacaggaagctatcgttatatggctcctgaagtattcaagcatagaagatatgacaagaaagtcgatgtcttctcctttgcaatgatactttacgagatgcttgaaggagagccaccatttgcgaaccatgagccatatgaagcagccaaacatgtatctgatggacatagacctacattccgttccaaaggatgcacaccagatctaagagagttaattgtgaaatgctgggacgcagacatgaaccagagaccgtcgtttctggacattctcaagagacttgaaaagatcaaggaaactctaccatcagatcaccattggggcttattcacttcataatacacaaaatccattatttaagcacaaaaacaaccagaaacaagaaagtatcattctctgtttgccttattaatctctgtttcatttcttttgtaaagattgtttctttttcatcttttcatttgctttaaaagagtgtgagatagaaagcttttattgttgttacatggattggattgagtttgcaggttaatgagaagttcatatcatatc

SEQ ID NO: 95874 - protein, 438 aa, Arabidopsis thaliana
  peptide (1)..(438): Ceres Seq. ID no. 12730894
  misc_feature (162)..(420): Pfam Name: Protein kinase domain Pfam Description: Protein kinase domain
  misc_feature (1)..(438): Homolog of NCBI NO: 15223025 NR Description: putative protein kinase; protein id: At1g14000.1, by cDNA: gi_18700096 [Arabidopsis thaliana]
  misc_feature (1)..(438): Homolog of NCBI NO: 18700097 NR Description: At1g14000/F7A19_9 [Arabidopsis thaliana]
  misc_feature (1)..(438): Homolog of NCBI NO: 8778397 NR Description: F16A14.22 [Arabidopsis thaliana]
  misc_feature (2)..(437): Homolog of NCBI NO: 34913284 NR Description: putative protein kinase [Oryza sativa (japonica
  misc_feature (2)..(437): Homolog of NCBI NO: 33146898 NR Description: putative ankyrin-kinase [Oryza sativa (japonica
  misc_feature (38)..(433): Homolog of NCBI NO: 18411024 NR Description: putative protein; protein id: At3g58760.1
  misc_feature (11)..(433): Homolog of NCBI NO: 18415205 NR Description: protein kinase - like protein; protein id: supported by cDNA: 38712., supported by cDNA: gi_16648823 thaliana] >gi|16648824|gb|AAL25602.1| AT4g18950/F13C5_120
  misc_feature (38)..(433): Homolog of NCBI NO: 11358145 NR Description: hypothetical protein T20N10.110 - Arabidopsis >gi|7630071|emb|CAB88293.1| putative protein [Arabidopsis
  misc_feature (17)..(271): Homolog of NCBI NO: 7488240 NR Description: protein kinase homolog F13C5.120 - Arabidopsis
  misc_feature (289)..(433): Homolog of NCBI NO: 7488240 NR Description: protein kinase homolog F13C5.120 - Arabidopsis
MSSDSPAAGDGGEQAAAGTSVPSPSYDKQKEKARVSRTSLILWHAHQNDAAAVRKLLEEDPTLVHARDYDKRTPLHVASLHGWIDVVKCLLEFGADVNAQDRWKNTPLADAEGARKQKMIELLKSHGGLSYGQNGSHFEPKPVPPPIPKKCDWEIEPAELDFSNAAMIGKGSFGEIVKAYWRGTPVAVKRILPSLSDDRLVIQDFRHEVDLLVKLRHPNIVQFLGAVTERKPLMLITEYLRGGDLHQYLKEKGGLTPTTAVNFALDIARGMTYLHNEPNVIIHRDLKPRNVLLVNSSADHLKVGDFGLSKLIKVQNSHDVYKMTGETGSYRYMAPEVFKHRRYDKKVDVFSFAMILYEMLEGEPPFANHEPYEAAKHVSDGHRPTFRSKGCTPDLRELIVKCWDADMNQRPSFLDILKRLEKIKETLPSDHHWGLFTS

SEQ ID NO: 95875 - protein, 320 aa, Arabidopsis thaliana
  peptide (1)..(320): Ceres Seq. ID no. 12730895
  misc_feature (44)..(302): Pfam Name: Protein kinase domain Pfam Description: Protein kinase domain
  misc_feature (1)..(320): Homolog of NCBI NO: 15223025 NR Description: putative protein kinase; protein id: At1g14000.1, by cDNA: gi_18700096 [Arabidopsis thaliana]
  misc_feature (1)..(320): Homolog of NCBI NO: 18700097 NR Description: At1g14000/F7A19_9 [Arabidopsis thaliana]
  misc_feature (1)..(320): Homolog of NCBI NO: 8778397 NR Description: F16A14.22 [Arabidopsis thaliana]
  misc_feature (1)..(319): Homolog of NCBI NO: 34913284 NR Description: putative protein kinase [Oryza sativa (japonica
  misc_feature (1)..(319): Homolog of NCBI NO: 33146898 NR Description: putative ankyrin-kinase [Oryza sativa (japonica
  misc_feature (1)..(315): Homolog of NCBI NO: 18411024 NR Description: putative protein; protein id: At3g58760.1
  misc_feature (1)..(315): Homolog of NCBI NO: 18415205 NR Description: protein kinase - like protein; protein id: supported by cDNA: 38712., supported by cDNA: gi_16648823 thaliana] >gi|16648824|gb|AAL25602.1| AT4g18950/F13C5_120
  misc_feature (1)..(315): Homolog of NCBI NO: 11358145 NR Description: hypothetical protein T20N10.110 - Arabidopsis >gi|7630071|emb|CAB88293.1| putative protein [Arabidopsis
  misc_feature (1)..(153): Homolog of NCBI NO: 7488240 NR Description: protein kinase homolog F13C5.120 - Arabidopsis
  misc_feature (171)..(315): Homolog of NCBI NO: 7488240 NR Description: protein kinase homolog F13C5.120 - Arabidopsis
MIELLKSHGGLSYGQNGSHFEPKPVPPPIPKKCDWEIEPAELDFSNAAMIGKGSFGEIVKAYWRGTPVAVKRILPSLSDDRLVIQDFRHEVDLLVKLRHPNIVQFLGAVTERKPLMLITEYLRGGDLHQYLKEKGGLTPTTAVNFALDIARGMTYLHNEPNVIIHRDLKPRNVLLVNSSADHLKVGDFGLSKLIKVQNSHDVYKMTGETGSYRYMAPEVFKHRRYDKKVDVFSFAMILYEMLEGEPPFANHEPYEAAKHVSDGHRPTFRSKGCTPDLRELIVKCWDADMNQRPSFLDILKRLEKIKETLPSDHHWGLFTS

SEQ ID NO: 95876 - protein, 272 aa, Arabidopsis thaliana
  peptide (1)..(272): Ceres Seq. ID no. 12730896
  misc_feature (1)..(254): Pfam Name: Protein kinase domain Pfam Description: Protein kinase domain
  misc_feature (1)..(272): Homolog of NCBI NO: 15223025 NR Description: putative protein kinase; protein id: At1g14000.1, by cDNA: gi_18700096 [Arabidopsis thaliana]
  misc_feature (1)..(272): Homolog of NCBI NO: 18700097 NR Description: At1g14000/F7A19_9 [Arabidopsis thaliana]
  misc_feature (1)..(272): Homolog of NCBI NO: 8778397 NR Description: F16A14.22 [Arabidopsis thaliana]
  misc_feature (1)..(271): Homolog of NCBI NO: 34913284 NR Description: putative protein kinase [Oryza sativa (japonica
  misc_feature (1)..(271): Homolog of NCBI NO: 33146898 NR Description: putative ankyrin-kinase [Oryza sativa (japonica
  misc_feature (1)..(267): Homolog of NCBI NO: 18411024 NR Description: putative protein; protein id: At3g58760.1
  misc_feature (1)..(267): Homolog of NCBI NO: 18415205 NR Description: protein kinase - like protein; protein id: supported by cDNA: 38712., supported by cDNA: gi_16648823 thaliana] >gi|16648824|gb|AAL25602.1| AT4g18950/F13C5_120
  misc_feature (1)..(267): Homolog of NCBI NO: 11358145 NR Description: hypothetical protein T20N10.110 - Arabidopsis >gi|7630071|emb|CAB88293.1| putative protein [Arabidopsis
  misc_feature (1)..(105): Homolog of NCBI NO: 7488240 NR Description: protein kinase homolog F13C5.120 - Arabidopsis
  misc_feature (123)..(267): Homolog of NCBI NO: 7488240 NR Description: protein kinase homolog F13C5.120 - Arabidopsis
MIGKGSFGEIVKAYWRGTPVAVKRILPSLSDDRLVIQDFRHEVDLLVKLRHPNIVQFLGAVTERKPLMLITEYLRGGDLHQYLKEKGGLTPTTAVNFALDIARGMTYLHNEPNVIIHRDLKPRNVLLVNSSADHLKVGDFGLSKLIKVQNSHDVYKMTGETGSYRYMAPEVFKHRRYDKKVDVFSFAMILYEMLEGEPPFANHEPYEAAKHVSDGHRPTFRSKGCTPDLRELIVKCWDADMNQRPSFLDILKRLEKIKETLPSDHHWGLFTS

SEQ ID NO: 95877 - DNA, 744 bp, Arabidopsis thaliana
  misc_feature (1)..(744): Ceres Seq. ID no. 12730929
  misc_feature: MA Experiment ID: 20000179 Result: Up-regulated in Transcription
  misc_feature: MA Experiment 20000179 PARAMETER Experiment Name: At_Germinating_Seeds_P Parameter: Age (hr) Value: 6 vs. 0
  misc_feature: MA Experiment 20000179 PARAMETER Experiment Name: At_Germinating_Seeds_P Parameter: Tissue Value: Germinating Seeds
  misc_feature: MA Experiment ID: 20000180 Result: Up-regulated in Transcription
  misc_feature: MA Experiment 20000180 PARAMETER Experiment Name: At_Germinating_Seeds_P Parameter: Age (hr) Value: 24 vs. 0
  misc_feature: MA Experiment 20000180 PARAMETER Experiment Name: At_Germinating_Seeds_P Parameter: Tissue Value: Germinating Seeds
  misc_feature: MA Experiment ID: 20000185 Result: Up-regulated in Transcription
  misc_feature: MA Experiment 20000185 PARAMETER Experiment Name: At_Roots__P Parameter: Age (day) Value: 7 vs. 21
  misc_feature: MA Experiment 20000185 PARAMETER Experiment Name: At_Roots__P Parameter: Organism Value: A. thaliana
  misc_feature: MA Experiment 20000185 PARAMETER Experiment Name: At_Roots__P Parameter: Tissue Value: Roots vs. Whole Plant
  misc_feature: MA Experiment ID: 20000267 Result: Down-regulated in Transcription
  misc_feature: MA Experiment 20000267 PARAMETER Experiment Name: At_Drought_P Parameter: Age (day) Value: 7
  misc_feature: MA Experiment 20000267 PARAMETER Experiment Name: At_Drought_P Parameter: Organism Value: A. thaliana
  misc_feature: MA Experiment 20000267 PARAMETER Experiment Name: At_Drought_P Parameter: Plant Line Value: WS
  misc_feature: MA Experiment 20000267 PARAMETER Experiment Name: At_Drought_P Parameter: Timepoint (hr) Value: 6
  misc_feature: MA Experiment 20000267 PARAMETER Experiment Name: At_Drought_P Parameter: Tissue Value: Whole Plant
  misc_feature: MA Experiment 20000267 PARAMETER Experiment Name: At_Drought_P Parameter: Treatment Value: Drought vs. No Drought
  misc_feature: MA Experiment ID: 20000436 Result: Down-regulated in Transcription
  misc_feature: MA Experiment 20000436 PARAMETER Experiment Name: At_Drought_P Parameter: Age (day) Value: 7
  misc_feature: MA Experiment 20000436 PARAMETER Experiment Name: At_Drought_P Parameter: Organism Value: A. thaliana
  misc_feature: MA Experiment 20000436 PARAMETER Experiment Name: At_Drought_P Parameter: Plant Line Value: WS
  misc_feature: MA Experiment 20000436 PARAMETER Experiment Name: At_Drought_P Parameter: Timepoint (hr) Value: 12
  misc_feature: MA Experiment 20000436 PARAMETER Experiment Name: At_Drought_P Parameter: Tissue Value: Whole Plant
  misc_feature: MA Experiment 20000436 PARAMETER Experiment Name: At_Drought_P Parameter: Treatment Value: Drought vs. No Drought
  misc_feature: MA Experiment ID: 20000437 Result: Down-regulated in Transcription
  misc_feature: MA Experiment 20000437 PARAMETER Experiment Name: At_Drought_P Parameter: Age (day) Value: 8
  misc_feature: MA Experiment 20000437 PARAMETER Experiment Name: At_Drought_P Parameter: Organism Value: A. thaliana
  misc_feature: MA Experiment 20000437 PARAMETER Experiment Name: At_Drought_P Parameter: Plant Line Value: WS
  misc_feature: MA Experiment 20000437 PARAMETER Experiment Name: At_Drought_P Parameter: Timepoint (hr) Value: 24
  misc_feature: MA Experiment 20000437 PARAMETER Experiment Name: At_Drought_P Parameter: Tissue Value: Whole Plant
  misc_feature: MA Experiment 20000437 PARAMETER Experiment Name: At_Drought_P Parameter: Treatment Value: Drought vs. No Drought
  misc_feature: MA Experiment ID: 20000439 Result: Up-regulated in Transcription
  misc_feature: MA Experiment 20000439 PARAMETER Experiment Name: At_Roots__P Parameter: Age (day) Value: 14 vs. 21
  misc_feature: MA Experiment 20000439 PARAMETER Experiment Name: At_Roots__P Parameter: Organism Value: A. thaliana
  misc_feature: MA Experiment 20000439 PARAMETER Experiment Name: At_Roots__P Parameter: Tissue Value: Roots vs. Whole Plant
  misc_feature: MA Experiment ID: 20001554 Result: Down-regulated in Transcription
  misc_feature: MA Experiment 20001554 PARAMETER Experiment Name: At_Drought_Soil_Dry_P Parameter: Age (day) Value: 21
  misc_feature: MA Experiment 20001554 PARAMETER Experiment Name: At_Drought_Soil_Dry_P Parameter: Organism Value: A. thaliana
  misc_feature: MA Experiment 20001554 PARAMETER Experiment Name: At_Drought_Soil_Dry_P Parameter: Plant Line Value: WS
  misc_feature: MA Experiment 20001554 PARAMETER Experiment Name: At_Drought_Soil_Dry_P Parameter: Post Timepoint (hr) Value: None
  misc_feature: MA Experiment 20001554 PARAMETER Experiment Name: At_Drought_Soil_Dry_P Parameter: Post-Treatment Value: None
  misc_feature: MA Experiment 20001554 PARAMETER Experiment Name: At_Drought_Soil_Dry_P Parameter: Timepoint (day) Value: 7
  misc_feature: MA Experiment 20001554 PARAMETER Experiment Name: At_Drought_Soil_Dry_P Parameter: Treatment Value: Drought vs. No Drought
  misc_feature: MA Experiment ID: 20001556 Result: Down-regulated in Transcription
  misc_feature: MA Experiment 20001556 PARAMETER Experiment Name: At_Drought_Soil_Dry_P Parameter: Age (day) Value: 26
  misc_feature: MA Experiment 20001556 PARAMETER Experiment Name: At_Drought_Soil_Dry_P Parameter: Organism Value: A. thaliana
  misc_feature: MA Experiment 20001556 PARAMETER Experiment Name: At_Drought_Soil_Dry_P Parameter: Plant Line Value: WS
  misc_feature: MA Experiment 20001556 PARAMETER Experiment Name: At_Drought_Soil_Dry_P Parameter: Post Timepoint (hr) Value: None
  misc_feature: MA Experiment 20001556 PARAMETER Experiment Name: At_Drought_Soil_Dry_P Parameter: Post-Treatment Value: None
  misc_feature: MA Experiment 20001556 PARAMETER Experiment Name: At_Drought_Soil_Dry_P Parameter: Timepoint (day) Value: 12
  misc_feature: MA Experiment 20001556 PARAMETER Experiment Name: At_Drought_Soil_Dry_P Parameter: Treatment Value: Drought vs. No Drought
  misc_feature: MA Experiment ID: 20001757 Result: Up-regulated in Transcription
  misc_feature: MA Experiment 20001757 PARAMETER Experiment Name: At_50mM_NH4NO3_L-to-H_P Parameter: Timepoint (hr) Value: 6
  misc_feature: MA Experiment 20001757 PARAMETER Experiment Name: At_50mM_NH4NO3_L-to-H_P Parameter: Tissue Value: Leaf
  misc_feature: MA Experiment 20001757 PARAMETER Experiment Name: At_50mM_NH4NO3_L-to-H_P Parameter: Treatment Value: 50mM NH4NO3 vs 100mM Mannitol
  misc_feature: MA Experiment ID: 20001905 Result: Down-regulated in Transcription
  misc_feature: MA Experiment 20001905 PARAMETER Experiment Name: At_Drought_Reproduction_P Parameter: Age (day) Value: 40
  misc_feature: MA Experiment 20001905 PARAMETER Experiment Name: At_Drought_Reproduction_P Parameter: Organism Value: A. thaliana
  misc_feature: MA Experiment 20001905 PARAMETER Experiment Name: At_Drought_Reproduction_P Parameter: Plant Line Value: WS
  misc_feature: MA Experiment 20001905 PARAMETER Experiment Name: At_Drought_Reproduction_P Parameter: Timepoint (day) Value: 10
  misc_feature: MA Experiment 20001905 PARAMETER Experiment Name: At_Drought_Reproduction_P Parameter: Tissue Value: Rosettes
  misc_feature: MA Experiment 20001905 PARAMETER Experiment Name: At_Drought_Reproduction_P Parameter: Treatment Value: Drought vs. No Drought
  misc_feature: MA Experiment ID: 20001911 Result: Down-regulated in Transcription
  misc_feature: MA Experiment 20001911 PARAMETER Experiment Name: At_Drought_Reproduction_P Parameter: Age (day) Value: 40
  misc_feature: MA Experiment 20001911 PARAMETER Experiment Name: At_Drought_Reproduction_P Parameter: Organism Value: A. thaliana
  misc_feature: MA Experiment 20001911 PARAMETER Experiment Name: At_Drought_Reproduction_P Parameter: Plant Line Value: WS
  misc_feature: MA Experiment 20001911 PARAMETER Experiment Name: At_Drought_Reproduction_P Parameter: Timepoint (day) Value: 10
  misc_feature: MA Experiment 20001911 PARAMETER Experiment Name: At_Drought_Reproduction_P Parameter: Tissue Value: Flowers
  misc_feature: MA Experiment 20001911 PARAMETER Experiment Name: At_Drought_Reproduction_P Parameter: Treatment Value: Drought vs. No Drought
atgagaggaatcatcatcgtaagcttgttaattttacagagccttgtcgtgtcttcgtctcaaacagaaccagacttcaatttcttctactgggtcaactactggccaggagcaatatgcgatagccaaaaaggatgttgccctccaacgaaaggcaacacagcgtcggattttatcatccatggactctggcctcagttcaacaatggcacttggcctgcgttttgcgaccaaaccaatctcttcgatatctccaagatatcagatctagtctgccaaatggaaaagaaatggacagagtggggagtgtgggcatgtccaagtaacgagacaaatctatgggaacacgagtggaataagcatggcacctgtgtccaatctatcttcgaccaacactcttacttccgtaccaatctcaaattcaaacacaaagtccatctcctcaacatccttatacaaaaaggtattaaaccaaatgatgggttttacagtttggacgagatcaaaaatgcgatcaaatgcgcgatcggatttgcaccgggtatcgaatgcaatgaagatgtaaaggggaataagcagcttttccagatctatatatgtcttgataattacgcaaaagagtttgtggaatgcccgtatgttccggataaatcatgtgcttccaagatcaagtttccaagtcttcctgagagagattctcttaatgagtctctaagtgtgatgtcctctgtttcaactacctaa

SEQ ID NO: 95878 - protein, 247 aa, Arabidopsis thaliana
  peptide (1)..(247): Ceres Seq. ID no. 12730930
  misc_feature (26)..(217): Pfam Name: Ribonuclease T2 family Pfam Description: Ribonuclease T2 family
  misc_feature (1)..(247): Homolog of NCBI NO: 18394083 NR Description: ribonuclease; protein id: At1g14210.1
  misc_feature (1)..(247): Homolog of NCBI NO: 33589678 NR Description: At1g14210 [Arabidopsis thaliana]
  misc_feature (1)..(247): Homolog of NCBI NO: 25289282 NR Description: F7A19.31 protein - Arabidopsis thaliana
  misc_feature (5)..(225): Homolog of NCBI NO: 18394085 NR Description: ribonuclease; protein id: At1g14220.1
  misc_feature (5)..(227): Homolog of NCBI NO: 2148018 NR Description: ribonuclease II (EC 3.1.-.-) precursor,
  misc_feature (4)..(227): Homolog of NCBI NO: 7435266 NR Description: ribonuclease M5 (EC 3.1.-.-) precursor,
  misc_feature (1)..(227): Homolog of NCBI NO: 21555182 NR Description: ribonuclease, RNS1 [Arabidopsis thaliana]
  misc_feature (1)..(227): Homolog of NCBI NO: 15227068 NR Description: ribonuclease, RNS1; protein id: At2g02990.1, by cDNA: 27242., supported by cDNA: gi_18252956, supported by gi_561997 [Arabidopsis thaliana] >gi|1173103|sp|P42813|RNS1_ARATH
  misc_feature (4)..(227): Homolog of NCBI NO: 7768564 NR Description: RNase [Nicotiana tabacum]
  misc_feature (4)..(227): Homolog of NCBI NO: 532754 NR Description: RNase NE [Nicotiana alata]
MRGIIIVSLLILQSLVVSSSQTEPDFNFFYWVNYWPGAICDSQKGCCPPTKGNTASDFIIHGLWPQFNNGTWPAFCDQTNLFDISKISDLVCQMEKKWTEWGVWACPSNETNLWEHEWNKHGTCVQSIFDQHSYFRTNLKFKHKVHLLNILIQKGIKPNDGFYSLDEIKNAIKCAIGFAPGIECNEDVKGNKQLFQIYICLDNYAKEFVECPYVPDKSCASKIKFPSLPERDSLNESLSVMSSVSTT

SEQ ID NO: 95879 - protein, 154 aa, Arabidopsis thaliana
  peptide (1)..(154): Ceres Seq. ID no. 12730931
  misc_feature (1)..(124): Pfam Name: Ribonuclease T2 family Pfam Description: Ribonuclease T2 family
  misc_feature (1)..(154): Homolog of NCBI NO: 18394083 NR Description: ribonuclease; protein id: At1g14210.1
  misc_feature (1)..(154): Homolog of NCBI NO: 33589678 NR Description: At1g14210 [Arabidopsis thaliana]
  misc_feature (1)..(154): Homolog of NCBI NO: 25289282 NR Description: F7A19.31 protein - Arabidopsis thaliana
  misc_feature (1)..(132): Homolog of NCBI NO: 18394085 NR Description: ribonuclease; protein id: At1g14220.1
  misc_feature (1)..(134): Homolog of NCBI NO: 2148018 NR Description: ribonuclease II (EC 3.1.-.-) precursor,
  misc_feature (1)..(134): Homolog of NCBI NO: 7435266 NR Description: ribonuclease M5 (EC 3.1.-.-) precursor,
  misc_feature (1)..(134): Homolog of NCBI NO: 21555182 NR Description: ribonuclease, RNS1 [Arabidopsis thaliana]
  misc_feature (1)..(134): Homolog of NCBI NO: 15227068 NR Description: ribonuclease, RNS1; protein id: At2g02990.1, by cDNA: 27242., supported by cDNA: gi_18252956, supported by gi_561997 [Arabidopsis thaliana] >gi|1173103|sp|P42813|RNS1_ARATH
  misc_feature (1)..(134): Homolog of NCBI NO: 7768564 NR Description: RNase [Nicotiana tabacum]
  misc_feature (1)..(134): Homolog of NCBI NO: 532754 NR Description: RNase NE [Nicotiana alata]
MEKKWTEWGVWACPSNETNLWEHEWNKHGTCVQSIFDQHSYFRTNLKFKHKVHLLNILIQKGIKPNDGFYSLDEIKNAIKCAIGFAPGIECNEDVKGNKQLFQIYICLDNYAKEFVECPYVPDKSCASKIKFPSLPERDSLNESLSVMSSVSTT

SEQ ID NO: 95880 - DNA, 687 bp, Arabidopsis thaliana
  misc_feature (1)..(687): Ceres Seq. ID no. 12730932
  misc_feature: MA Experiment ID: 20000180 Result: Up-regulated in Transcription
  misc_feature: MA Experiment 20000180 PARAMETER Experiment Name: At_Germinating_Seeds_P Parameter: Age (hr) Value: 24 vs. 0
  misc_feature: MA Experiment 20000180 PARAMETER Experiment Name: At_Germinating_Seeds_P Parameter: Tissue Value: Germinating Seeds
  misc_feature: MA Experiment ID: 20000227 Result: Up-regulated in Transcription
  misc_feature: MA Experiment 20000227 PARAMETER Experiment Name: At_Root-Tips-vs-Tops_P Parameter: Tissue Value: Root Tips vs. Root Tops
  misc_feature: MA Experiment ID: 20000439 Result: Up-regulated in Transcription
  misc_feature: MA Experiment 20000439 PARAMETER Experiment Name: At_Roots__P Parameter: Age (day) Value: 14 vs. 21
  misc_feature: MA Experiment 20000439 PARAMETER Experiment Name: At_Roots__P Parameter: Organism Value: A. thaliana
  misc_feature: MA Experiment 20000439 PARAMETER Experiment Name: At_Roots__P Parameter: Tissue Value: Roots vs. Whole Plant
atgggagcaaagggttgtgttaacgttctcctcaagcttctagtgtttcaaggtcttttcgtttcacgtcctcaagaagactttgatttcttctacttcgttcttcagtggcctggagcctattgcgatacatcgcgtgcttgttgctatccaacatccggtaaacccgctgcagattttggtatccacggtctatggcctaattataacggtggttcatggccatcaaattgtgatcccgatagccaatttgatagatctcagatatcggatctcgtaagtagtttgaaaaagaattggccaacactatcatgtccaagcaacgaagggttcaacttttgggaacacgaatgggagaaacacggtacatgctccgaatccgtaatggaccaacatgagtactttgaaaatgctcttaaactcaaacaaaaagcaaatctcctccaaatcctcaaaaactccggaattaatccggatgatggattctacaatctggataagatcaccaacgcgataaaagatggaattggatttacgccaggaatagaatgtaacaaagatccggagcgtaatgcccagcttcatcagatctatatttgtgttgatacgtcaggaactgagtttatcgaatgtccagttttgcctagaggaagctgtccatctcaaatccagttttctaagttctaa

SEQ ID NO: 95881 - protein, 228 aa, Arabidopsis thaliana
  peptide (1)..(228): Ceres Seq. ID no. 12730933
  misc_feature (28)..(217): Pfam Name: Ribonuclease T2 family Pfam Description: Ribonuclease T2 family
  misc_feature (1)..(228): Homolog of NCBI NO: 18394085 NR Description: ribonuclease; protein id: At1g14220.1
  misc_feature (9)..(228): Homolog of NCBI NO: 9957752 NR Description: S-like ribonuclease [Prunus dulcis]
  misc_feature (9)..(228): Homolog of NCBI NO: 2118017 NR Description: ribonuclease non-S (EC 3.1.-.-) precursor -
  misc_feature (13)..(228): Homolog of NCBI NO: 18396065 NR Description: ribonuclease, RNS3; protein id: At1g26820.1, by cDNA: 9623., supported by cDNA: gi_17380739, supported by gi_561999 [Arabidopsis thaliana] >gi|1173105|sp|P42815|RNS3_ARATH
  misc_feature (1)..(228): Homolog of NCBI NO: 532754 NR Description: RNase NE [Nicotiana alata]
  misc_feature (8)..(228): Homolog of NCBI NO: 3860325 NR Description: ribonuclease T2 [Cicer arietinum]
  misc_feature (1)..(228): Homolog of NCBI NO: 7768564 NR Description: RNase [Nicotiana tabacum]
  misc_feature (1)..(228): Homolog of NCBI NO: 7435266 NR Description: ribonuclease M5 (EC 3.1.-.-) precursor,
  misc_feature (8)..(228): Homolog of NCBI NO: 9081845 NR Description: S-like ribonuclease [Prunus dulcis]
  misc_feature (10)..(228): Homolog of NCBI NO: 15227068 NR Description: ribonuclease, RNS1; protein id: At2g02990.1, by cDNA: 27242., supported by cDNA: gi_18252956, supported by gi_561997 [Arabidopsis thaliana] >gi|1173103|sp|P42813|RNS1_ARATH
MGAKGCVNVLLKLLVFQGLFVSRPQEDFDFFYFVLQWPGAYCDTSRACCYPTSGKPAADFGIHGLWPNYNGGSWPSNCDPDSQFDRSQISDLVSSLKKNWPTLSCPSNEGFNFWEHEWEKHGTCSESVMDQHEYFENALKLKQKANLLQILKNSGINPDDGFYNLDKITNAIKDGIGFTPGIECNKDPERNAQLHQIYICVDTSGTEFIECPVLPRGSCPSQIQFSKF

SEQ ID NO: 95882 - DNA, 1603 bp, Arabidopsis thaliana
  misc_feature (1)..(1603): Ceres Seq. ID no. 12730950
  misc_feature: MA Experiment ID: 20000182 Result: Up-regulated in Transcription
  misc_feature: MA Experiment 20000182 PARAMETER Experiment Name: At_2mM_SA_P Parameter: Age (day) Value: 14
  misc_feature: MA Experiment 20000182 PARAMETER Experiment Name: At_2mM_SA_P Parameter: Organism Value: A. thaliana
  misc_feature: MA Experiment 20000182 PARAMETER Experiment Name: At_2mM_SA_P Parameter: Plant Line Value: WS
  misc_feature: MA Experiment 20000182 PARAMETER Experiment Name: At_2mM_SA_P Parameter: Timepoint (hr) Value: 6
  misc_feature: MA Experiment 20000182 PARAMETER Experiment Name: At_2mM_SA_P Parameter: Tissue Value: Aerial
  misc_feature: MA Experiment 20000182 PARAMETER Experiment Name: At_2mM_SA_P Parameter: Treatment Value: 2mM SA vs. No Treatment
  misc_feature: MA Experiment ID: 20000184 Result: Down-regulated in Transcription
  misc_feature: MA Experiment 20000184 PARAMETER Experiment Name: At_Shoots__P Parameter: Age (day) Value: 7
  misc_feature: MA Experiment 20000184 PARAMETER Experiment Name: At_Shoots__P Parameter: Tissue Value: Shoots vs. Whole Plant
  misc_feature: MA Experiment ID: 20000234 Result: Down-regulated in Transcription
  misc_feature: MA Experiment 20000234 PARAMETER Experiment Name: At_Siliques_P Parameter: Age (day) Value: 21
  misc_feature: MA Experiment 20000234 PARAMETER Experiment Name: At_Siliques_P Parameter: Organism Value: A. thaliana
  misc_feature: MA Experiment 20000234 PARAMETER Experiment Name: At_Siliques_P Parameter: Plant Line Value: WS
  misc_feature: MA Experiment 20000234 PARAMETER Experiment Name: At_Siliques_P Parameter: Tissue Value: Less Than 5mm Siliques vs. Whole Plant
  misc_feature: MA Experiment ID: 20000235 Result: Down-regulated in Transcription
  misc_feature: MA Experiment 20000235 PARAMETER Experiment Name: At_Siliques_P Parameter: Age (day) Value: 21
  misc_feature: MA Experiment 20000235 PARAMETER Experiment Name: At_Siliques_P Parameter: Organism Value: A. thaliana
  misc_feature: MA Experiment 20000235 PARAMETER Experiment Name: At_Siliques_P Parameter: Plant Line Value: WS
  misc_feature: MA Experiment 20000235 PARAMETER Experiment Name: At_Siliques_P Parameter: Tissue Value: 5-10mm Siliques vs. Whole Plant
  misc_feature: MA Experiment ID: 20000264 Result: Down-regulated in Transcription
  misc_feature: MA Experiment 20000264 PARAMETER Experiment Name: At_Open_Flower_P Parameter: Age (day) Value: 21
  misc_feature: MA Experiment 20000264 PARAMETER Experiment Name: At_Open_Flower_P Parameter: Plant Line Value: WS
  misc_feature: MA Experiment 20000264 PARAMETER Experiment Name: At_Open_Flower_P Parameter: Tissue Value: Open Flower vs. Whole Plant
  misc_feature: MA Experiment ID: 20000265 Result: Down-regulated in Transcription
  misc_feature: MA Experiment 20000265 PARAMETER Experiment Name: At_Open_Flower_P Parameter: Age (day) Value: 21
  misc_feature: MA Experiment 20000265 PARAMETER Experiment Name: At_Open_Flower_P Parameter: Plant Line Value: WS
  misc_feature: MA Experiment 20000265 PARAMETER Experiment Name: At_Open_Flower_P Parameter: Tissue Value: Closed Flower vs. Whole Plant
  misc_feature: MA Experiment ID: 20000286 Result: Down-regulated in Transcription
  misc_feature: MA Experiment 20000286 PARAMETER Experiment Name: At_Open_Flower_P Parameter: Age (day) Value: 21
  misc_feature: MA Experiment 20000286 PARAMETER Experiment Name: At_Open_Flower_P Parameter: Plant Line Value: WS
  misc_feature: MA Experiment 20000286 PARAMETER Experiment Name: At_Open_Flower_P Parameter: Tissue Value: Half Open vs. Whole Plant
  misc_feature: MA Experiment ID: 20000438 Result: Down-regulated in Transcription
  misc_feature: MA Experiment 20000438 PARAMETER Experiment Name: At_Shoots__P Parameter: Age (day) Value: 14
  misc_feature: MA Experiment 20000438 PARAMETER Experiment Name: At_Shoots__P Parameter: Tissue Value: Shoots vs. Whole Plant
  misc_feature: MA Experiment ID: 20000441 Result: Up-regulated in Transcription
  misc_feature: MA Experiment 20000441 PARAMETER Experiment Name: At_1uM_BR-BRZ__P Parameter: Tissue Value: Shoot Apices
  misc_feature: MA Experiment 20000441 PARAMETER Experiment Name: At_1uM_BR-BRZ__P Parameter: Treatment Value: 1uM BR vs. No Treatment
  misc_feature: MA Experiment ID: 20000443 Result: Up-regulated in Transcription
  misc_feature: MA Experiment 20000443 PARAMETER Experiment Name: At_1uM_BR-BRZ__P Parameter: Tissue Value: Shoot Apices
  misc_feature: MA Experiment 20000443 PARAMETER Experiment Name: At_1uM_BR-BRZ__P Parameter: Treatment Value: 1uM BRZ vs. No Treatment
  misc_feature: MA Experiment ID: 20000794 Result: Down-regulated in Transcription
  misc_feature: MA Experiment 20000794 PARAMETER Experiment Name: At_Petals_P Parameter: Age (day) Value: 23-25 days
  misc_feature: MA Experiment 20000794 PARAMETER Experiment Name: At_Petals_P Parameter: Plant Line Value: WS
  misc_feature: MA Experiment 20000794 PARAMETER Experiment Name: At_Petals_P Parameter: Tissue Value: Petals vs. Whole plant
  misc_feature: MA Experiment ID: 20001560 Result: Down-regulated in Transcription
  misc_feature: MA Experiment 20001560 PARAMETER Experiment Name: At_Drought_Soil_Dry_P Parameter: Age (day) Value: 28
  misc_feature: MA Experiment 20001560 PARAMETER Experiment Name: At_Drought_Soil_Dry_P Parameter: Organism Value: A. thaliana
  misc_feature: MA Experiment 20001560 PARAMETER Experiment Name: At_Drought_Soil_Dry_P Parameter: Plant Line Value: WS
  misc_feature: MA Experiment 20001560 PARAMETER Experiment Name: At_Drought_Soil_Dry_P Parameter: Post Timepoint (hr) Value: None
  misc_feature: MA Experiment 20001560 PARAMETER Experiment Name: At_Drought_Soil_Dry_P Parameter: Post-Treatment Value: None
  misc_feature: MA Experiment 20001560 PARAMETER Experiment Name: At_Drought_Soil_Dry_P Parameter: Timepoint (day) Value: 14
  misc_feature: MA Experiment 20001560 PARAMETER Experiment Name: At_Drought_Soil_Dry_P Parameter: Treatment Value: Drought vs. No Drought
attctattagcgttcatattcagctaaacagacattgcgccgccgttaagtcgaaaggatagaaagaaattaaagaaagaagaagcttgttgtctttgcttcttgaggctctcttcttgtcttgatcatctgttacgttgttccacgaaaagaacagtagctttgtctctccatatagggttattatctgaaatgggtaattgtttagattcatcagctaaagtggataatagcaaccatagcccacatgctaattctgcttcttcgggctctaaagtttcaagcaagacaagccgttcaacgggtccttcaggactaagcacaacttcttacagcacagatagtagttttgggccattaccaacacttaggacagaaggagagatactttcatcgcctaacctaaaagctttcactttcaacgaactcaagaacgcgactaagaactttcgtcaagataatctactaggggaaggaggtttcggttgtgtattcaaaggatggattgatcaaacatctctcactgcttcacgtcccggttctggaatcgttgttgctgttaagcagcttaagcctgaaggttttcaaggtcataaagagtggttgactgaagtaaactatcttggtcaacttagtcacccaaatcttgtattactagttgggtattgcgcggaaggcgaaaaccggcttcttgtatatgaattcatgccaaaaggaagcttggagaatcatctttttagacgtggggcgcagccacttacatgggcaataaggatgaaagtggcggtaggtgcagctaaagggctaacttttcttcatgaagcaaagtcacaagtgatatacagagactttaaagctgctaacattctactcgacgctgacttcaatgctaagctttcagatttcggattggcaaaagcaggtcctactggtgataatacacatgtgtcaacaaaggtcattggtactcatggatatgcagctcctgaatatgttgccacaggtagattaaccgcaaagagtgatgtgtacagcttcggggtcgtgctactagaactaatatcaggacggcgtgccatggacaattcgaatggaggaaacgagtatagtcttgtagattgggcaacaccgtaccttggcgataagcgaaagctttttcgcataatggacacgaaactagggggtcaatatccacaaaagggagctttcacagctgctaatcttgcattgcaatgcttaaatcccgatgcaaaactccggccaaaaatgtcagaggttttagtcacattagaacagctagaatccgttgctaaacctggaaccaaacacacccaaatggaatctccaagatttcatcattcttctgttatgcagaaatctccggtaagatatagtcatgatcggcctctgctgcacatgactcctggtgcatcgcctttaccttcttacactcaatctcctcgtgtaagatgaaacacatttaagaaaacagatcgtgctttatgcttgtatgtgtactatatgtaaaaatgcaggcttgtctgtgtaattagagaggagtgattgcaaaggtttatacagagattaactatttacttcaact

SEQ ID NO: 95883 - protein, 426 aa, Arabidopsis thaliana
  peptide (1)..(426): Ceres Seq. ID no. 12730951
  misc_feature (1)..(426): Homolog of NCBI NO: 15223723 NR Description: protein kinase; protein id: At1g14370.1, by cDNA: gi_12248034, supported by cDNA: gi_16649048, supported
  misc_feature (1)..(426): Homolog of NCBI NO: 15227042 NR Description: putative protein kinase; protein id: At2g02800.1, by cDNA: gi_16226562, supported by cDNA: gi_2852448 [Arabidopsis
  misc_feature (1)..(426): Homolog of NCBI NO: 26449871 NR Description: putative protein kinase [Arabidopsis thaliana]
  misc_feature (1)..(419): Homolog of NCBI NO: 19071648 NR Description: putative protein tyrosine-serine-threonine kinase
  misc_feature (1)..(418): Homolog of NCBI NO: 37534182 NR Description: putative serine /threonine kinase similar to NAK
  misc_feature (155)..(426): Homolog of NCBI NO: 25287598 NR Description: protein T7N9.2 [imported] - Arabidopsis thaliana
  misc_feature (1)..(184): Homolog of NCBI NO: 25287598 NR Description: protein T7N9.2 [imported] - Arabidopsis thaliana
  misc_feature (20)..(390): Homolog of NCBI NO: 15222454 NR Description: putative protein kinase; protein id: At1g69790.1
  misc_feature (1)..(384): Homolog of NCBI NO: 34906046 NR Description: putative serine/threonine-specific protein kinase
  misc_feature (1)..(405): Homolog of NCBI NO: 15241749 NR Description: serine/threonine-specific protein kinase NAK; id: At5g02290.1, supported by cDNA: 27477., supported by cDNA:
MGNCLDSSAKVDNSNHSPHANSASSGSKVSSKTSRSTGPSGLSTTSYSTDSSFGPLPTLRTEGEILSSPNLKAFTFNELKNATKNFRQDNLLGEGGFGCVFKGWIDQTSLTASRPGSGIVVAVKQLKPEGFQGHKEWLTEVNYLGQLSHPNLVLLVGYCAEGENRLLVYEFMPKGSLENHLFRRGAQPLTWAIRMKVAVGAAKGLTFLHEAKSQVIYRDFKAANILLDADFNAKLSDFGLAKAGPTGDNTHVSTKVIGTHGYAAPEYVATGRLTAKSDVYSFGVVLLELISGRRAMDNSNGGNEYSLVDWATPYLGDKRKLFRIMDTKLGGQYPQKGAFTAANLALQCLNPDAKLRPKMSEVLVTLEQLESVAKPGTKHTQMESPRFHHSSVMQKSPVRYSHDRPLLHMTPGASPLPSYTQSPRVR

SEQ ID NO: 95884 - protein, 255 aa, Arabidopsis thaliana
  peptide (1)..(255): Ceres Seq. ID no. 12730952
  misc_feature (1)..(255): Homolog of NCBI NO: 15223723 NR Description: protein kinase; protein id: At1g14370.1, by cDNA: gi_12248034, supported by cDNA: gi_16649048, supported
  misc_feature (1)..(255): Homolog of NCBI NO: 15227042 NR Description: putative protein kinase; protein id: At2g02800.1, by cDNA: gi_16226562, supported by cDNA: gi_2852448 [Arabidopsis
  misc_feature (1)..(255): Homolog of NCBI NO: 26449871 NR Description: putative protein kinase [Arabidopsis thaliana]
  misc_feature (1)..(248): Homolog of NCBI NO: 19071648 NR Description: putative protein tyrosine-serine-threonine kinase
  misc_feature (1)..(247): Homolog of NCBI NO: 37534182 NR Description: putative serine /threonine kinase similar to NAK
  misc_feature (1)..(255): Homolog of NCBI NO: 25287598 NR Description: protein T7N9.2 [imported] - Arabidopsis thaliana
  misc_feature (1)..(13): Homolog of NCBI NO: 25287598 NR Description: protein T7N9.2 [imported] - Arabidopsis thaliana
  misc_feature (1)..(219): Homolog of NCBI NO: 15222454 NR Description: putative protein kinase; protein id: At1g69790.1
  misc_feature (1)..(213): Homolog of NCBI NO: 34906046 NR Description: putative serine/threonine-specific protein kinase
  misc_feature (1)..(234): Homolog of NCBI NO: 15241749 NR Description: serine/threonine-specific protein kinase NAK; id: At5g02290.1, supported by cDNA: 27477., supported by cDNA:
MPKGSLENHLFRRGAQPLTWAIRMKVAVGAAKGLTFLHEAKSQVIYRDFKAANILLDADFNAKLSDFGLAKAGPTGDNTHVSTKVIGTHGYAAPEYVATGRLTAKSDVYSFGVVLLELISGRRAMDNSNGGNEYSLVDWATPYLGDKRKLFRIMDTKLGGQYPQKGAFTAANLALQCLNPDAKLRPKMSEVLVTLEQLESVAKPGTKHTQMESPRFHHSSVMQKSPVRYSHDRPLLHMTPGASPLPSYTQSPRVR

SEQ ID NO: 95885 - protein, 232 aa, Arabidopsis thaliana
  peptide (1)..(232): Ceres Seq. ID no. 12730953
  misc_feature (1)..(232): Homolog of NCBI NO: 15223723 NR Description: protein kinase; protein id: At1g14370.1, by cDNA: gi_12248034, supported by cDNA: gi_16649048, supported
  misc_feature (1)..(232): Homolog of NCBI NO: 15227042 NR Description: putative protein kinase; protein id: At2g02800.1, by cDNA: gi_16226562, supported by cDNA: gi_2852448 [Arabidopsis
  misc_feature (1)..(232): Homolog of NCBI NO: 26449871 NR Description: putative protein kinase [Arabidopsis thaliana]
  misc_feature (1)..(225): Homolog of NCBI NO: 19071648 NR Description: putative protein tyrosine-serine-threonine kinase
  misc_feature (1)..(224): Homolog of NCBI NO: 37534182 NR Description: putative serine /threonine kinase similar to NAK
  misc_feature (1)..(232): Homolog of NCBI NO: 25287598 NR Description: protein T7N9.2 [imported] - Arabidopsis thaliana
  misc_feature (1)..(196): Homolog of NCBI NO: 15222454 NR Description: putative protein kinase; protein id: At1g69790.1
  misc_feature (1)..(190): Homolog of NCBI NO: 34906046 NR Description: putative serine/threonine-specific protein kinase
  misc_feature (1)..(211): Homolog of NCBI NO: 15241749 NR Description: serine/threonine-specific protein kinase NAK; id: At5g02290.1, supported by cDNA: 27477., supported by cDNA:
  misc_feature (1)..(211): Homolog of NCBI NO: 166809 NR Description: protein kinase
MKVAVGAAKGLTFLHEAKSQVIYRDFKAANILLDADFNAKLSDFGLAKAGPTGDNTHVSTKVIGTHGYAAPEYVATGRLTAKSDVYSFGVVLLELISGRRAMDNSNGGNEYSLVDWATPYLGDKRKLFRIMDTKLGGQYPQKGAFTAANLALQCLNPDAKLRPKMSEVLVTLEQLESVAKPGTKHTQMESPRFHHSSVMQKSPVRYSHDRPLLHMTPGASPLPSYTQSPRVR

SEQ ID NO: 95886 - DNA, 621 bp, Arabidopsis thaliana
  misc_feature (1)..(621): Ceres Seq. ID no. 12730958
  misc_feature: MA Experiment ID: 20000327 Result: Up-regulated in Transcription
  misc_feature: MA Experiment 20000327 PARAMETER Experiment Name: At_42deg_Heat_Sub_P Parameter: Age (day) Value: 14
  misc_feature: MA Experiment 20000327 PARAMETER Experiment Name: At_42deg_Heat_Sub_P Parameter: Organism Value: A. thaliana
  misc_feature: MA Experiment 20000327 PARAMETER Experiment Name: At_42deg_Heat_Sub_P Parameter: Plant Line Value: WS
  misc_feature: MA Experiment 20000327 PARAMETER Experiment Name: At_42deg_Heat_Sub_P Parameter: Temperature (deg C) Value: 42 vs. 22
  misc_feature: MA Experiment 20000327 PARAMETER Experiment Name: At_42deg_Heat_Sub_P Parameter: Timepoint (hr) Value: 1
  misc_feature: MA Experiment 20000327 PARAMETER Experiment Name: At_42deg_Heat_Sub_P Parameter: Tissue Value: Aerial
atggaaaccgtcgggcgtccacgtggcagacctcgaggttccaaaaacaaacctaaagctccaatctttgtcaccattgaccctcctatgagtccttacatcctcgaagtgccatccggaaacgatgtcgttgaagccctaaaccgtttctgccgcggtaaagccatcggcttttgcgtcctcagtggctcaggctccgttgctgatgtcactttgcgtcagccttctccggcagctcctggctcaaccattactttccacggaaagttcgatcttctctctgtctccgccactttcctccctcctctacctcctacctccttgtcccctcccgtctccaatttcttcaccgtctctctcgccggacctcaggggaaagtcatcggtggattcgtcgctggtcctctcgttgccgccggaactgtttacttcgtcgccactagtttcaagaacccttcctatcaccggttacctgctacggaggaagagcaaagaaactcggcggaaggggaagaggagggacaatcgccgccggtctctggaggtggtggagagtcgatgtacgtgggtggctctgatgtcatttgggatcccaacgccaaagctccatcgccgtactga

SEQ ID NO: 95887 - protein, 206 aa, Arabidopsis thaliana
  peptide (1)..(206): Ceres Seq. ID no. 12730959
  misc_feature (1)..(206): Homolog of NCBI NO: 15223782 NR Description: hypothetical protein; protein id: At1g14490.1
  misc_feature (1)..(192): Homolog of NCBI NO: 15240535 NR Description: putative protein; protein id: At5g49700.1
  misc_feature (6)..(193): Homolog of NCBI NO: 18396925 NR Description: expressed protein; protein id: At3g04570.1, by cDNA: 15781. [Arabidopsis thaliana] hypothetical protein [Arabidopsis thaliana]
  misc_feature (1)..(181): Homolog of NCBI NO: 18414224 NR Description: Expressed protein; protein id: At4g14465.1, by cDNA: 36844. [Arabidopsis thaliana]
  misc_feature (1)..(181): Homolog of NCBI NO: 21593180 NR Description: putative DNA-binding protein [Arabidopsis
  misc_feature (6)..(181): Homolog of NCBI NO: 15235815 NR Description: putative DNA binding protein; protein id:
  misc_feature (6)..(187): Homolog of NCBI NO: 15234404 NR Description: putative DNA-binding protein; protein id:
  misc_feature (6)..(192): Homolog of NCBI NO: 7486025 NR Description: hypothetical protein F23E12.50 - Arabidopsis >gi|3080411|emb|CAA18730.1| putative protein [Arabidopsis >gi|7270491|emb|CAB80256.1| putative protein [Arabidopsis
  misc_feature (6)..(192): Homolog of NCBI NO: 30690333 NR Description: expressed protein [Arabidopsis thaliana]
  misc_feature (2)..(203): Homolog of NCBI NO: 15236657 NR Description: hypothetical protein; protein id: At4g17800.1, by cDNA: gi_17933298, supported by cDNA: gi_20453386 [Arabidopsis
METVGRPRGRPRGSKNKPKAPIFVTIDPPMSPYILEVPSGNDVVEALNRFCRGKAIGFCVLSGSGSVADVTLRQPSPAAPGSTITFHGKFDLLSVSATFLPPLPPTSLSPPVSNFFTVSLAGPQGKVIGGFVAGPLVAAGTVYFVATSFKNPSYHRLPATEEEQRNSAEGEEEGQSPPVSGGGGESMYVGGSDVIWDPNAKAPSPY

SEQ ID NO: 95888 - protein, 177 aa, Arabidopsis thaliana
  peptide (1)..(177): Ceres Seq. ID no. 12730960
  misc_feature (1)..(177): Homolog of NCBI NO: 15223782 NR Description: hypothetical protein; protein id: At1g14490.1
  misc_feature (1)..(163): Homolog of NCBI NO: 15240535 NR Description: putative protein; protein id: At5g49700.1
  misc_feature (1)..(164): Homolog of NCBI NO: 18396925 NR Description: expressed protein; protein id: At3g04570.1, by cDNA: 15781. [Arabidopsis thaliana] hypothetical protein [Arabidopsis thaliana]
  misc_feature (1)..(152): Homolog of NCBI NO: 18414224 NR Description: Expressed protein; protein id: At4g14465.1, by cDNA: 36844. [Arabidopsis thaliana]
  misc_feature (1)..(152): Homolog of NCBI NO: 21593180 NR Description: putative DNA-binding protein [Arabidopsis
  misc_feature (1)..(152): Homolog of NCBI NO: 15235815 NR Description: putative DNA binding protein; protein id:
  misc_feature (1)..(158): Homolog of NCBI NO: 15234404 NR Description: putative DNA-binding protein; protein id:
  misc_feature (1)..(163): Homolog of NCBI NO: 7486025 NR Description: hypothetical protein F23E12.50 - Arabidopsis >gi|3080411|emb|CAA18730.1| putative protein [Arabidopsis >gi|7270491|emb|CAB80256.1| putative protein [Arabidopsis
  misc_feature (1)..(163): Homolog of NCBI NO: 30690333 NR Description: expressed protein [Arabidopsis thaliana]
  misc_feature (1)..(174): Homolog of NCBI NO: 15236657 NR Description: hypothetical protein; protein id: At4g17800.1, by cDNA: gi_17933298, supported by cDNA: gi_20453386 [Arabidopsis
MSPYILEVPSGNDVVEALNRFCRGKAIGFCVLSGSGSVADVTLRQPSPAAPGSTITFHGKFDLLSVSATFLPPLPPTSLSPPVSNFFTVSLAGPQGKVIGGFVAGPLVAAGTVYFVATSFKNPSYHRLPATEEEQRNSAEGEEEGQSPPVSGGGGESMYVGGSDVIWDPNAKAPSPY

SEQ ID NO: 95889 - protein, 138 aa, Arabidopsis thaliana
  peptide (1)..(138): Ceres Seq. ID no. 12730961
MSLCVSLLRQLLAQPLLSTESSIFSLSPPLSSLLYLLPPCPLPSPISSPSLSPDLRGKSSVDSSLVLSLPPELFTSSPLVSRTLPITGYLLRRKSKETRRKGKRRDNRRRSLEVVESRCTWVALMSFGIPTPKLHRRT

SEQ ID NO: 95890 - DNA, 948 bp, Arabidopsis thaliana
  misc_feature (1)..(948): Ceres Seq. ID no. 12730966
  misc_feature: MA Experiment ID: 20000180 Result: Up-regulated in Transcription
  misc_feature: MA Experiment 20000180 PARAMETER Experiment Name: At_Germinating_Seeds_P Parameter: Age (hr) Value: 24 vs. 0
  misc_feature: MA Experiment 20000180 PARAMETER Experiment Name: At_Germinating_Seeds_P Parameter: Tissue Value: Germinating Seeds
  misc_feature: MA Experiment ID: 20000185 Result: Up-regulated in Transcription
  misc_feature: MA Experiment 20000185 PARAMETER Experiment Name: At_Roots__P Parameter: Age (day) Value: 7 vs. 21
  misc_feature: MA Experiment 20000185 PARAMETER Experiment Name: At_Roots__P Parameter: Organism Value: A. thaliana
  misc_feature: MA Experiment 20000185 PARAMETER Experiment Name: At_Roots__P Parameter: Tissue Value: Roots vs. Whole Plant
  misc_feature: MA Experiment ID: 20000211 Result: Down-regulated in Transcription
  misc_feature: MA Experiment 20000211 PARAMETER Experiment Name: At_0.001percent_MeJA__P Parameter: Age (day) Value: 14
  misc_feature: MA Experiment 20000211 PARAMETER Experiment Name: At_0.001percent_MeJA__P Parameter: Organism Value: A. thaliana
  misc_feature: MA Experiment 20000211 PARAMETER Experiment Name: At_0.001percent_MeJA__P Parameter: Plant Line Value: WS
  misc_feature: MA Experiment 20000211 PARAMETER Experiment Name: At_0.001percent_MeJA__P Parameter: Timepoint (hr) Value: 1
  misc_feature: MA Experiment 20000211 PARAMETER Experiment Name: At_0.001percent_MeJA__P Parameter: Tissue Value: Aerial
  misc_feature: MA Experiment 20000211 PARAMETER Experiment Name: At_0.001percent_MeJA__P Parameter: Treatment Value: 0.001percent MeJA vs. No Treatment
atggcgatcttcaagattcttgtattgttgttgagtttgtgttgtttcagtcaagcacaactttctcctactttctacgaccaaacttgtcaaaacgctctctccaccatccgatcttcaatccgaaccgcaatcagccgtgaacgtagaatggctgcttctctcatccgtctccatttccacgactgcttcgttaatggttgtgatgcatcggtcatgctcgtggcaactcccaccatggagagtgagagagattcattggcaaattttcaatcggcaagaggatttgaagttatcgatcaagccaaatcagctgtagagagtgtttgtcccggcgttgtttcttgcgctgatattattgccgttgctgctagagatgcttctgaatatgtcggaggtccaagatatgatgtgaaggttggtcgaagagattccaccaacgcgtttagggctatcgcagacagggatctccccaacttcagggctagcctcaacgatctctctgaactcttccttcgaaaaggactcaacacaagagacctcgtcgctctctcaggagctcacacattagggcaagctcaatgcctcacgttcaaaggtaggctttacgataactcgagtgacattgacgcgggattctccagtacccgtaagcgtcgttgtccggtcaacggtggagatacgactctagcacctttagatcaagtgacaccaaactcgttcgacaataactattacagaaacttgatgcagaagaaaggacttttagaaagcgatcaagttttgttcggaaccggagcttctacagatagtatagtgacggagtacagcagaaatccatcacgatttgcgtctgatttctcagctgcaatgatcaaaatgggagatattcagacactcactggttcagatggacaaatccgaagaatctgcagtgccgttaattaa

SEQ ID NO: 95891 - protein, 315 aa, Arabidopsis thaliana
  peptide (1)..(315): Ceres Seq. ID no. 12730967
  misc_feature (37)..(279): Pfam Name: Peroxidase Pfam Description: Peroxidase
  misc_feature (1)..(315): Homolog of NCBI NO: 15223798 NR Description: anionic peroxidase, putative; protein id: [Arabidopsis thaliana] >gi|25453207|sp|Q9LE15|PER4_ARATH
  misc_feature (3)..(315): Homolog of NCBI NO: 15223818 NR Description: anionic peroxidase, putative; protein id: [Arabidopsis thaliana] >gi|25453213|sp|Q9M9Q9|PER5_ARATH
  misc_feature (7)..(315): Homolog of NCBI NO: 7262698 NR Description: Strong similarity to an Anionic Peroxidase from Nicotiana sylvestris gi|1076611 and contains a Peroxidase
  misc_feature (3)..(315): Homolog of NCBI NO: 25285598 NR Description: protein T5E21.5 [imported] - Arabidopsis thaliana
  misc_feature (2)..(315): Homolog of NCBI NO: 400750 NR Description: Lignin forming anionic peroxidase precursor
  misc_feature (2)..(315): Homolog of NCBI NO: 1076611 NR Description: peroxidase (EC 1.11.1.7), anionic, precursor -
  misc_feature (3)..(315): Homolog of NCBI NO: 4760702 NR Description: peroxidase 2 [Scutellaria baicalensis]
  misc_feature (3)..(315): Homolog of NCBI NO: 2811262 NR Description: ferriprotein porphyrin-containing peroxidase
  misc_feature (3)..(315): Homolog of NCBI NO: 2811264 NR Description: ferriprotein porphyrin-containing peroxidase
  misc_feature (7)..(315): Homolog of NCBI NO: 32351452 NR Description: class III peroxidase [Gossypium hirsutum]
MAIFKILVLLLSLCCFSQAQLSPTFYDQTCQNALSTIRSSIRTAISRERRMAASLIRLHFHDCFVNGCDASVMLVATPTMESERDSLANFQSARGFEVIDQAKSAVESVCPGVVSCADIIAVAARDASEYVGGPRYDVKVGRRDSTNAFRAIADRDLPNFRASLNDLSELFLRKGLNTRDLVALSGAHTLGQAQCLTFKGRLYDNSSDIDAGFSSTRKRRCPVNGGDTTLAPLDQVTPNSFDNNYYRNLMQKKGLLESDQVLFGTGASTDSIVTEYSRNPSRFASDFSAAMIKMGDIQTLTGSDGQIRRICSAVN

SEQ ID NO: 95892 - protein, 265 aa, Arabidopsis thaliana
  peptide (1)..(265): Ceres Seq. ID no. 12730968
  misc_feature (1)..(229): Pfam Name: Peroxidase Pfam Description: Peroxidase
  misc_feature (1)..(265): Homolog of NCBI NO: 15223798 NR Description: anionic peroxidase, putative; protein id: [Arabidopsis thaliana] >gi|25453207|sp|Q9LE15|PER4_ARATH
  misc_feature (1)..(265): Homolog of NCBI NO: 15223818 NR Description: anionic peroxidase, putative; protein id: [Arabidopsis thaliana] >gi|25453213|sp|Q9M9Q9|PER5_ARATH
  misc_feature (1)..(265): Homolog of NCBI NO: 7262698 NR Description: Strong similarity to an Anionic Peroxidase from Nicotiana sylvestris gi|1076611 and contains a Peroxidase
  misc_feature (1)..(265): Homolog of NCBI NO: 25285598 NR Description: protein T5E21.5 [imported] - Arabidopsis thaliana
  misc_feature (1)..(265): Homolog of NCBI NO: 400750 NR Description: Lignin forming anionic peroxidase precursor
  misc_feature (1)..(265): Homolog of NCBI NO: 1076611 NR Description: peroxidase (EC 1.11.1.7), anionic, precursor -
  misc_feature (1)..(265): Homolog of NCBI NO: 4760702 NR Description: peroxidase 2 [Scutellaria baicalensis]
  misc_feature (1)..(265): Homolog of NCBI NO: 2811262 NR Description: ferriprotein porphyrin-containing peroxidase
  misc_feature (1)..(265): Homolog of NCBI NO: 2811264 NR Description: ferriprotein porphyrin-containing peroxidase
  misc_feature (1)..(265): Homolog of NCBI NO: 32351452 NR Description: class III peroxidase [Gossypium hirsutum]
MAASLIRLHFHDCFVNGCDASVMLVATPTMESERDSLANFQSARGFEVIDQAKSAVESVCPGVVSCADIIAVAARDASEYVGGPRYDVKVGRRDSTNAFRAIADRDLPNFRASLNDLSELFLRKGLNTRDLVALSGAHTLGQAQCLTFKGRLYDNSSDIDAGFSSTRKRRCPVNGGDTTLAPLDQVTPNSFDNNYYRNLMQKKGLLESDQVLFGTGASTDSIVTEYSRNPSRFASDFSAAMIKMGDIQTLTGSDGQIRRICSAVN

SEQ ID NO: 95893 - protein, 243 aa, Arabidopsis thaliana
  peptide (1)..(243): Ceres Seq. ID no. 12730969
  misc_feature (1)..(207): Pfam Name: Peroxidase Pfam Description: Peroxidase
  misc_feature (1)..(243): Homolog of NCBI NO: 15223798 NR Description: anionic peroxidase, putative; protein id: [Arabidopsis thaliana] >gi|25453207|sp|Q9LE15|PER4_ARATH
  misc_feature (1)..(243): Homolog of NCBI NO: 15223818 NR Description: anionic peroxidase, putative; protein id: [Arabidopsis thaliana] >gi|25453213|sp|Q9M9Q9|PER5_ARATH
  misc_feature (1)..(243): Homolog of NCBI NO: 7262698 NR Description: Strong similarity to an Anionic Peroxidase from Nicotiana sylvestris gi|1076611 and contains a Peroxidase
  misc_feature (1)..(243): Homolog of NCBI NO: 25285598 NR Description: protein T5E21.5 [imported] - Arabidopsis thaliana
  misc_feature (1)..(243): Homolog of NCBI NO: 400750 NR Description: Lignin forming anionic peroxidase precursor
  misc_feature (1)..(243): Homolog of NCBI NO: 1076611 NR Description: peroxidase (EC 1.11.1.7), anionic, precursor -
  misc_feature (1)..(243): Homolog of NCBI NO: 4760702 NR Description: peroxidase 2 [Scutellaria baicalensis]
  misc_feature (1)..(243): Homolog of NCBI NO: 2811262 NR Description: ferriprotein porphyrin-containing peroxidase
  misc_feature (1)..(243): Homolog of NCBI NO: 2811264 NR Description: ferriprotein porphyrin-containing peroxidase
  misc_feature (1)..(243): Homolog of NCBI NO: 32351452 NR Description: class III peroxidase [Gossypium hirsutum]
MLVATPTMESERDSLANFQSARGFEVIDQAKSAVESVCPGVVSCADIIAVAARDASEYVGGPRYDVKVGRRDSTNAFRAIADRDLPNFRASLNDLSELFLRKGLNTRDLVALSGAHTLGQAQCLTFKGRLYDNSSDIDAGFSSTRKRRCPVNGGDTTLAPLDQVTPNSFDNNYYRNLMQKKGLLESDQVLFGTGASTDSIVTEYSRNPSRFASDFSAAMIKMGDIQTLTGSDGQIRRICSAVN

SEQ ID NO: 95894 - DNA, 1658 bp, Arabidopsis thaliana
  misc_feature (1)..(1658): Ceres Seq. ID no. 12731044
  misc_feature: MA Experiment ID: 20000355 Result: Down-regulated in Transcription
  misc_feature: MA Experiment 20000355 PARAMETER Experiment Name: At_Siliques_Sub_P Parameter: Age (day) Value: 21
  misc_feature: MA Experiment 20000355 PARAMETER Experiment Name: At_Siliques_Sub_P Parameter: Organism Value: A. thaliana
  misc_feature: MA Experiment 20000355 PARAMETER Experiment Name: At_Siliques_Sub_P Parameter: Plant Line Value: WS
  misc_feature: MA Experiment 20000355 PARAMETER Experiment Name: At_Siliques_Sub_P Parameter: Tissue Value: Less Than 5mm Siliques vs. Whole Plant
acttcacgattatcactcaccactttccgtttcaactttcaaactctctctcacaagccatgcaagacgcggagagaaccaccaatgatccggtagacagaattgagaaagtgacatggagagatctgcaagacggatctttcaccgcagaactcaagaggcttatctgctttgcggctcctatggctgccgtggttatcattcagttcatgatacagataatctcaatggtgatggtgggtcacctcggtagactctccctcgctagcgcttccttcgcagtctccttctgtaacgtcactggcttcagcttcattataggattgtcatgtgccttagatactttgagtggtcaagcttatggagctaagctatatcggaaactaggtgttcaggcttacacagctatgttctgtcttactttagtgtgtctccctctctctctcctatggttcaacatgggaaagcttattgtgatccttggccaagaccctgctattgctcacgaagctggtagatatgccgcttggctcatcccaggactgttcgcttacgccgttcttcagccgctcattcgctacttcaaaaaccagagcttgatcacacctctcctcgtcacctcttctgttgtgttttgtatccacgttcctctctgctggcttttggtttataagtcagggcttggtcatattggaggagccttggctctcagcttgtcatactggctctatgccattttccttggatctttcatgtactactcctctgcctgttctgagacacgcgcgccgcttaccatggagatattcgagggcgttagagagtttatcaaatatgctcttccttctgcggctatgctttgcctggagtggtggtcatatgaactcataatattactttctggtctgttacccaacccacagctggagacttctgtgctctctatctgtttcgaaacactttcaataacttattcaataccactagcgatcgcggctgcagcaagcacaagaatctcaaatgagttaggagctggaaactctcgagcagcacatattgtggtctatgcggcaatgtctcttgcagtaatggatgcattgatggtgagtatgtctctattagccggcaggcatgttttcggccatgttttcagcagtgacaagaaaaccatcgaatatgttgcaaagatggctccgttggtctctatttctatcatactggacagtttacaaggggttctctcaggtgttgcaagcggatgcgggtggcagcatataggggcttacataaacttcggagctttctatctctgggggatacccattgcagcatctttagccttctgggttcatctgaaaggtgttggcctttggattggaatactagccggtgcagttctgcagactcttctgctggctcttgtcacaggctgcacaaactggaaaacccaggcccgtgaagcgagggagcgaatggctgtggcccatgaatcagaacttacagagtcagaacttcccatctaagattacagggacacagatgttcctcctattttaccatttttgtagcagccaaatcgttatatgttactgctggactagtggttgccgtgaataattggtcttttcttttgtaatattagcagccctcagcaatcg

SEQ ID NO: 95895 - protein, 506 aa, Arabidopsis thaliana
  peptide (1)..(506): Ceres Seq. ID no. 12731045
  misc_feature (20)..(506): Homolog of NCBI NO: 22329577 NR Description: hypothetical protein; protein id: At1g15150.1, by cDNA: gi_17979411 [Arabidopsis thaliana] unknown protein [Arabidopsis thaliana]
  misc_feature (20)..(483): Homolog of NCBI NO: 25518472 NR Description: hypothetical protein F9L1.9 [imported] - thaliana >gi|5103815|gb|AAD39645.1|AC007591_10 Strong similarity gi|4734005 F3L12.7 hypothetical protein from Arabidopsis thaliana
  misc_feature (20)..(505): Homolog of NCBI NO: 15218068 NR Description: hypothetical protein; protein id: At1g15160.1
  misc_feature (20)..(483): Homolog of NCBI NO: 25518548 NR Description: hypothetical protein F9L1.10 - Arabidopsis >gi|5103818|gb|AAD39648.1|AC007591_13 Strong similarity to F3L12.7 hypothetical protein from Arabidopsis thaliana BAC
  misc_feature (20)..(495): Homolog of NCBI NO: 15218070 NR Description: hypothetical protein; protein id: At1g15170.1 thaliana] >gi|22655074|gb|AAM98128.1| unknown protein
  misc_feature (20)..(483): Homolog of NCBI NO: 25511632 NR Description: F9L1.11 protein - Arabidopsis thaliana Strong similarity to gi|4734005 F3L12.7 hypothetical protein from
  misc_feature (20)..(495): Homolog of NCBI NO: 18394206 NR Description: expressed protein; protein id: At1g15180.1, by cDNA: gi_15028308, supported by cDNA: gi_19310610 [Arabidopsis >gi|15028309|gb|AAK76631.1| unknown protein [Arabidopsis
  misc_feature (20)..(483): Homolog of NCBI NO: 25518684 NR Description: hypothetical protein F9L1.12 [imported] - thaliana >gi|5103816|gb|AAD39646.1|AC007591_11 Strong similarity gi|4734005 F3L12.7 hypothetical protein from Arabidopsis thaliana
  misc_feature (20)..(503): Homolog of NCBI NO: 15223961 NR Description: hypothetical protein; protein id: At1g71140.1
  misc_feature (36)..(499): Homolog of NCBI NO: 15228073 NR Description: hypothetical protein; protein id: At2g04050.1
FTIITHHFPFQLSNSLSQAMQDAERTTNDPVDRIEKVTWRDLQDGSFTAELKRLICFAAPMAAVVIIQFMIQIISMVMVGHLGRLSLASASFAVSFCNVTGFSFIIGLSCALDTLSGQAYGAKLYRKLGVQAYTAMFCLTLVCLPLSLLWFNMGKLIVILGQDPAIAHEAGRYAAWLIPGLFAYAVLQPLIRYFKNQSLITPLLVTSSVVFCIHVPLCWLLVYKSGLGHIGGALALSLSYWLYAIFLGSFMYYSSACSETRAPLTMEIFEGVREFIKYALPSAAMLCLEWWSYELIILLSGLLPNPQLETSVLSICFETLSITYSIPLAIAAAASTRISNELGAGNSRAAHIVVYAAMSLAVMDALMVSMSLLAGRHVFGHVFSSDKKTIEYVAKMAPLVSISIILDSLQGVLSGVASGCGWQHIGAYINFGAFYLWGIPIAASLAFWVHLKGVGLWIGILAGAVLQTLLLALVTGCTNWKTQAREARERMAVAHESELTESELPI

SEQ ID NO: 95896 - protein, 487 aa, Arabidopsis thaliana
  peptide (1)..(487): Ceres Seq. ID no. 12731046
  misc_feature (1)..(487): Homolog of NCBI NO: 22329577 NR Description: hypothetical protein; protein id: At1g15150.1, by cDNA: gi_17979411 [Arabidopsis thaliana] unknown protein [Arabidopsis thaliana]
  misc_feature (1)..(464): Homolog of NCBI NO: 25518472 NR Description: hypothetical protein F9L1.9 [imported] - thaliana >gi|5103815|gb|AAD39645.1|AC007591_10 Strong similarity gi|4734005 F3L12.7 hypothetical protein from Arabidopsis thaliana
  misc_feature (1)..(486): Homolog of NCBI NO: 15218068 NR Description: hypothetical protein; protein id: At1g15160.1
  misc_feature (1)..(464): Homolog of NCBI NO: 25518548 NR Description: hypothetical protein F9L1.10 - Arabidopsis >gi|5103818|gb|AAD39648.1|AC007591_13 Strong similarity to F3L12.7 hypothetical protein from Arabidopsis thaliana BAC
  misc_feature (1)..(476): Homolog of NCBI NO: 15218070 NR Description: hypothetical protein; protein id: At1g15170.1 thaliana] >gi|22655074|gb|AAM98128.1| unknown protein
  misc_feature (1)..(464): Homolog of NCBI NO: 25511632 NR Description: F9L1.11 protein - Arabidopsis thaliana Strong similarity to gi|4734005 F3L12.7 hypothetical protein from
  misc_feature (1)..(476): Homolog of NCBI NO: 18394206 NR Description: expressed protein; protein id: At1g15180.1, by cDNA: gi_15028308, supported by cDNA: gi_19310610 [Arabidopsis >gi|15028309|gb|AAK76631.1| unknown protein [Arabidopsis
  misc_feature (1)..(464): Homolog of NCBI NO: 25518684 NR Description: hypothetical protein F9L1.12 [imported] - thaliana >gi|5103816|gb|AAD39646.1|AC007591_11 Strong similarity gi|4734005 F3L12.7 hypothetical protein from Arabidopsis thaliana
  misc_feature (1)..(484): Homolog of NCBI NO: 15223961 NR Description: hypothetical protein; protein id: At1g71140.1
  misc_feature (17)..(480): Homolog of NCBI NO: 15228073 NR Description: hypothetical protein; protein id: At2g04050.1
MQDAERTTNDPVDRIEKVTWRDLQDGSFTAELKRLICFAAPMAAVVIIQFMIQIISMVMVGHLGRLSLASASFAVSFCNVTGFSFIIGLSCALDTLSGQAYGAKLYRKLGVQAYTAMFCLTLVCLPLSLLWFNMGKLIVILGQDPAIAHEAGRYAAWLIPGLFAYAVLQPLIRYFKNQSLITPLLVTSSVVFCIHVPLCWLLVYKSGLGHIGGALALSLSYWLYAIFLGSFMYYSSACSETRAPLTMEIFEGVREFIKYALPSAAMLCLEWWSYELIILLSGLLPNPQLETSVLSICFETLSITYSIPLAIAAAASTRISNELGAGNSRAAHIVVYAAMSLAVMDALMVSMSLLAGRHVFGHVFSSDKKTIEYVAKMAPLVSISIILDSLQGVLSGVASGCGWQHIGAYINFGAFYLWGIPIAASLAFWVHLKGVGLWIGILAGAVLQTLLLALVTGCTNWKTQAREARERMAVAHESELTESELPI

SEQ ID NO: 95897 - protein, 446 aa, Arabidopsis thaliana
  peptide (1)..(446): Ceres Seq. ID no. 12731047
  misc_feature (1)..(446): Homolog of NCBI NO: 22329577 NR Description: hypothetical protein; protein id: At1g15150.1, by cDNA: gi_17979411 [Arabidopsis thaliana] unknown protein [Arabidopsis thaliana]
  misc_feature (1)..(423): Homolog of NCBI NO: 25518472 NR Description: hypothetical protein F9L1.9 [imported] - thaliana >gi|5103815|gb|AAD39645.1|AC007591_10 Strong similarity gi|4734005 F3L12.7 hypothetical protein from Arabidopsis thaliana
  misc_feature (1)..(445): Homolog of NCBI NO: 15218068 NR Description: hypothetical protein; protein id: At1g15160.1
  misc_feature (1)..(423): Homolog of NCBI NO: 25518548 NR Description: hypothetical protein F9L1.10 - Arabidopsis >gi|5103818|gb|AAD39648.1|AC007591_13 Strong similarity to F3L12.7 hypothetical protein from Arabidopsis thaliana BAC
  misc_feature (1)..(435): Homolog of NCBI NO: 15218070 NR Description: hypothetical protein; protein id: At1g15170.1 thaliana] >gi|22655074|gb|AAM98128.1| unknown protein
  misc_feature (1)..(423): Homolog of NCBI NO: 25511632 NR Description: F9L1.11 protein - Arabidopsis thaliana Strong similarity to gi|4734005 F3L12.7 hypothetical protein from
  misc_feature (1)..(435): Homolog of NCBI NO: 18394206 NR Description: expressed protein; protein id: At1g15180.1, by cDNA: gi_15028308, supported by cDNA: gi_19310610 [Arabidopsis >gi|15028309|gb|AAK76631.1| unknown protein [Arabidopsis
  misc_feature (1)..(423): Homolog of NCBI NO: 25518684 NR Description: hypothetical protein F9L1.12 [imported] - thaliana >gi|5103816|gb|AAD39646.1|AC007591_11 Strong similarity gi|4734005 F3L12.7 hypothetical protein from Arabidopsis thaliana
  misc_feature (1)..(443): Homolog of NCBI NO: 15223961 NR Description: hypothetical protein; protein id: At1g71140.1
  misc_feature (1)..(439): Homolog of NCBI NO: 15228073 NR Description: hypothetical protein; protein id: At2g04050.1
MAAVVIIQFMIQIISMVMVGHLGRLSLASASFAVSFCNVTGFSFIIGLSCALDTLSGQAYGAKLYRKLGVQAYTAMFCLTLVCLPLSLLWFNMGKLIVILGQDPAIAHEAGRYAAWLIPGLFAYAVLQPLIRYFKNQSLITPLLVTSSVVFCIHVPLCWLLVYKSGLGHIGGALALSLSYWLYAIFLGSFMYYSSACSETRAPLTMEIFEGVREFIKYALPSAAMLCLEWWSYELIILLSGLLPNPQLETSVLSICFETLSITYSIPLAIAAAASTRISNELGAGNSRAAHIVVYAAMSLAVMDALMVSMSLLAGRHVFGHVFSSDKKTIEYVAKMAPLVSISIILDSLQGVLSGVASGCGWQHIGAYINFGAFYLWGIPIAASLAFWVHLKGVGLWIGILAGAVLQTLLLALVTGCTNWKTQAREARERMAVAHESELTESELPI

SEQ ID NO: 95898 - DNA, 1440 bp, Arabidopsis thaliana
  misc_feature (1)..(1440): Ceres Seq. ID no. 12731072
  misc_feature: MA Experiment ID: 20000069 Result: Up-regulated in Transcription
  misc_feature: MA Experiment 20000069 PARAMETER Experiment Name: At_100uM_ABA_Mutants_cDNA_P Parameter: Plant Line Value: CS23
  misc_feature: MA Experiment 20000069 PARAMETER Experiment Name: At_100uM_ABA_Mutants_cDNA_P Parameter: Timepoint (hr) Value: 6
  misc_feature: MA Experiment 20000069 PARAMETER Experiment Name: At_100uM_ABA_Mutants_cDNA_P Parameter: Tissue Value: Aerial
  misc_feature: MA Experiment 20000069 PARAMETER Experiment Name: At_100uM_ABA_Mutants_cDNA_P Parameter: Treatment Value: 100uM ABA vs. No Treatment
atggtgttggcggagctcggcggccggataacccgcgccatacagcagatgaacaatgtgacaataatcgatgaaaaggttttgaatgatttcttaaacgagattactcgcgctttgctccagtccgatgtttcttttggccttgtggaaaagatgcagaccaatattaagaagatcgttaacctcgacgatctagcagctggccacaacaaacgcctgatcatcgagcaggctatcttcaaggaactctgtaggatgctggatccaggaaagcctgcctttgcccccaaaaaggccaaacctagtgtagtgatgttcgtcggtttacaaggtgctggaaaaaccacaacatgtaccaagtatgcttactatcatcagaagaaagggtacaaagcagctctagtgtgtgcggatactttcagggccggtgcttttgatcagctgaaacagaatgccaccaaggctaagatccccttttatggaagctacacagaatccgatcctgtgaaaattgctgttgagggagttgataggttcaagaaagaaaagtgtgatcttattattgttgacaccagtggtcgccataaacaagcagcttctctctttgaagaaatgcgtcaagttgctgaagcaacggaaccagatcttgttatatttgttatggatagcagtattggtcaagctgcatttgaacaagctgaagcttttaaggaaactgtatctgttggagctgtaattattactaagatggacggccatgccaagggaggtggtgctcttagcgctgttgcagctacaaaaagtcctgtgatattcattggaacaggagagcatatggatgagtttgaagtgtttgacgttaaaccatttgtcagccgtctcttaggaaagggtgattggtctggactcgtggataaactacaagaggtggtacctaaagatctacagaatgaacttgtagaaaatctctctcagggtaactttacgttgagaagtatgtacgaccagttccagtgctctctgcggattccacttaatcagcttttctcgatgctgcctggaattagtgctgaaatgatgccgaaaggacatggtgaagaaagccgagtgaagatgaagcgatacatgacaatgatggattctatgacaaataaagaacttgacagcccaaacccaaagatttttaacgagtcaaggataatgaggatagcgagagggtcagggaggttagtaagagaagtgatggagatgttggaagagtacaagaggatagcaaagacaatgaaagggatcaagatcccaaagaacggagacatgagcaaggtcataccgcctcagatgctaaaacagatgggcggcatgagcggtctgcagagtctcatgaagcagatgggttcggctaaggacatgatgggaatgtttggtggcggaggcaagtag

SEQ ID NO: 95899 - protein, 479 aa, Arabidopsis thaliana; identical to SEQ ID NO: 35253
  peptide (1)..(479): Ceres Seq. ID no. 12731073
  misc_feature (327)..(428): Pfam Name: Signal peptide binding domain Pfam Description: Signal peptide binding domain
  misc_feature (1)..(479): Homolog of NCBI NO: 18394225 NR Description: expressed protein; protein id: At1g15310.1, by cDNA: 22158., supported by cDNA: gi_12745000 [Arabidopsis >gi|586036|sp|P37106|SR51_ARATH Signal recognition particle 54
  misc_feature (1)..(479): Homolog of NCBI NO: 18402407 NR Description: signal recognition particle 54 kDa protein 2 putative; protein id: At1g48900.1, supported by cDNA: supported by cDNA: gi_15810009, supported by cDNA: gi_17386101
  misc_feature (1)..(479): Homolog of NCBI NO: 515681 NR Description: signal recognition particle 54 kDa subunit
  misc_feature (163)..(479): Homolog of NCBI NO: 25294409 NR Description: hypothetical protein F27K7.8 [imported] - thaliana >gi|11094805|gb|AAG29734.1|AC084414_2 signal recognition
  misc_feature (1)..(163): Homolog of NCBI NO: 25294409 NR Description: hypothetical protein F27K7.8 [imported] - thaliana >gi|11094805|gb|AAG29734.1|AC084414_2 signal recognition
  misc_feature (1)..(476): Homolog of NCBI NO: 1711510 NR Description: Signal recognition particle 54 kDa protein 2 >gi|515679|gb|AAA66199.1| signal recognition particle 54 kDa
  misc_feature (1)..(478): Homolog of NCBI NO: 2119055 NR Description: signal recognition particle 54K protein - tomato
  misc_feature (1)..(476): Homolog of NCBI NO: 1711512 NR Description: SIGNAL RECOGNITION PARTICLE 54 KD PROTEIN 2
  misc_feature (1)..(478): Homolog of NCBI NO: 1711509 NR Description: SIGNAL RECOGNITION PARTICLE 54 KD PROTEIN 1
  misc_feature (1)..(476): Homolog of NCBI NO: 15239909 NR Description: SRP54 (signal recognition particle 54 KDa) protein id: At5g49500.1 [Arabidopsis thaliana] SRP54 (signal recognition particle 54 KDa) protein [Arabidopsis

SEQ ID NO: 95900 - protein, 463 aa, Arabidopsis thaliana; identical to SEQ ID NO: 35254
  peptide (1)..(463): Ceres Seq. ID no. 12731074
  misc_feature (311)..(412): Pfam Name: Signal peptide binding domain Pfam Description: Signal peptide binding domain
  misc_feature (1)..(463): Homolog of NCBI NO: 18394225 NR Description: expressed protein; protein id: At1g15310.1, by cDNA: 22158., supported by cDNA: gi_12745000 [Arabidopsis >gi|586036|sp|P37106|SR51_ARATH Signal recognition particle 54
  misc_feature (1)..(463): Homolog of NCBI NO: 18402407 NR Description: signal recognition particle 54 kDa protein 2 putative; protein id: At1g48900.1, supported by cDNA: supported by cDNA: gi_15810009, supported by cDNA: gi_17386101
  misc_feature (1)..(463): Homolog of NCBI NO: 515681 NR Description: signal recognition particle 54 kDa subunit
  misc_feature (147)..(463): Homolog of NCBI NO: 25294409 NR Description: hypothetical protein F27K7.8 [imported] - thaliana >gi|11094805|gb|AAG29734.1|AC084414_2 signal recognition
  misc_feature (1)..(147): Homolog of NCBI NO: 25294409 NR Description: hypothetical protein F27K7.8 [imported] - thaliana >gi|11094805|gb|AAG29734.1|AC084414_2 signal recognition
  misc_feature (1)..(460): Homolog of NCBI NO: 1711510 NR Description: Signal recognition particle 54 kDa protein 2 >gi|515679|gb|AAA66199.1| signal recognition particle 54 kDa
  misc_feature (1)..(462): Homolog of NCBI NO: 2119055 NR Description: signal recognition particle 54K protein - tomato
  misc_feature (1)..(460): Homolog of NCBI NO: 1711512 NR Description: SIGNAL RECOGNITION PARTICLE 54 KD PROTEIN 2
  misc_feature (1)..(462): Homolog of NCBI NO: 1711509 NR Description: SIGNAL RECOGNITION PARTICLE 54 KD PROTEIN 1
  misc_feature (1)..(460): Homolog of NCBI NO: 15239909 NR Description: SRP54 (signal recognition particle 54 KDa) protein id: At5g49500.1 [Arabidopsis thaliana] SRP54 (signal recognition particle 54 KDa) protein [Arabidopsis

SEQ ID NO: 95901 - protein, 428 aa, Arabidopsis thaliana; identical to SEQ ID NO: 35255
  peptide (1)..(428): Ceres Seq. ID no. 12731075
  misc_feature (276)..(377): Pfam Name: Signal peptide binding domain Pfam Description: Signal peptide binding domain
  misc_feature (1)..(428): Homolog of NCBI NO: 18394225 NR Description: expressed protein; protein id: At1g15310.1, by cDNA: 22158., supported by cDNA: gi_12745000 [Arabidopsis >gi|586036|sp|P37106|SR51_ARATH Signal recognition particle 54
  misc_feature (1)..(428): Homolog of NCBI NO: 18402407 NR Description: signal recognition particle 54 kDa protein 2 putative; protein id: At1g48900.1, supported by cDNA: supported by cDNA: gi_15810009, supported by cDNA: gi_17386101
  misc_feature (1)..(428): Homolog of NCBI NO: 515681 NR Description: signal recognition particle 54 kDa subunit
  misc_feature (112)..(428): Homolog of NCBI NO: 25294409 NR Description: hypothetical protein F27K7.8 [imported] - thaliana >gi|11094805|gb|AAG29734.1|AC084414_2 signal recognition
  misc_feature (1)..(112): Homolog of NCBI NO: 25294409 NR Description: hypothetical protein F27K7.8 [imported] - thaliana >gi|11094805|gb|AAG29734.1|AC084414_2 signal recognition
  misc_feature (1)..(425): Homolog of NCBI NO: 1711510 NR Description: Signal recognition particle 54 kDa protein 2 >gi|515679|gb|AAA66199.1| signal recognition particle 54 kDa
  misc_feature (1)..(427): Homolog of NCBI NO: 2119055 NR Description: signal recognition particle 54K protein - tomato
  misc_feature (1)..(425): Homolog of NCBI NO: 1711512 NR Description: SIGNAL RECOGNITION PARTICLE 54 KD PROTEIN 2
  misc_feature (1)..(427): Homolog of NCBI NO: 1711509 NR Description: SIGNAL RECOGNITION PARTICLE 54 KD PROTEIN 1
  misc_feature (1)..(425): Homolog of NCBI NO: 15239909 NR Description: SRP54 (signal recognition particle 54 KDa) protein id: At5g49500.1 [Arabidopsis thaliana] SRP54 (signal recognition particle 54 KDa) protein [Arabidopsis

SEQ ID NO: 95902 - DNA, 2649 bp, Arabidopsis thaliana
  misc_feature (1)..(2649): Ceres Seq. ID no. 12731090
  misc_feature: MA Experiment ID: 20000306 Result: Up-regulated in Transcription
  misc_feature: MA Experiment 20000306 PARAMETER Experiment Name: At_Germinating_Seeds_Sub_P Parameter: Age (hr) Value: 6 vs. 0
  misc_feature: MA Experiment 20000306 PARAMETER Experiment Name: At_Germinating_Seeds_Sub_P Parameter: Organism Value: A. thaliana
  misc_feature: MA Experiment 20000306 PARAMETER Experiment Name: At_Germinating_Seeds_Sub_P Parameter: Plant Line Value: WS
  misc_feature: MA Experiment 20000306 PARAMETER Experiment Name: At_Germinating_Seeds_Sub_P Parameter: Tissue Value: Germinating Seeds
  misc_feature: MA Experiment ID: 20000307 Result: Up-regulated in Transcription
  misc_feature: MA Experiment 20000307 PARAMETER Experiment Name: At_Germinating_Seeds_Sub_P Parameter: Age (hr) Value: 24 vs. 0
  misc_feature: MA Experiment 20000307 PARAMETER Experiment Name: At_Germinating_Seeds_Sub_P Parameter: Organism Value: A. thaliana
  misc_feature: MA Experiment 20000307 PARAMETER Experiment Name: At_Germinating_Seeds_Sub_P Parameter: Plant Line Value: WS
  misc_feature: MA Experiment 20000307 PARAMETER Experiment Name: At_Germinating_Seeds_Sub_P Parameter: Tissue Value: Germinating Seeds
  misc_feature: MA Experiment ID: 20000328 Result: Down-regulated in Transcription
  misc_feature: MA Experiment 20000328 PARAMETER Experiment Name: At_42deg_Heat_Sub_P Parameter: Age (day) Value: 14
  misc_feature: MA Experiment 20000328 PARAMETER Experiment Name: At_42deg_Heat_Sub_P Parameter: Organism Value: A. thaliana
  misc_feature: MA Experiment 20000328 PARAMETER Experiment Name: At_42deg_Heat_Sub_P Parameter: Plant Line Value: WS
  misc_feature: MA Experiment 20000328 PARAMETER Experiment Name: At_42deg_Heat_Sub_P Parameter: Temperature (deg C) Value: 42 vs. 22
  misc_feature: MA Experiment 20000328 PARAMETER Experiment Name: At_42deg_Heat_Sub_P Parameter: Timepoint (hr) Value: 6
  misc_feature: MA Experiment 20000328 PARAMETER Experiment Name: At_42deg_Heat_Sub_P Parameter: Tissue Value: Aerial
  misc_feature: MA Experiment ID: 20000440 Result: Up-regulated in Transcription
  misc_feature: MA Experiment 20000440 PARAMETER Experiment Name: At_Closed-Flower__Sub_P Parameter: Tissue Value: Closed Flower vs. Whole Plant
aaacaaaaaaaagaacagaagaaaacggaagtttttgtttctggagagaaaaccaaaaagttcattttgtttttctctatttcgtctttcctgcgattctgaatatcactcttcttcaatctctttgtcagaatcgtagcattggcttgtgagctttgatccttctttctttttttcttcccgtttgtgaaaaaagagagactagtatttatcatcgttgtcaccgccgatctgtcgtcggcagatggcaaaaccattacttttacctccaattaataacccggattcgttggattgttggacgtctctgtttcttctatctagtgtttcaactccggcatagaaaggatctgatttggttaatctcagagccctttttgtagacacattgtaaaatttgaattggtgaggaggagttagagccgtccgattggggtttgacccgattgaagcggagaggatggcaaaaagttggtttttggttgagaaggcgagaagatgtttgaggacggtgttcttcatggttgctatgttggcttcgctgctagtttcctcgttgccattgttagtagctataggtgatgtgttggttcccagcttcttgttgtcgagctttacttgtgtgacgtgttacggcgccaaggagcatctgaggcgatacggtttcaagagatctttgactgatattcctatcgtctctgttgtcagatctttccttgtcatctgtatctatttactctcggacgttcctgctctctcgcacggtccttaccttggaactgtatctctgtgttctgtggtttcggttcttcttctttcagttaaagcttgccttttcactgttaattctcaactcaacaacgaagcctcgttctctccatctaggaaacggctccacctgaagaagtcgtgggggatgccggttttgttcctctcatctgtggtttttgcccttggtcatacggttgtagcatacaggacaagttgcagagcgaggaggaaaattttgtatcaccgagttgaccctgaagctgttctttcatgcaaaagcatcttctctggccaccagaaagtcccgcggtcacccactcctgtggttggaaaggcctccaagtttgatggagaagcaaggcgaaagcctttgtcccacgatgaaggagagcttccagtgagattgcttgctgatgttgacagtttattcgttacaatccgaggcctcactgtgcattacaagctttgttcacctggttcacctcggcagtctatctcctcaaatgttctcgaagccaattctagttacaatacgccagagataatggcaggaaggtcgaagtttgacagaaaagtgttgagtatggtcaccaaaagccagcatcatcatcaccacaggagctacaacagtttgtttaacaattcttccttgcacgaccctcttctggatggttctcctacttctcctcttcttttcaaagagattaaggaaggaacgggactagtggatgacatgaatgtattcaattttggagctgaggagcaagacttgggtgaaagtggtcagtttggtgtggtcctggttcatggatttggaggaggagtgttttcttggaggcatgtgatgggttcactggctcagcagcttggttgtgttgtcactgcatttgataggcctggttggggattaacggccaggccacataagaatgatttggaagaaagacagctgctcaatccttattcactcgaaaatcaggtagagatgcttattgctttctgttatgagatggggttctcttcagtagtatttgttggtcatgatgacggaggtctacttgctctcaaagctgcacaaagattgatggcaacaaacgatcccatcaaagtcgtggtcaaaggagttgtcttgcttaatactagcttatcaagggaagtagttccagcttttgcaagaatacttctgcacacatcactagggaagaagcacctcgttcgccctcttttacgcactgagatagctcaggtggtgaatcgccgtgcttggtatgatcctgccaagatgactacagacgtcctacggctatacaaggccccattacacgtagaaggctgggatgaggcacttcatgagataggtagactttcatctgagatggtgcttgcacctcaaaatgcagcttcgcttctgaaggctgttgaaaacctgccagtgctagtcattgctggggccgaagacgcccttgtgccattgaagtcctcccaaggaatggcttctaaactccttaactctagactagtagcaatctcaggatgtgggcatttaccacatgaggagtgtcccaaggcgcttcttgcagccatgtccccgttcatcactagacttgtaattaggccagatctccagagtcaatagccagatcacttgtttttcttgtcgtcttcttagcttacaatcgattagtgtcgcccaaaaatttgaggccctgctaggtaaattcatctaatgagtgttgtaacctttcccttctcttgtgttttgtatgattcgagggtgattttatttattaaacacttgaagatgagtgtggcacagaatcgtgcaagtctctgtaaatttatccggtttggaatacgaagtaaattgctttcgtttgc

SEQ ID NO: 95903 - protein, 648 aa, Arabidopsis thaliana
  peptide (1)..(648): Ceres Seq. ID no. 12731091
  misc_feature (395)..(634): Pfam Name: alpha/beta hydrolase fold Pfam Description: alpha/beta hydrolase fold
  misc_feature (1)..(644): Homolog of NCBI NO: 15220097 NR Description: unknown protein; protein id: At1g80280.1, by cDNA: gi_20466449 [Arabidopsis thaliana]
  misc_feature (21)..(644): Homolog of NCBI NO: 34911750 NR Description: P0038D11.18 [Oryza sativa (japonica
  misc_feature (18)..(640): Homolog of NCBI NO: 25405595 NR Description: unknown protein, 18223-15857 [imported] -
  misc_feature (110)..(640): Homolog of NCBI NO: 22330208 NR Description: unknown protein; protein id: At1g52750.1, by cDNA: gi_19310417 [Arabidopsis thaliana] At1g52750/F14G24_2 [Arabidopsis thaliana]
  misc_feature (1)..(205): Homolog of NCBI NO: 30688139 NR Description: expressed protein [Arabidopsis thaliana] unknown protein [Arabidopsis thaliana]
  misc_feature (1)..(205): Homolog of NCBI NO: 30694339 NR Description: expressed protein [Arabidopsis thaliana] putative protein [Arabidopsis thaliana]
  misc_feature (475)..(636): Homolog of NCBI NO: 6630546 NR Description: putative alpha/beta hydrolase [Arabidopsis
  misc_feature (345)..(461): Homolog of NCBI NO: 6630546 NR Description: putative alpha/beta hydrolase [Arabidopsis
  misc_feature (475)..(636): Homolog of NCBI NO: 30681503 NR Description: hydrolase, alpha/beta fold family [Arabidopsis >gi|26450364|dbj|BAC42298.1| putative alpha/beta hydrolase
  misc_feature (345)..(461): Homolog of NCBI NO: 30681503 NR Description: hydrolase, alpha/beta fold family [Arabidopsis >gi|26450364|dbj|BAC42298.1| putative alpha/beta hydrolase
MAKSWFLVEKARRCLRTVFFMVAMLASLLVSSLPLLVAIGDVLVPSFLLSSFTCVTCYGAKEHLRRYGFKRSLTDIPIVSVVRSFLVICIYLLSDVPALSHGPYLGTVSLCSVVSVLLLSVKACLFTVNSQLNNEASFSPSRKRLHLKKSWGMPVLFLSSVVFALGHTVVAYRTSCRARRKILYHRVDPEAVLSCKSIFSGHQKVPRSPTPVVGKASKFDGEARRKPLSHDEGELPVRLLADVDSLFVTIRGLTVHYKLCSPGSPRQSISSNVLEANSSYNTPEIMAGRSKFDRKVLSMVTKSQHHHHHRSYNSLFNNSSLHDPLLDGSPTSPLLFKEIKEGTGLVDDMNVFNFGAEEQDLGESGQFGVVLVHGFGGGVFSWRHVMGSLAQQLGCVVTAFDRPGWGLTARPHKNDLEERQLLNPYSLENQVEMLIAFCYEMGFSSVVFVGHDDGGLLALKAAQRLMATNDPIKVVVKGVVLLNTSLSREVVPAFARILLHTSLGKKHLVRPLLRTEIAQVVNRRAWYDPAKMTTDVLRLYKAPLHVEGWDEALHEIGRLSSEMVLAPQNAASLLKAVENLPVLVIAGAEDALVPLKSSQGMASKLLNSRLVAISGCGHLPHEECPKALLAAMSPFITRLVIRPDLQSQ

SEQ ID NO: 95904 - protein, 628 aa, Arabidopsis thaliana
  peptide (1)..(628): Ceres Seq. ID no. 12731092
  misc_feature (375)..(614): Pfam Name: alpha/beta hydrolase fold Pfam Description: alpha/beta hydrolase fold
  misc_feature (1)..(624): Homolog of NCBI NO: 15220097 NR Description: unknown protein; protein id: At1g80280.1, by cDNA: gi_20466449 [Arabidopsis thaliana]
  misc_feature (1)..(624): Homolog of NCBI NO: 34911750 NR Description: P0038D11.18 [Oryza sativa (japonica
  misc_feature (1)..(620): Homolog of NCBI NO: 25405595 NR Description: unknown protein, 18223-15857 [imported] -
  misc_feature (90)..(620): Homolog of NCBI NO: 22330208 NR Description: unknown protein; protein id: At1g52750.1, by cDNA: gi_19310417 [Arabidopsis thaliana] At1g52750/F14G24_2 [Arabidopsis thaliana]
  misc_feature (1)..(185): Homolog of NCBI NO: 30688139 NR Description: expressed protein [Arabidopsis thaliana] unknown protein [Arabidopsis thaliana]
  misc_feature (1)..(185): Homolog of NCBI NO: 30694339 NR Description: expressed protein [Arabidopsis thaliana] putative protein [Arabidopsis thaliana]
  misc_feature (455)..(616): Homolog of NCBI NO: 6630546 NR Description: putative alpha/beta hydrolase [Arabidopsis
  misc_feature (325)..(441): Homolog of NCBI NO: 6630546 NR Description: putative alpha/beta hydrolase [Arabidopsis
  misc_feature (455)..(616): Homolog of NCBI NO: 30681503 NR Description: hydrolase, alpha/beta fold family [Arabidopsis >gi|26450364|dbj|BAC42298.1| putative alpha/beta hydrolase
  misc_feature (325)..(441): Homolog of NCBI NO: 30681503 NR Description: hydrolase, alpha/beta fold family [Arabidopsis >gi|26450364|dbj|BAC42298.1| putative alpha/beta hydrolase
MVAMLASLLVSSLPLLVAIGDVLVPSFLLSSFTCVTCYGAKEHLRRYGFKRSLTDIPIVSVVRSFLVICIYLLSDVPALSHGPYLGTVSLCSVVSVLLLSVKACLFTVNSQLNNEASFSPSRKRLHLKKSWGMPVLFLSSVVFALGHTVVAYRTSCRARRKILYHRVDPEAVLSCKSIFSGHQKVPRSPTPVVGKASKFDGEARRKPLSHDEGELPVRLLADVDSLFVTIRGLTVHYKLCSPGSPRQSISSNVLEANSSYNTPEIMAGRSKFDRKVLSMVTKSQHHHHHRSYNSLFNNSSLHDPLLDGSPTSPLLFKEIKEGTGLVDDMNVFNFGAEEQDLGESGQFGVVLVHGFGGGVFSWRHVMGSLAQQLGCVVTAFDRPGWGLTARPHKNDLEERQLLNPYSLENQVEMLIAFCYEMGFSSVVFVGHDDGGLLALKAAQRLMATNDPIKVVVKGVVLLNTSLSREVVPAFARILLHTSLGKKHLVRPLLRTEIAQVVNRRAWYDPAKMTTDVLRLYKAPLHVEGWDEALHEIGRLSSEMVLAPQNAASLLKAVENLPVLVIAGAEDALVPLKSSQGMASKLLNSRLVAISGCGHLPHEECPKALLAAMSPFITRLVIRPDLQSQ

SEQ ID NO: 95905 - protein, 625 aa, Arabidopsis thaliana
  peptide (1)..(625): Ceres Seq. ID no. 12731093
  misc_feature (372)..(611): Pfam Name: alpha/beta hydrolase fold Pfam Description: alpha/beta hydrolase fold
  misc_feature (1)..(621): Homolog of NCBI NO: 15220097 NR Description: unknown protein; protein id: At1g80280.1, by cDNA: gi_20466449 [Arabidopsis thaliana]
  misc_feature (1)..(621): Homolog of NCBI NO: 34911750 NR Description: P0038D11.18 [Oryza sativa (japonica
  misc_feature (1)..(617): Homolog of NCBI NO: 25405595 NR Description: unknown protein, 18223-15857 [imported] -
  misc_feature (87)..(617): Homolog of NCBI NO: 22330208 NR Description: unknown protein; protein id: At1g52750.1, by cDNA: gi_19310417 [Arabidopsis thaliana] At1g52750/F14G24_2 [Arabidopsis thaliana]
  misc_feature (1)..(182): Homolog of NCBI NO: 30688139 NR Description: expressed protein [Arabidopsis thaliana] unknown protein [Arabidopsis thaliana]
  misc_feature (1)..(182): Homolog of NCBI NO: 30694339 NR Description: expressed protein [Arabidopsis thaliana] putative protein [Arabidopsis thaliana]
  misc_feature (452)..(613): Homolog of NCBI NO: 6630546 NR Description: putative alpha/beta hydrolase [Arabidopsis
  misc_feature (322)..(438): Homolog of NCBI NO: 6630546 NR Description: putative alpha/beta hydrolase [Arabidopsis
  misc_feature (452)..(613): Homolog of NCBI NO: 30681503 NR Description: hydrolase, alpha/beta fold family [Arabidopsis >gi|26450364|dbj|BAC42298.1| putative alpha/beta hydrolase
  misc_feature (322)..(438): Homolog of NCBI NO: 30681503 NR Description: hydrolase, alpha/beta fold family [Arabidopsis >gi|26450364|dbj|BAC42298.1| putative alpha/beta hydrolase
MLASLLVSSLPLLVAIGDVLVPSFLLSSFTCVTCYGAKEHLRRYGFKRSLTDIPIVSVVRSFLVICIYLLSDVPALSHGPYLGTVSLCSVVSVLLLSVKACLFTVNSQLNNEASFSPSRKRLHLKKSWGMPVLFLSSVVFALGHTVVAYRTSCRARRKILYHRVDPEAVLSCKSIFSGHQKVPRSPTPVVGKASKFDGEARRKPLSHDEGELPVRLLADVDSLFVTIRGLTVHYKLCSPGSPRQSISSNVLEANSSYNTPEIMAGRSKFDRKVLSMVTKSQHHHHHRSYNSLFNNSSLHDPLLDGSPTSPLLFKEIKEGTGLVDDMNVFNFGAEEQDLGESGQFGVVLVHGFGGGVFSWRHVMGSLAQQLGCVVTAFDRPGWGLTARPHKNDLEERQLLNPYSLENQVEMLIAFCYEMGFSSVVFVGHDDGGLLALKAAQRLMATNDPIKVVVKGVVLLNTSLSREVVPAFARILLHTSLGKKHLVRPLLRTEIAQVVNRRAWYDPAKMTTDVLRLYKAPLHVEGWDEALHEIGRLSSEMVLAPQNAASLLKAVENLPVLVIAGAEDALVPLKSSQGMASKLLNSRLVAISGCGHLPHEECPKALLAAMSPFITRLVIRPDLQSQ

SEQ ID NO: 95906 - DNA, 2601 bp, Arabidopsis thaliana
  misc_feature (1)..(2601): Ceres Seq. ID no. 12731094
  misc_feature: MA Experiment ID: 20000527 Result: Up-regulated in Transcription
  misc_feature: MA Experiment 20000527 PARAMETER Experiment Name: At_10percent_PEG_P Parameter: Age (day) Value: 20
  misc_feature: MA Experiment 20000527 PARAMETER Experiment Name: At_10percent_PEG_P Parameter: Organism Value: A. thaliana
  misc_feature: MA Experiment 20000527 PARAMETER Experiment Name: At_10percent_PEG_P Parameter: Plant Line Value: WS
  misc_feature: MA Experiment 20000527 PARAMETER Experiment Name: At_10percent_PEG_P Parameter: Timepoint (day) Value: 20
  misc_feature: MA Experiment 20000527 PARAMETER Experiment Name: At_10percent_PEG_P Parameter: Tissue Value: Whole Plant
  misc_feature: MA Experiment 20000527 PARAMETER Experiment Name: At_10percent_PEG_P Parameter: Treatment Value: 10percent PEG vs. No Treatment
  misc_feature: MA Experiment ID: 20001556 Result: Up-regulated in Transcription
  misc_feature: MA Experiment 20001556 PARAMETER Experiment Name: At_Drought_Soil_Dry_P Parameter: Age (day) Value: 26
  misc_feature: MA Experiment 20001556 PARAMETER Experiment Name: At_Drought_Soil_Dry_P Parameter: Organism Value: A. thaliana
  misc_feature: MA Experiment 20001556 PARAMETER Experiment Name: At_Drought_Soil_Dry_P Parameter: Plant Line Value: WS
  misc_feature: MA Experiment 20001556 PARAMETER Experiment Name: At_Drought_Soil_Dry_P Parameter: Post Timepoint (hr) Value: None
  misc_feature: MA Experiment 20001556 PARAMETER Experiment Name: At_Drought_Soil_Dry_P Parameter: Post-Treatment Value: None
  misc_feature: MA Experiment 20001556 PARAMETER Experiment Name: At_Drought_Soil_Dry_P Parameter: Timepoint (day) Value: 12
  misc_feature: MA Experiment 20001556 PARAMETER Experiment Name: At_Drought_Soil_Dry_P Parameter: Treatment Value: Drought vs. No Drought
  misc_feature: MA Experiment ID: 20001557 Result: Up-regulated in Transcription
  misc_feature: MA Experiment 20001557 PARAMETER Experiment Name: At_Drought_Soil_Dry_P Parameter: Age (day) Value: 27
  misc_feature: MA Experiment 20001557 PARAMETER Experiment Name: At_Drought_Soil_Dry_P Parameter: Organism Value: A. thaliana
  misc_feature: MA Experiment 20001557 PARAMETER Experiment Name: At_Drought_Soil_Dry_P Parameter: Plant Line Value: WS
  misc_feature: MA Experiment 20001557 PARAMETER Experiment Name: At_Drought_Soil_Dry_P Parameter: Post Timepoint (hr) Value: 3
  misc_feature: MA Experiment 20001557 PARAMETER Experiment Name: At_Drought_Soil_Dry_P Parameter: Post-Treatment Value: Re-Water vs. No Drought
  misc_feature: MA Experiment 20001557 PARAMETER Experiment Name: At_Drought_Soil_Dry_P Parameter: Timepoint (day) Value: 13
  misc_feature: MA Experiment 20001557 PARAMETER Experiment Name: At_Drought_Soil_Dry_P Parameter: Treatment Value: Drought vs. No Drought
  misc_feature: MA Experiment ID: 20001558 Result: Up-regulated in Transcription
  misc_feature: MA Experiment 20001558 PARAMETER Experiment Name: At_Drought_Soil_Dry_P Parameter: Age (day) Value: 27
  misc_feature: MA Experiment 20001558 PARAMETER Experiment Name: At_Drought_Soil_Dry_P Parameter: Organism Value: A. thaliana
  misc_feature: MA Experiment 20001558 PARAMETER Experiment Name: At_Drought_Soil_Dry_P Parameter: Plant Line Value: WS
  misc_feature: MA Experiment 20001558 PARAMETER Experiment Name: At_Drought_Soil_Dry_P Parameter: Post Timepoint (hr) Value: 6
  misc_feature: MA Experiment 20001558 PARAMETER Experiment Name: At_Drought_Soil_Dry_P Parameter: Post-Treatment Value: Re-Water vs. No Drought
  misc_feature: MA Experiment 20001558 PARAMETER Experiment Name: At_Drought_Soil_Dry_P Parameter: Timepoint (day) Value: 13
  misc_feature: MA Experiment 20001558 PARAMETER Experiment Name: At_Drought_Soil_Dry_P Parameter: Treatment Value: Drought vs. No Drought
  misc_feature: MA Experiment ID: 20001757 Result: Up-regulated in Transcription
  misc_feature: MA Experiment 20001757 PARAMETER Experiment Name: At_50mM_NH4NO3_L-to-H_P Parameter: Timepoint (hr) Value: 6
  misc_feature: MA Experiment 20001757 PARAMETER Experiment Name: At_50mM_NH4NO3_L-to-H_P Parameter: Tissue Value: Leaf
  misc_feature: MA Experiment 20001757 PARAMETER Experiment Name: At_50mM_NH4NO3_L-to-H_P Parameter: Treatment Value: 50mM NH4NO3 vs 100mM Mannitol
atggcgtcttctgctcaaagtcctcatttttatctcaatccaggcaagtccaactcttttcagagcaaagcttataaacagagaaacgttaatttctattggaattttggaattcggagacttttcttgagaaaatctcaaggactatctgttcttagctcgagttcgagtagtacccacttttcgaattctcagttacatggactctgcgcgaatgggaagctggaggaagctatgaagcttctcaattctatgcaggagttgcgggttgcggtagacgaagatgtgtttgtggctttggttaggctgtgcgagtggaagagagcacaggaggaaggttctaaggtttattctattgctctcagttccatgagcagtcttggtgttgaactcggtaacgcgtttctcgctatgtttgtgaggtttggtaatttggttgatgcctggtatgtttttggtaaaatgtctgagagaaacttgttttcttggaatgtgttggttggtggctatgcaaagcaaggctatttcgatgaggctatgtgtttgtatcatagaatgttgtgggttggtggtgtgaagcctgatgtctatacgttcccctgtgtgttgagaacctgtggaggtatacctgatctagctcgaggaaaagaggttcatgttcatgtggttcgatacggatatgaattggatattgatgtggttaacgctttgattactatgtatgtgaagtgtggtgatgtgaagagcgcgaggttgctttttgatagaatgcctaggagagatataatctcatggaacgcaatgatctcagggtattttgagaatgggatgtgtcatgaaggattggagttattctttgcaatgcgtgggctttccgttgatcctgatttgatgaccttgactagtgttatctctgcctgtgagcttcttggagatagaaggttaggaagggatattcatgcgtatgtgataaccacgggtttcgctgttgacatatctgtctgcaactctttaacgcagatgtacttaaatgctgggtcatggcgtgaagctgaaaaactgttcagcagaatggagcgcaaagacattgtgtcatggaccactatgatttcaggctatgaatataattttctgcccgataaggccatagacacttacagaatgatggatcaagattctgtgaagccagacgagataacagtagctgctgttctatctgcttgtgctactctaggtgatcttgacactggtgttgagctccataagcttgcgattaaggcaaggctcatatcctatgtgattgtcgcaaacaatctcattaatatgtactcaaagtgcaaatgcattgataaggccttggatatcttccataacatcccccgcaagaatgtaatatcttggacatcgattattgcagggcttcgactcaacaaccggtgttttgaggccttgatattcctccggcaaatgaaaatgacgttgcagccaaatgcaataaccttaacagctgcattagcagcttgtgctagaatcggggctctgatgtgtgggaaagagattcatgcccatgtactgagaacaggagtggggcttgatgattttcttccaaatgcactcttagacatgtatgtacggtgcgggagaatgaacactgcttggagtcagttcaactcacagaaaaaagatgtcacatcatggaacattcttcttactggatattcagagcggggtcaagggtcgatggtggtagagttatttgatagaatggttaagtccagagtaaggccagatgagattacattcatctcattgttatgtggttgtagcaaatcccaaatggtgagacaaggtttgatgtactttagcaaaatggaggattatggtgttaccccaaacttgaagcactatgcgtgcgtggttgatttgctaggccgtgcaggcgagttacaagaagcacacaagtttattcagaaaatgccagtaacaccagatccagccgtatggggagctttgcttaatgcatgcaggattcaccacaaaattgatcttggtgagctatcagcgcaacatatatttgagctggacaagaaaagtgttggctattacattctgttatgtaatctgtatgctgattgtggaaaatggagagaagttgcaaaagtgagaagaatgatgaaagaaaacgggctaacagttgatgcaggatgcagttgggttgaagtaaagggtaaagttcacgcctttcttagcgatgacaagtaccatcctcaaacaaaagagatcaacactgttttagaggggttctatgagaaaatgagtgaagttgggcttactaaaatttcagaatcgagttctatggatgagacagagatttcgagagatgagatattctgtggacatagcgagagaaaggccattgcatttggtctgatcaacacggtcccaggaatgccaatttgggtaacaaagaatctcagtatgtgtgaaaattgccatgatacagtaaagttcatctccaaaacagtaagaagagaaatctcagtaagagatgctgagcatttccaccactttaaagatggagaatgttcatgtggagattag

SEQ ID NO: 95907 - protein, 866 aa, Arabidopsis thaliana
  peptide (1)..(866): Ceres Seq. ID no. 12731095
  misc_feature (161)..(195): Pfam Name: PPR repeat Pfam Description: PPR repeat
  misc_feature (4)..(864): Homolog of NCBI NO: 15234006 NR Description: putative protein; protein id: At4g18750.1
  misc_feature (63)..(864): Homolog of NCBI NO: 34903762 NR Description: unnamed protein product [Oryza sativa (japonica group)] >gi|7340873|dbj|BAA92963.1| unnamed protein product
  misc_feature (113)..(866): Homolog of NCBI NO: 34915012 NR Description: P0458A05.10 [Oryza sativa (japonica
  misc_feature (136)..(866): Homolog of NCBI NO: 15220337 NR Description: hypothetical protein; protein id: At1g11290.1
  misc_feature (138)..(866): Homolog of NCBI NO: 18418348 NR Description: putative protein; protein id: At4g33990.1
  misc_feature (64)..(866): Homolog of NCBI NO: 15236324 NR Description: putative protein; protein id: At4g13650.1
  misc_feature (42)..(866): Homolog of NCBI NO: 15228590 NR Description: hypothetical protein; protein id: At3g03580.1 thaliana] >gi|6091764|gb|AAF03474.1|AC009327_13 hypothetical [Arabidopsis thaliana] >gi|28393735|gb|AAO42278.1| unknown
  misc_feature (59)..(866): Homolog of NCBI NO: 38606535 NR Description: OSJNBa0016O02.23 [Oryza sativa (japonica
  misc_feature (147)..(866): Homolog of NCBI NO: 15236277 NR Description: putative protein; protein id: At4g35130.1
  misc_feature (121)..(866): Homolog of NCBI NO: 34912228 NR Description: P0415C01.16 [Oryza sativa (japonica
MASSAQSPHFYLNPGKSNSFQSKAYKQRNVNFYWNFGIRRLFLRKSQGLSVLSSSSSSTHFSNSQLHGLCANGKLEEAMKLLNSMQELRVAVDEDVFVALVRLCEWKRAQEEGSKVYSIALSSMSSLGVELGNAFLAMFVRFGNLVDAWYVFGKMSERNLFSWNVLVGGYAKQGYFDEAMCLYHRMLWVGGVKPDVYTFPCVLRTCGGIPDLARGKEVHVHVVRYGYELDIDVVNALITMYVKCGDVKSARLLFDRMPRRDIISWNAMISGYFENGMCHEGLELFFAMRGLSVDPDLMTLTSVISACELLGDRRLGRDIHAYVITTGFAVDISVCNSLTQMYLNAGSWREAEKLFSRMERKDIVSWTTMISGYEYNFLPDKAIDTYRMMDQDSVKPDEITVAAVLSACATLGDLDTGVELHKLAIKARLISYVIVANNLINMYSKCKCIDKALDIFHNIPRKNVISWTSIIAGLRLNNRCFEALIFLRQMKMTLQPNAITLTAALAACARIGALMCGKEIHAHVLRTGVGLDDFLPNALLDMYVRCGRMNTAWSQFNSQKKDVTSWNILLTGYSERGQGSMVVELFDRMVKSRVRPDEITFISLLCGCSKSQMVRQGLMYFSKMEDYGVTPNLKHYACVVDLLGRAGELQEAHKFIQKMPVTPDPAVWGALLNACRIHHKIDLGELSAQHIFELDKKSVGYYILLCNLYADCGKWREVAKVRRMMKENGLTVDAGCSWVEVKGKVHAFLSDDKYHPQTKEINTVLEGFYEKMSEVGLTKISESSSMDETEISRDEIFCGHSERKAIAFGLINTVPGMPIWVTKNLSMCENCHDTVKFISKTVRREISVRDAEHFHHFKDGECSCGD

SEQ ID NO: 95908 - protein, 788 aa, Arabidopsis thaliana
  peptide (1)..(788): Ceres Seq. ID no. 12731096
  misc_feature (83)..(117): Pfam Name: PPR repeat Pfam Description: PPR repeat
  misc_feature (1)..(786): Homolog of NCBI NO: 15234006 NR Description: putative protein; protein id: At4g18750.1
  misc_feature (1)..(786): Homolog of NCBI NO: 34903762 NR Description: unnamed protein product [Oryza sativa (japonica group)] >gi|7340873|dbj|BAA92963.1| unnamed protein product
  misc_feature (35)..(788): Homolog of NCBI NO: 34915012 NR Description: P0458A05.10 [Oryza sativa (japonica
  misc_feature (58)..(788): Homolog of NCBI NO: 15220337 NR Description: hypothetical protein; protein id: At1g11290.1
  misc_feature (60)..(788): Homolog of NCBI NO: 18418348 NR Description: putative protein; protein id: At4g33990.1
  misc_feature (1)..(788): Homolog of NCBI NO: 15236324 NR Description: putative protein; protein id: At4g13650.1
  misc_feature (1)..(788): Homolog of NCBI NO: 15228590 NR Description: hypothetical protein; protein id: At3g03580.1 thaliana] >gi|6091764|gb|AAF03474.1|AC009327_13 hypothetical [Arabidopsis thaliana] >gi|28393735|gb|AAO42278.1| unknown
  misc_feature (1)..(788): Homolog of NCBI NO: 38606535 NR Description: OSJNBa0016O02.23 [Oryza sativa (japonica
  misc_feature (69)..(788): Homolog of NCBI NO: 15236277 NR Description: putative protein; protein id: At4g35130.1
  misc_feature (43)..(788): Homolog of NCBI NO: 34912228 NR Description: P0415C01.16 [Oryza sativa (japonica
MKLLNSMQELRVAVDEDVFVALVRLCEWKRAQEEGSKVYSIALSSMSSLGVELGNAFLAMFVRFGNLVDAWYVFGKMSERNLFSWNVLVGGYAKQGYFDEAMCLYHRMLWVGGVKPDVYTFPCVLRTCGGIPDLARGKEVHVHVVRYGYELDIDVVNALITMYVKCGDVKSARLLFDRMPRRDIISWNAMISGYFENGMCHEGLELFFAMRGLSVDPDLMTLTSVISACELLGDRRLGRDIHAYVITTGFAVDISVCNSLTQMYLNAGSWREAEKLFSRMERKDIVSWTTMISGYEYNFLPDKAIDTYRMMDQDSVKPDEITVAAVLSACATLGDLDTGVELHKLAIKARLISYVIVANNLINMYSKCKCIDKALDIFHNIPRKNVISWTSIIAGLRLNNRCFEALIFLRQMKMTLQPNAITLTAALAACARIGALMCGKEIHAHVLRTGVGLDDFLPNALLDMYVRCGRMNTAWSQFNSQKKDVTSWNILLTGYSERGQGSMVVELFDRMVKSRVRPDEITFISLLCGCSKSQMVRQGLMYFSKMEDYGVTPNLKHYACVVDLLGRAGELQEAHKFIQKMPVTPDPAVWGALLNACRIHHKIDLGELSAQHIFELDKKSVGYYILLCNLYADCGKWREVAKVRRMMKENGLTVDAGCSWVEVKGKVHAFLSDDKYHPQTKEINTVLEGFYEKMSEVGLTKISESSSMDETEISRDEIFCGHSERKAIAFGLINTVPGMPIWVTKNLSMCENCHDTVKFISKTVRREISVRDAEHFHHFKDGECSCGD

SEQ ID NO: 95909 - protein, 782 aa, Arabidopsis thaliana
  peptide (1)..(782): Ceres Seq. ID no. 12731097
  misc_feature (77)..(111): Pfam Name: PPR repeat Pfam Description: PPR repeat
  misc_feature (1)..(780): Homolog of NCBI NO: 15234006 NR Description: putative protein; protein id: At4g18750.1
  misc_feature (1)..(780): Homolog of NCBI NO: 34903762 NR Description: unnamed protein product [Oryza sativa (japonica group)] >gi|7340873|dbj|BAA92963.1| unnamed protein product
  misc_feature (29)..(782): Homolog of NCBI NO: 34915012 NR Description: P0458A05.10 [Oryza sativa (japonica
  misc_feature (52)..(782): Homolog of NCBI NO: 15220337 NR Description: hypothetical protein; protein id: At1g11290.1
  misc_feature (54)..(782): Homolog of NCBI NO: 18418348 NR Description: putative protein; protein id: At4g33990.1
  misc_feature (1)..(782): Homolog of NCBI NO: 15236324 NR Description: putative protein; protein id: At4g13650.1
  misc_feature (1)..(782): Homolog of NCBI NO: 15228590 NR Description: hypothetical protein; protein id: At3g03580.1 thaliana] >gi|6091764|gb|AAF03474.1|AC009327_13 hypothetical [Arabidopsis thaliana] >gi|28393735|gb|AAO42278.1| unknown
  misc_feature (1)..(782): Homolog of NCBI NO: 38606535 NR Description: OSJNBa0016O02.23 [Oryza sativa (japonica
  misc_feature (63)..(782): Homolog of NCBI NO: 15236277 NR Description: putative protein; protein id: At4g35130.1
  misc_feature (37)..(782): Homolog of NCBI NO: 34912228 NR Description: P0415C01.16 [Oryza sativa (japonica
MQELRVAVDEDVFVALVRLCEWKRAQEEGSKVYSIALSSMSSLGVELGNAFLAMFVRFGNLVDAWYVFGKMSERNLFSWNVLVGGYAKQGYFDEAMCLYHRMLWVGGVKPDVYTFPCVLRTCGGIPDLARGKEVHVHVVRYGYELDIDVVNALITMYVKCGDVKSARLLFDRMPRRDIISWNAMISGYFENGMCHEGLELFFAMRGLSVDPDLMTLTSVISACELLGDRRLGRDIHAYVITTGFAVDISVCNSLTQMYLNAGSWREAEKLFSRMERKDIVSWTTMISGYEYNFLPDKAIDTYRMMDQDSVKPDEITVAAVLSACATLGDLDTGVELHKLAIKARLISYVIVANNLINMYSKCKCIDKALDIFHNIPRKNVISWTSIIAGLRLNNRCFEALIFLRQMKMTLQPNAITLTAALAACARIGALMCGKEIHAHVLRTGVGLDDFLPNALLDMYVRCGRMNTAWSQFNSQKKDVTSWNILLTGYSERGQGSMVVELFDRMVKSRVRPDEITFISLLCGCSKSQMVRQGLMYFSKMEDYGVTPNLKHYACVVDLLGRAGELQEAHKFIQKMPVTPDPAVWGALLNACRIHHKIDLGELSAQHIFELDKKSVGYYILLCNLYADCGKWREVAKVRRMMKENGLTVDAGCSWVEVKGKVHAFLSDDKYHPQTKEINTVLEGFYEKMSEVGLTKISESSSMDETEISRDEIFCGHSERKAIAFGLINTVPGMPIWVTKNLSMCENCHDTVKFISKTVRREISVRDAEHFHHFKDGECSCGD

SEQ ID NO: 95910 - DNA, 1971 bp, Arabidopsis thaliana
  misc_feature (1)..(1971): Ceres Seq. ID no. 12731102
  misc_feature: MA Experiment ID: 20000185 Result: Down-regulated in Transcription
  misc_feature: MA Experiment 20000185 PARAMETER Experiment Name: At_Roots__P Parameter: Age (day) Value: 7 vs. 21
  misc_feature: MA Experiment 20000185 PARAMETER Experiment Name: At_Roots__P Parameter: Organism Value: A. thaliana
  misc_feature: MA Experiment 20000185 PARAMETER Experiment Name: At_Roots__P Parameter: Tissue Value: Roots vs. Whole Plant
  misc_feature: MA Experiment ID: 20000574 Result: Up-regulated in Transcription
  misc_feature: MA Experiment 20000574 PARAMETER Experiment Name: At_100uM_ABA_Mutants__P Parameter: Organism Value: A. thaliana
  misc_feature: MA Experiment 20000574 PARAMETER Experiment Name: At_100uM_ABA_Mutants__P Parameter: Plant Line Value: CS23 vs. Ler wt
  misc_feature: MA Experiment 20000574 PARAMETER Experiment Name: At_100uM_ABA_Mutants__P Parameter: Timepoint (hr) Value: N/A
  misc_feature: MA Experiment 20000574 PARAMETER Experiment Name: At_100uM_ABA_Mutants__P Parameter: Tissue Value: Whole Plant
  misc_feature: MA Experiment 20000574 PARAMETER Experiment Name: At_100uM_ABA_Mutants__P Parameter: Treatment Value: None
atgtcgtggcaatggcggcgacggcagtggccatcccctctcctccttatcctcatcgttcttcatctcgtctcttcctcttccgccattgattttctctacaattccttcagctccgtaactaacagaaccgacgtaatcctcatcgaagattcccgcgtagaatccaccgtaatcagcctcatcaacgactccgatccactctctttcggccgtgttttttacccacaaaaactcacaattatacccgatccaacccgaaacccgacccgactctcatctttctcaacttccttcgtcttctccattctccctgacatatccacaagtcctggcttcggcctctgcttcgtcctctccaattccacctctcctccaaatgctatctccagccaatacttcggtctcttcactaacgccacagtcagattcaacgctcctctcctcgccgtcgaattcgacaccggtagaaactctgaagtaaacgatatcgacgataaccacgtcggaattgatcttaacaacattgaatccaccacatccgtaaccgctggctactacgattctgttaatggaagcttcgttcgctttaatatgcgtaacggaaacaacgttcgagcttggatcgatttcgatggccctaactttcagatcaacgtttccgtcgctcccgtcggtgtgcttcgacctcgccggccaactcttactttccgtgatcctgttattgctaattatgtctcggcagatatgtatgctggcttctctgcttccaaaaccaattggaatgaagctcgaaggattctagcttggagcttgagtgatacaggagctcttcgagagatcaacactacgaatttacctgttttcttcctggaaaactcttcttcttctctttccactggagcaatcgctgggatcgttatcggttgtgttgtcttcgtagctctaatcggatttgggggttatttgatttggaagaaactaatgagagaggaagaagaagaagagatcgaggagtgggagttagagttttggcctcaccgtttcagctacgaagaactcgctgcagctacggaggttttctctaacgatcgtctgcttggatctggaggatttggtaaagtttacagaggaattttgtcaaacaacagtgagattgctgttaaatgcgtgaatcacgattcgaagcaaggtttgagagaatttatggcggagatctcgagtatgggtaggttacagcataagaatctagttcaaatgagaggatggtgtcgccggaaaaacgagctgatgcttgtctacgattacatgccaaacggaagtcttaatcagtggatctttgataatcctaaagagccaatgccgtggaggagaaggcgtcaggtgattaacgatgttgcggaagggcttaattatctccaccatggatgggatcaagtggtgattcatagagatatcaaatcaagtaacattcttttggattctgagatgcgtgggaggcttggggacttcggtttagctaagttatatgagcacggtggggctccaaacacgactcgcgtggtgggcacgttagggtatttggctccggagcttgcgtctgcttcggcgcctacggaggcgagtgatgtgtatagttttggtgtggtggtgttggaggttgttagtgggaggagaccgatagagtacgcggaggaggaagatatggtgcttgtggattgggttagggatttgtacggtggaggaagagtggttgatgcagcggacgagagagtaaggagcgagtgtgagacgatggaggaagttgaattgttactcaagttaggtctggcttgttgtcaccctgatccagctaagcggccgaatatgagagagatcgtttcactactgcttggctcaccacaagaggatttgttgactgggctcacgccggccgccgccgcggcagactccacggctgctcacgcatga

SEQ ID NO: 95911 - protein, 656 aa, Arabidopsis thaliana
  peptide (1)..(656): Ceres Seq. ID no. 12731103
  misc_feature (4)..(639): Homolog of NCBI NO: 34897406 NR Description: putative receptor-like protein kinase [Oryza
  misc_feature (14)..(630): Homolog of NCBI NO: 15233300 NR Description: probable serine/threonine-specific protein protein id: At3g55550.1 [Arabidopsis thaliana]
  misc_feature (15)..(630): Homolog of NCBI NO: 38112427 NR Description: lectin-like receptor kinase 7;2 [Medicago
  misc_feature (23)..(651): Homolog of NCBI NO: 28416699 NR Description: At3g53810 [Arabidopsis thaliana]
  misc_feature (23)..(651): Homolog of NCBI NO: 15232332 NR Description: serine/threonine-specific kinase like protein;
  misc_feature (9)..(638): Homolog of NCBI NO: 38346765 NR Description: OSJNBa0081C01.16 [Oryza sativa (japonica
  misc_feature (14)..(635): Homolog of NCBI NO: 15235547 NR Description: serine threonine-specific kinase like protein;
  misc_feature (15)..(632): Homolog of NCBI NO: 37534760 NR Description: putative receptor-like protein kinase [Oryza
  misc_feature (15)..(632): Homolog of NCBI NO: 38112429 NR Description: lectin-like receptor kinase 7;3 [Medicago
  misc_feature (14)..(638): Homolog of NCBI NO: 38346766 NR Description: OSJNBa0081C01.17 [Oryza sativa (japonica
MSWQWRRRQWPSPLLLILIVLHLVSSSSAIDFLYNSFSSVTNRTDVILIEDSRVESTVISLINDSDPLSFGRVFYPQKLTIIPDPTRNPTRLSSFSTSFVFSILPDISTSPGFGLCFVLSNSTSPPNAISSQYFGLFTNATVRFNAPLLAVEFDTGRNSEVNDIDDNHVGIDLNNIESTTSVTAGYYDSVNGSFVRFNMRNGNNVRAWIDFDGPNFQINVSVAPVGVLRPRRPTLTFRDPVIANYVSADMYAGFSASKTNWNEARRILAWSLSDTGALREINTTNLPVFFLENSSSSLSTGAIAGIVIGCVVFVALIGFGGYLIWKKLMREEEEEEIEEWELEFWPHRFSYEELAAATEVFSNDRLLGSGGFGKVYRGILSNNSEIAVKCVNHDSKQGLREFMAEISSMGRLQHKNLVQMRGWCRRKNELMLVYDYMPNGSLNQWIFDNPKEPMPWRRRRQVINDVAEGLNYLHHGWDQVVIHRDIKSSNILLDSEMRGRLGDFGLAKLYEHGGAPNTTRVVGTLGYLAPELASASAPTEASDVYSFGVVVLEVVSGRRPIEYAEEEDMVLVDWVRDLYGGGRVVDAADERVRSECETMEEVELLLKLGLACCHPDPAKRPNMREIVSLLLGSPQEDLLTGLTPAAAAADSTAAHA

SEQ ID NO: 95912 - protein, 458 aa, Arabidopsis thaliana
  peptide (1)..(458): Ceres Seq. ID no. 12731104
  misc_feature (1)..(441): Homolog of NCBI NO: 34897406 NR Description: putative receptor-like protein kinase [Oryza
  misc_feature (1)..(432): Homolog of NCBI NO: 15233300 NR Description: probable serine/threonine-specific protein protein id: At3g55550.1 [Arabidopsis thaliana]
  misc_feature (1)..(432): Homolog of NCBI NO: 38112427 NR Description: lectin-like receptor kinase 7;2 [Medicago
  misc_feature (1)..(453): Homolog of NCBI NO: 28416699 NR Description: At3g53810 [Arabidopsis thaliana]
  misc_feature (1)..(453): Homolog of NCBI NO: 15232332 NR Description: serine/threonine-specific kinase like protein;
  misc_feature (1)..(440): Homolog of NCBI NO: 38346765 NR Description: OSJNBa0081C01.16 [Oryza sativa (japonica
  misc_feature (1)..(437): Homolog of NCBI NO: 15235547 NR Description: serine threonine-specific kinase like protein;
  misc_feature (1)..(434): Homolog of NCBI NO: 37534760 NR Description: putative receptor-like protein kinase [Oryza
  misc_feature (1)..(434): Homolog of NCBI NO: 38112429 NR Description: lectin-like receptor kinase 7;3 [Medicago
  misc_feature (1)..(440): Homolog of NCBI NO: 38346766 NR Description: OSJNBa0081C01.17 [Oryza sativa (japonica
MRNGNNVRAWIDFDGPNFQINVSVAPVGVLRPRRPTLTFRDPVIANYVSADMYAGFSASKTNWNEARRILAWSLSDTGALREINTTNLPVFFLENSSSSLSTGAIAGIVIGCVVFVALIGFGGYLIWKKLMREEEEEEIEEWELEFWPHRFSYEELAAATEVFSNDRLLGSGGFGKVYRGILSNNSEIAVKCVNHDSKQGLREFMAEISSMGRLQHKNLVQMRGWCRRKNELMLVYDYMPNGSLNQWIFDNPKEPMPWRRRRQVINDVAEGLNYLHHGWDQVVIHRDIKSSNILLDSEMRGRLGDFGLAKLYEHGGAPNTTRVVGTLGYLAPELASASAPTEASDVYSFGVVVLEVVSGRRPIEYAEEEDMVLVDWVRDLYGGGRVVDAADERVRSECETMEEVELLLKLGLACCHPDPAKRPNMREIVSLLLGSPQEDLLTGLTPAAAAADSTAAHA

SEQ ID NO: 95913 - protein, 407 aa, Arabidopsis thaliana
  peptide (1)..(407): Ceres Seq. ID no. 12731105
  misc_feature (1)..(390): Homolog of NCBI NO: 34897406 NR Description: putative receptor-like protein kinase [Oryza
  misc_feature (1)..(381): Homolog of NCBI NO: 15233300 NR Description: probable serine/threonine-specific protein protein id: At3g55550.1 [Arabidopsis thaliana]
  misc_feature (1)..(381): Homolog of NCBI NO: 38112427 NR Description: lectin-like receptor kinase 7;2 [Medicago
  misc_feature (1)..(402): Homolog of NCBI NO: 28416699 NR Description: At3g53810 [Arabidopsis thaliana]
  misc_feature (1)..(402): Homolog of NCBI NO: 15232332 NR Description: serine/threonine-specific kinase like protein;
  misc_feature (1)..(389): Homolog of NCBI NO: 38346765 NR Description: OSJNBa0081C01.16 [Oryza sativa (japonica
  misc_feature (1)..(386): Homolog of NCBI NO: 15235547 NR Description: serine threonine-specific kinase like protein;
  misc_feature (1)..(383): Homolog of NCBI NO: 37534760 NR Description: putative receptor-like protein kinase [Oryza
  misc_feature (1)..(383): Homolog of NCBI NO: 38112429 NR Description: lectin-like receptor kinase 7;3 [Medicago
  misc_feature (1)..(389): Homolog of NCBI NO: 38346766 NR Description: OSJNBa0081C01.17 [Oryza sativa (japonica
MYAGFSASKTNWNEARRILAWSLSDTGALREINTTNLPVFFLENSSSSLSTGAIAGIVIGCVVFVALIGFGGYLIWKKLMREEEEEEIEEWELEFWPHRFSYEELAAATEVFSNDRLLGSGGFGKVYRGILSNNSEIAVKCVNHDSKQGLREFMAEISSMGRLQHKNLVQMRGWCRRKNELMLVYDYMPNGSLNQWIFDNPKEPMPWRRRRQVINDVAEGLNYLHHGWDQVVIHRDIKSSNILLDSEMRGRLGDFGLAKLYEHGGAPNTTRVVGTLGYLAPELASASAPTEASDVYSFGVVVLEVVSGRRPIEYAEEEDMVLVDWVRDLYGGGRVVDAADERVRSECETMEEVELLLKLGLACCHPDPAKRPNMREIVSLLLGSPQEDLLTGLTPAAAAADSTAAHA

SEQ ID NO: 95914 - DNA, 1228 bp, Arabidopsis thaliana
  misc_feature (1)..(1228): Ceres Seq. ID no. 12731106
  misc_feature: MA Experiment ID: 20000171 Result: Up-regulated in Transcription
  misc_feature: MA Experiment 20000171 PARAMETER Experiment Name: At_42deg_Heat_P Parameter: Age (day) Value: 14
  misc_feature: MA Experiment 20000171 PARAMETER Experiment Name: At_42deg_Heat_P Parameter: Organism Value: A. thaliana
  misc_feature: MA Experiment 20000171 PARAMETER Experiment Name: At_42deg_Heat_P Parameter: Plant Line Value: WS
  misc_feature: MA Experiment 20000171 PARAMETER Experiment Name: At_42deg_Heat_P Parameter: Temperature (deg C) Value: 42 vs. 22
  misc_feature: MA Experiment 20000171 PARAMETER Experiment Name: At_42deg_Heat_P Parameter: Timepoint (hr) Value: 1
  misc_feature: MA Experiment 20000171 PARAMETER Experiment Name: At_42deg_Heat_P Parameter: Tissue Value: Aerial
  misc_feature: MA Experiment ID: 20000173 Result: Up-regulated in Transcription
  misc_feature: MA Experiment 20000173 PARAMETER Experiment Name: At_42deg_Heat_P Parameter: Age (day) Value: 14
  misc_feature: MA Experiment 20000173 PARAMETER Experiment Name: At_42deg_Heat_P Parameter: Organism Value: A. thaliana
  misc_feature: MA Experiment 20000173 PARAMETER Experiment Name: At_42deg_Heat_P Parameter: Plant Line Value: WS
  misc_feature: MA Experiment 20000173 PARAMETER Experiment Name: At_42deg_Heat_P Parameter: Temperature (deg C) Value: 42 vs. 22
  misc_feature: MA Experiment 20000173 PARAMETER Experiment Name: At_42deg_Heat_P Parameter: Timepoint (hr) Value: 6
  misc_feature: MA Experiment 20000173 PARAMETER Experiment Name: At_42deg_Heat_P Parameter: Tissue Value: Aerial
  misc_feature: MA Experiment ID: 20000182 Result: Down-regulated in Transcription
  misc_feature: MA Experiment 20000182 PARAMETER Experiment Name: At_2mM_SA_P Parameter: Age (day) Value: 14
  misc_feature: MA Experiment 20000182 PARAMETER Experiment Name: At_2mM_SA_P Parameter: Organism Value: A. thaliana
  misc_feature: MA Experiment 20000182 PARAMETER Experiment Name: At_2mM_SA_P Parameter: Plant Line Value: WS
  misc_feature: MA Experiment 20000182 PARAMETER Experiment Name: At_2mM_SA_P Parameter: Timepoint (hr) Value: 6
  misc_feature: MA Experiment 20000182 PARAMETER Experiment Name: At_2mM_SA_P Parameter: Tissue Value: Aerial
  misc_feature: MA Experiment 20000182 PARAMETER Experiment Name: At_2mM_SA_P Parameter: Treatment Value: 2mM SA vs. No Treatment
  misc_feature: MA Experiment ID: 20000184 Result: Up-regulated in Transcription
  misc_feature: MA Experiment 20000184 PARAMETER Experiment Name: At_Shoots__P Parameter: Age (day) Value: 7
  misc_feature: MA Experiment 20000184 PARAMETER Experiment Name: At_Shoots__P Parameter: Tissue Value: Shoots vs. Whole Plant
  misc_feature: MA Experiment ID: 20000185 Result: Up-regulated in Transcription
  misc_feature: MA Experiment 20000185 PARAMETER Experiment Name: At_Roots__P Parameter: Age (day) Value: 7 vs. 21
  misc_feature: MA Experiment 20000185 PARAMETER Experiment Name: At_Roots__P Parameter: Organism Value: A. thaliana
  misc_feature: MA Experiment 20000185 PARAMETER Experiment Name: At_Roots__P Parameter: Tissue Value: Roots vs. Whole Plant
  misc_feature: MA Experiment ID: 20000264 Result: Up-regulated in Transcription
  misc_feature: MA Experiment 20000264 PARAMETER Experiment Name: At_Open_Flower_P Parameter: Age (day) Value: 21
  misc_feature: MA Experiment 20000264 PARAMETER Experiment Name: At_Open_Flower_P Parameter: Plant Line Value: WS
  misc_feature: MA Experiment 20000264 PARAMETER Experiment Name: At_Open_Flower_P Parameter: Tissue Value: Open Flower vs. Whole Plant
  misc_feature: MA Experiment ID: 20000437 Result: Up-regulated in Transcription
  misc_feature: MA Experiment 20000437 PARAMETER Experiment Name: At_Drought_P Parameter: Age (day) Value: 8
  misc_feature: MA Experiment 20000437 PARAMETER Experiment Name: At_Drought_P Parameter: Organism Value: A. thaliana
  misc_feature: MA Experiment 20000437 PARAMETER Experiment Name: At_Drought_P Parameter: Plant Line Value: WS
  misc_feature: MA Experiment 20000437 PARAMETER Experiment Name: At_Drought_P Parameter: Timepoint (hr) Value: 24
  misc_feature: MA Experiment 20000437 PARAMETER Experiment Name: At_Drought_P Parameter: Tissue Value: Whole Plant
  misc_feature: MA Experiment 20000437 PARAMETER Experiment Name: At_Drought_P Parameter: Treatment Value: Drought vs. No Drought
  misc_feature: MA Experiment ID: 20000439 Result: Up-regulated in Transcription
  misc_feature: MA Experiment 20000439 PARAMETER Experiment Name: At_Roots__P Parameter: Age (day) Value: 14 vs. 21
  misc_feature: MA Experiment 20000439 PARAMETER Experiment Name: At_Roots__P Parameter: Organism Value: A. thaliana
  misc_feature: MA Experiment 20000439 PARAMETER Experiment Name: At_Roots__P Parameter: Tissue Value: Roots vs. Whole Plant
  misc_feature: MA Experiment ID: 20001248 Result: Down-regulated in Transcription
  misc_feature: MA Experiment 20001248 PARAMETER Experiment Name: At_Far-red-induction_P Parameter: Age (day) Value: 7
  misc_feature: MA Experiment 20001248 PARAMETER Experiment Name: At_Far-red-induction_P Parameter: Light Value: Far-red vs. White
  misc_feature: MA Experiment 20001248 PARAMETER Experiment Name: At_Far-red-induction_P Parameter: Organism Value: A. thaliana
  misc_feature: MA Experiment 20001248 PARAMETER Experiment Name: At_Far-red-induction_P Parameter: Plant Line Value: Columbia
  misc_feature: MA Experiment 20001248 PARAMETER Experiment Name: At_Far-red-induction_P Parameter: Timepoint (hr) Value: 4
  misc_feature: MA Experiment 20001248 PARAMETER Experiment Name: At_Far-red-induction_P Parameter: Tissue Value: Whole Plant
  misc_feature: MA Experiment ID: 20001560 Result: Down-regulated in Transcription
  misc_feature: MA Experiment 20001560 PARAMETER Experiment Name: At_Drought_Soil_Dry_P Parameter: Age (day) Value: 28
  misc_feature: MA Experiment 20001560 PARAMETER Experiment Name: At_Drought_Soil_Dry_P Parameter: Organism Value: A. thaliana
  misc_feature: MA Experiment 20001560 PARAMETER Experiment Name: At_Drought_Soil_Dry_P Parameter: Plant Line Value: WS
  misc_feature: MA Experiment 20001560 PARAMETER Experiment Name: At_Drought_Soil_Dry_P Parameter: Post Timepoint (hr) Value: None
  misc_feature: MA Experiment 20001560 PARAMETER Experiment Name: At_Drought_Soil_Dry_P Parameter: Post-Treatment Value: None
  misc_feature: MA Experiment 20001560 PARAMETER Experiment Name: At_Drought_Soil_Dry_P Parameter: Timepoint (day) Value: 14
  misc_feature: MA Experiment 20001560 PARAMETER Experiment Name: At_Drought_Soil_Dry_P Parameter: Treatment Value: Drought vs. No Drought
  misc_feature: MA Experiment ID: 20001755 Result: Up-regulated in Transcription
  misc_feature: MA Experiment 20001755 PARAMETER Experiment Name: At_50mM_NH4NO3_L-to-H_P Parameter: Timepoint (hr) Value: 2
  misc_feature: MA Experiment 20001755 PARAMETER Experiment Name: At_50mM_NH4NO3_L-to-H_P Parameter: Tissue Value: Leaf
  misc_feature: MA Experiment 20001755 PARAMETER Experiment Name: At_50mM_NH4NO3_L-to-H_P Parameter: Treatment Value: 50mM NH4NO3 vs 100mM Mannitol
  misc_feature: MA Experiment ID: 20001757 Result: Up-regulated in Transcription
  misc_feature: MA Experiment 20001757 PARAMETER Experiment Name: At_50mM_NH4NO3_L-to-H_P Parameter: Timepoint (hr) Value: 6
  misc_feature: MA Experiment 20001757 PARAMETER Experiment Name: At_50mM_NH4NO3_L-to-H_P Parameter: Tissue Value: Leaf
  misc_feature: MA Experiment 20001757 PARAMETER Experiment Name: At_50mM_NH4NO3_L-to-H_P Parameter: Treatment Value: 50mM NH4NO3 vs 100mM Mannitol
  misc_feature: MA Experiment ID: 20001761 Result: Down-regulated in Transcription
  misc_feature: MA Experiment 20001761 PARAMETER Experiment Name: At_50mM_NH4NO3_L-to-H_P Parameter: Timepoint (hr) Value: 4
  misc_feature: MA Experiment 20001761 PARAMETER Experiment Name: At_50mM_NH4NO3_L-to-H_P Parameter: Tissue Value: Siliques
  misc_feature: MA Experiment 20001761 PARAMETER Experiment Name: At_50mM_NH4NO3_L-to-H_P Parameter: Treatment Value: 50mM NH4NO3 vs 100mM Mannitol
  misc_feature: MA Experiment ID: 20001906 Result: Down-regulated in Transcription
  misc_feature: MA Experiment 20001906 PARAMETER Experiment Name: At_Drought_Reproduction_P Parameter: Age (day) Value: 35
  misc_feature: MA Experiment 20001906 PARAMETER Experiment Name: At_Drought_Reproduction_P Parameter: Organism Value: A. thaliana
  misc_feature: MA Experiment 20001906 PARAMETER Experiment Name: At_Drought_Reproduction_P Parameter: Plant Line Value: WS
  misc_feature: MA Experiment 20001906 PARAMETER Experiment Name: At_Drought_Reproduction_P Parameter: Timepoint (day) Value: 5
  misc_feature: MA Experiment 20001906 PARAMETER Experiment Name: At_Drought_Reproduction_P Parameter: Tissue Value: Siliques
  misc_feature: MA Experiment 20001906 PARAMETER Experiment Name: At_Drought_Reproduction_P Parameter: Treatment Value: Drought vs. No Drought
ataagaaaaaaaacacaaacatctatcaaatttacaaagttttaaaactaattaaaaaagagcaagatgcctgctatgttaacagatgtgtttagaggccatcccattcacctcccacactctcacatacctgacttcacatctctccgggagctcccggattcttacaagtggacccctaaagacgatctcctcttctccgctgctccttctcctccggccaccggtgaaaacatccctctcatcgacctcgaccacccggacgcgactaaccaaatcggtcatgcatgtagaacttggggtgccttccaaatctcaaaccacggcgtgcctttgggacttctccaagacattgagtttctcaccggtagtctcttcgggctacctgtccaacgcaagcttaagtctgctcggtcggagacaggtgtgtccggctacggcgtcgctcgtatcgcatctttcttcaataagcaaatgtggtccgaaggtttcaccatcactggctcgcctctcaacgatttccgtaaactttggccccaacatcacctcaactactgcgatatcgttgaagagtacgaggaacatatgaaaaagttggcatcgaaattgatgtggttagcactaaattcacttggggtcagcgaagaagacattgaatgggccagtctcagttcagatttaaactgggcccaagctgctctccagctaaatcactacccggtttgtcctgaaccggaccgagccatgggtctagcagctcataccgactccaccctcctaaccattctgtaccagaacaataccgccggtctacaagtatttcgcgatgatcttggttgggtcaccgtgccaccgtttcctggctcgctcgtggttaacgttggtgacctcttccacatcctatccaatggattgtttaaaagcgtgttgcaccgcgctcgggttaaccaaaccagagcccggttatctgtagcattcctttggggtccgcaatctgatatcaagatatcacctgtaccgaagctggttagtcccgttgaatcgcctctataccaatcggtgacatggaaagagtatcttcgaacaaaagcaactcacttcaacaaagctctttcaatgattagaaatcacagagaagaatgattagataataatagttgtgatctactagttagtttgattaataaattgttgtaaatgatttcagcaatatgatttgtttgtcctc

SEQ ID NO: 95915 - protein, 358 aa, Arabidopsis thaliana
  peptide (1)..(358): Ceres Seq. ID no. 12731107
  misc_feature (208)..(308): Pfam Name: 2OG-Fe(II) oxygenase superfamily Pfam Description: 2OG-Fe(II) oxygenase superfamily
  misc_feature (1)..(358): Homolog of NCBI NO: 15218223 NR Description: gibberellin 3 beta-hydroxylase, putative; protein
  misc_feature (1)..(354): Homolog of NCBI NO: 11255836 NR Description: gibberellin 3 beta-hydroxylase [imported] -
  misc_feature (1)..(354): Homolog of NCBI NO: 15220117 NR Description: gibberellin 3 beta-hydroxylase; protein id: supported by cDNA: gi_3982752 [Arabidopsis thaliana]
  misc_feature (1)..(353): Homolog of NCBI NO: 2314805 NR Description: 2-oxoglutarate-dependent dioxygenase [Pisum
  misc_feature (1)..(353): Homolog of NCBI NO: 7433212 NR Description: gibberellin 3 beta-hydroxylase (EC 1.4.99.-)
  misc_feature (1)..(353): Homolog of NCBI NO: 2291080 NR Description: defective gibberellin 3B-hydroxylase [Pisum
  misc_feature (1)..(353): Homolog of NCBI NO: 7433213 NR Description: gibberellin 3 beta-hydroxylase (EC 1.4.99.-)
  misc_feature (1)..(353): Homolog of NCBI NO: 6691485 NR Description: gibberellin 3beta-hydroxylase [Nicotiana tabacum]
  misc_feature (1)..(353): Homolog of NCBI NO: 4164145 NR Description: gibberelin 3beta-hydroxylase [Lactuca sativa]
  misc_feature (1)..(353): Homolog of NCBI NO: 20149245 NR Description: gibberellin 3-oxidase 2 [Nicotiana sylvestris]
MPAMLTDVFRGHPIHLPHSHIPDFTSLRELPDSYKWTPKDDLLFSAAPSPPATGENIPLIDLDHPDATNQIGHACRTWGAFQISNHGVPLGLLQDIEFLTGSLFGLPVQRKLKSARSETGVSGYGVARIASFFNKQMWSEGFTITGSPLNDFRKLWPQHHLNYCDIVEEYEEHMKKLASKLMWLALNSLGVSEEDIEWASLSSDLNWAQAALQLNHYPVCPEPDRAMGLAAHTDSTLLTILYQNNTAGLQVFRDDLGWVTVPPFPGSLVVNVGDLFHILSNGLFKSVLHRARVNQTRARLSVAFLWGPQSDIKISPVPKLVSPVESPLYQSVTWKEYLRTKATHFNKALSMIRNHREE

SEQ ID NO: 95916 - protein, 355 aa, Arabidopsis thaliana
  peptide (1)..(355): Ceres Seq. ID no. 12731108
  misc_feature (205)..(305): Pfam Name: 2OG-Fe(II) oxygenase superfamily Pfam Description: 2OG-Fe(II) oxygenase superfamily
  misc_feature (1)..(355): Homolog of NCBI NO: 15218223 NR Description: gibberellin 3 beta-hydroxylase, putative; protein
  misc_feature (1)..(351): Homolog of NCBI NO: 11255836 NR Description: gibberellin 3 beta-hydroxylase [imported] -
  misc_feature (1)..(351): Homolog of NCBI NO: 15220117 NR Description: gibberellin 3 beta-hydroxylase; protein id: supported by cDNA: gi_3982752 [Arabidopsis thaliana]
  misc_feature (1)..(350): Homolog of NCBI NO: 2314805 NR Description: 2-oxoglutarate-dependent dioxygenase [Pisum
  misc_feature (1)..(350): Homolog of NCBI NO: 7433212 NR Description: gibberellin 3 beta-hydroxylase (EC 1.4.99.-)
  misc_feature (1)..(350): Homolog of NCBI NO: 2291080 NR Description: defective gibberellin 3B-hydroxylase [Pisum
  misc_feature (1)..(350): Homolog of NCBI NO: 7433213 NR Description: gibberellin 3 beta-hydroxylase (EC 1.4.99.-)
  misc_feature (1)..(350): Homolog of NCBI NO: 6691485 NR Description: gibberellin 3beta-hydroxylase [Nicotiana tabacum]
  misc_feature (1)..(350): Homolog of NCBI NO: 4164145 NR Description: gibberelin 3beta-hydroxylase [Lactuca sativa]
  misc_feature (1)..(350): Homolog of NCBI NO: 20149245 NR Description: gibberellin 3-oxidase 2 [Nicotiana sylvestris]
MLTDVFRGHPIHLPHSHIPDFTSLRELPDSYKWTPKDDLLFSAAPSPPATGENIPLIDLDHPDATNQIGHACRTWGAFQISNHGVPLGLLQDIEFLTGSLFGLPVQRKLKSARSETGVSGYGVARIASFFNKQMWSEGFTITGSPLNDFRKLWPQHHLNYCDIVEEYEEHMKKLASKLMWLALNSLGVSEEDIEWASLSSDLNWAQAALQLNHYPVCPEPDRAMGLAAHTDSTLLTILYQNNTAGLQVFRDDLGWVTVPPFPGSLVVNVGDLFHILSNGLFKSVLHRARVNQTRARLSVAFLWGPQSDIKISPVPKLVSPVESPLYQSVTWKEYLRTKATHFNKALSMIRNHREE

SEQ ID NO: 95917 - protein, 222 aa, Arabidopsis thaliana
  peptide (1)..(222): Ceres Seq. ID no. 12731109
  misc_feature (72)..(172): Pfam Name: 2OG-Fe(II) oxygenase superfamily Pfam Description: 2OG-Fe(II) oxygenase superfamily
  misc_feature (1)..(222): Homolog of NCBI NO: 15218223 NR Description: gibberellin 3 beta-hydroxylase, putative; protein
  misc_feature (1)..(218): Homolog of NCBI NO: 11255836 NR Description: gibberellin 3 beta-hydroxylase [imported] -
  misc_feature (1)..(218): Homolog of NCBI NO: 15220117 NR Description: gibberellin 3 beta-hydroxylase; protein id: supported by cDNA: gi_3982752 [Arabidopsis thaliana]
  misc_feature (1)..(217): Homolog of NCBI NO: 2314805 NR Description: 2-oxoglutarate-dependent dioxygenase [Pisum
  misc_feature (1)..(217): Homolog of NCBI NO: 7433212 NR Description: gibberellin 3 beta-hydroxylase (EC 1.4.99.-)
  misc_feature (1)..(217): Homolog of NCBI NO: 2291080 NR Description: defective gibberellin 3B-hydroxylase [Pisum
  misc_feature (1)..(217): Homolog of NCBI NO: 7433213 NR Description: gibberellin 3 beta-hydroxylase (EC 1.4.99.-)
  misc_feature (1)..(217): Homolog of NCBI NO: 6691485 NR Description: gibberellin 3beta-hydroxylase [Nicotiana tabacum]
  misc_feature (1)..(217): Homolog of NCBI NO: 4164145 NR Description: gibberelin 3beta-hydroxylase [Lactuca sativa]
  misc_feature (1)..(217): Homolog of NCBI NO: 20149245 NR Description: gibberellin 3-oxidase 2 [Nicotiana sylvestris]
MWSEGFTITGSPLNDFRKLWPQHHLNYCDIVEEYEEHMKKLASKLMWLALNSLGVSEEDIEWASLSSDLNWAQAALQLNHYPVCPEPDRAMGLAAHTDSTLLTILYQNNTAGLQVFRDDLGWVTVPPFPGSLVVNVGDLFHILSNGLFKSVLHRARVNQTRARLSVAFLWGPQSDIKISPVPKLVSPVESPLYQSVTWKEYLRTKATHFNKALSMIRNHREE

SEQ ID NO: 95918 - DNA, 1152 bp, Arabidopsis thaliana
  misc_feature (1)..(1152): Ceres Seq. ID no. 12731148
  misc_feature: MA Experiment ID: 20000184 Result: Up-regulated in Transcription
  misc_feature: MA Experiment 20000184 PARAMETER Experiment Name: At_Shoots__P Parameter: Age (day) Value: 7
  misc_feature: MA Experiment 20000184 PARAMETER Experiment Name: At_Shoots__P Parameter: Tissue Value: Shoots vs. Whole Plant
  misc_feature: MA Experiment ID: 20001910 Result: Up-regulated in Transcription
  misc_feature: MA Experiment 20001910 PARAMETER Experiment Name: At_Drought_Reproduction_P Parameter: Age (day) Value: 37
  misc_feature: MA Experiment 20001910 PARAMETER Experiment Name: At_Drought_Reproduction_P Parameter: Organism Value: A. thaliana
  misc_feature: MA Experiment 20001910 PARAMETER Experiment Name: At_Drought_Reproduction_P Parameter: Plant Line Value: WS
  misc_feature: MA Experiment 20001910 PARAMETER Experiment Name: At_Drought_Reproduction_P Parameter: Timepoint (day) Value: 7
  misc_feature: MA Experiment 20001910 PARAMETER Experiment Name: At_Drought_Reproduction_P Parameter: Tissue Value: Flowers
  misc_feature: MA Experiment 20001910 PARAMETER Experiment Name: At_Drought_Reproduction_P Parameter: Treatment Value: Drought vs. No Drought
atgccagagacagaatattcgtttggaaggtcattccttagtttgcgccgagaccaagcacacttaatggatccaacatccttctctgagcctatgaccatggaggtagagttagattcttttcaaagacaagttgcggaaaaattcatcgatcttaatgcctccgcggatgaggctgagatcctctcacttgaatggatagggaaacttcttgattcttttctttgttgccaagaagatttccgagttataatattcaaccacaaacctcagctcctcaaacaaccaatggaccgcttgatagaagaatacttcgagaggagtgtaaaagctcttgatgtatgcaatgcgatacgtgatggcatcgagcaaatccgacagtggcagaaactaattgaaatcgtaatatcggctttggacacgaaccaaagacaacttggagaaggagaaatccaccgtgcaaagaaagctttgattgatttggcaattggaatgctcgacgagaaagactcttctaacacccaccgtaatcgctctttcacacgcaacaaggaccataatcaacacattggctatatcaggtcactttcttggagtgtttctcggtcgtggtcggcatcaaggcagttacaaggcattggaaataacttagcaacccctcgagccagcgatgttatggcgactaatggcctagctctcacagtgtatacaatgacatcaatactgttgtttgtaacttgggttcttgtcgcagccataccttgtcaagatcgtggtttacatgtccatttctatttccctaggcatttccaatgggcagtaccagtcatgtccttgcacgataagattatggacgaatcaaagaaaagagacaaaaagaagaagggttgtggactacttagggagattaatcaaatcgagagaaactcgagaatgttaagtgatttgattgattcggacaatttctcattaacagatgaaaaatgtactttagaggtgaaggagagagttcaagaattgatgaatgtgtgtgaagctataaaggagggtttagatccatttgataggaaagtgagggatgtcttccaccaaattgttcgtactcgcaccgaagctcttgattcacttggaaagcttcaaaatcaagaatag

SEQ ID NO: 95919 - protein, 383 aa, Arabidopsis thaliana
  peptide (1)..(383): Ceres Seq. ID no. 12731149
  misc_feature (1)..(376): Pfam Name: Protein of unknown function (DUF793) Pfam Description: Protein of unknown function (DUF793)
  misc_feature (1)..(383): Homolog of NCBI NO: 15218428 NR Description: hypothetical protein; protein id: At1g43630.1
  misc_feature (1)..(376): Homolog of NCBI NO: 18394649 NR Description: expressed protein; protein id: At1g18740.1, by cDNA: 40753., supported by cDNA: gi_14517471 [Arabidopsis
  misc_feature (1)..(376): Homolog of NCBI NO: 21593634 NR Description: unknown [Arabidopsis thaliana]
  misc_feature (1)..(383): Homolog of NCBI NO: 18410617 NR Description: expressed protein; protein id: At1g74450.1, by cDNA: 108193., supported by cDNA: gi_16226873, supported by gi_18176415 [Arabidopsis thaliana] >gi|25354336|pir||D96773
  misc_feature (1)..(383): Homolog of NCBI NO: 21536674 NR Description: unknown [Arabidopsis thaliana]
  misc_feature (7)..(381): Homolog of NCBI NO: 38345505 NR Description: OSJNBa0039K24.3 [Oryza sativa (japonica
  misc_feature (38)..(381): Homolog of NCBI NO: 5777630 NR Description: CAA303718.1 protein [Oryza sativa]
  misc_feature (4)..(376): Homolog of NCBI NO: 15236522 NR Description: putative protein; protein id: At4g23530.1, by cDNA: gi_17380709 [Arabidopsis thaliana]
  misc_feature (2)..(374): Homolog of NCBI NO: 15237130 NR Description: putative protein; protein id: At4g11300.1, by cDNA: 17771. [Arabidopsis thaliana] >gi|7486699|pir||T13021
  misc_feature (2)..(374): Homolog of NCBI NO: 21553882 NR Description: unknown [Arabidopsis thaliana]
MPETEYSFGRSFLSLRRDQAHLMDPTSFSEPMTMEVELDSFQRQVAEKFIDLNASADEAEILSLEWIGKLLDSFLCCQEDFRVIIFNHKPQLLKQPMDRLIEEYFERSVKALDVCNAIRDGIEQIRQWQKLIEIVISALDTNQRQLGEGEIHRAKKALIDLAIGMLDEKDSSNTHRNRSFTRNKDHNQHIGYIRSLSWSVSRSWSASRQLQGIGNNLATPRASDVMATNGLALTVYTMTSILLFVTWVLVAAIPCQDRGLHVHFYFPRHFQWAVPVMSLHDKIMDESKKRDKKKKGCGLLREINQIERNSRMLSDLIDSDNFSLTDEKCTLEVKERVQELMNVCEAIKEGLDPFDRKVRDVFHQIVRTRTEALDSLGKLQNQE

SEQ ID NO: 95920 - protein, 361 aa, Arabidopsis thaliana
  peptide (1)..(361): Ceres Seq. ID no. 12731150
  misc_feature (1)..(354): Pfam Name: Protein of unknown function (DUF793) Pfam Description: Protein of unknown function (DUF793)
  misc_feature (1)..(361): Homolog of NCBI NO: 15218428 NR Description: hypothetical protein; protein id: At1g43630.1
  misc_feature (1)..(354): Homolog of NCBI NO: 18394649 NR Description: expressed protein; protein id: At1g18740.1, by cDNA: 40753., supported by cDNA: gi_14517471 [Arabidopsis
  misc_feature (1)..(354): Homolog of NCBI NO: 21593634 NR Description: unknown [Arabidopsis thaliana]
  misc_feature (1)..(361): Homolog of NCBI NO: 18410617 NR Description: expressed protein; protein id: At1g74450.1, by cDNA: 108193., supported by cDNA: gi_16226873, supported by gi_18176415 [Arabidopsis thaliana] >gi|25354336|pir||D96773
  misc_feature (1)..(361): Homolog of NCBI NO: 21536674 NR Description: unknown [Arabidopsis thaliana]
  misc_feature (1)..(359): Homolog of NCBI NO: 38345505 NR Description: OSJNBa0039K24.3 [Oryza sativa (japonica
  misc_feature (16)..(359): Homolog of NCBI NO: 5777630 NR Description: CAA303718.1 protein [Oryza sativa]
  misc_feature (1)..(354): Homolog of NCBI NO: 15236522 NR Description: putative protein; protein id: At4g23530.1, by cDNA: gi_17380709 [Arabidopsis thaliana]
  misc_feature (1)..(352): Homolog of NCBI NO: 15237130 NR Description: putative protein; protein id: At4g11300.1, by cDNA: 17771. [Arabidopsis thaliana] >gi|7486699|pir||T13021
  misc_feature (1)..(352): Homolog of NCBI NO: 21553882 NR Description: unknown [Arabidopsis thaliana]
MDPTSFSEPMTMEVELDSFQRQVAEKFIDLNASADEAEILSLEWIGKLLDSFLCCQEDFRVIIFNHKPQLLKQPMDRLIEEYFERSVKALDVCNAIRDGIEQIRQWQKLIEIVISALDTNQRQLGEGEIHRAKKALIDLAIGMLDEKDSSNTHRNRSFTRNKDHNQHIGYIRSLSWSVSRSWSASRQLQGIGNNLATPRASDVMATNGLALTVYTMTSILLFVTWVLVAAIPCQDRGLHVHFYFPRHFQWAVPVMSLHDKIMDESKKRDKKKKGCGLLREINQIERNSRMLSDLIDSDNFSLTDEKCTLEVKERVQELMNVCEAIKEGLDPFDRKVRDVFHQIVRTRTEALDSLGKLQNQE

SEQ ID NO: 95921 - protein, 352 aa, Arabidopsis thaliana
  peptide (1)..(352): Ceres Seq. ID no. 12731151
  misc_feature (1)..(345): Pfam Name: Protein of unknown function (DUF793) Pfam Description: Protein of unknown function (DUF793)
  misc_feature (1)..(352): Homolog of NCBI NO: 15218428 NR Description: hypothetical protein; protein id: At1g43630.1
  misc_feature (1)..(345): Homolog of NCBI NO: 18394649 NR Description: expressed protein; protein id: At1g18740.1, by cDNA: 40753., supported by cDNA: gi_14517471 [Arabidopsis
  misc_feature (1)..(345): Homolog of NCBI NO: 21593634 NR Description: unknown [Arabidopsis thaliana]
  misc_feature (1)..(352): Homolog of NCBI NO: 18410617 NR Description: expressed protein; protein id: At1g74450.1, by cDNA: 108193., supported by cDNA: gi_16226873, supported by gi_18176415 [Arabidopsis thaliana] >gi|25354336|pir||D96773
  misc_feature (1)..(352): Homolog of NCBI NO: 21536674 NR Description: unknown [Arabidopsis thaliana]
  misc_feature (1)..(350): Homolog of NCBI NO: 38345505 NR Description: OSJNBa0039K24.3 [Oryza sativa (japonica
  misc_feature (7)..(350): Homolog of NCBI NO: 5777630 NR Description: CAA303718.1 protein [Oryza sativa]
  misc_feature (1)..(345): Homolog of NCBI NO: 15236522 NR Description: putative protein; protein id: At4g23530.1, by cDNA: gi_17380709 [Arabidopsis thaliana]
  misc_feature (1)..(343): Homolog of NCBI NO: 15237130 NR Description: putative protein; protein id: At4g11300.1, by cDNA: 17771. [Arabidopsis thaliana] >gi|7486699|pir||T13021
  misc_feature (1)..(343): Homolog of NCBI NO: 21553882 NR Description: unknown [Arabidopsis thaliana]
MTMEVELDSFQRQVAEKFIDLNASADEAEILSLEWIGKLLDSFLCCQEDFRVIIFNHKPQLLKQPMDRLIEEYFERSVKALDVCNAIRDGIEQIRQWQKLIEIVISALDTNQRQLGEGEIHRAKKALIDLAIGMLDEKDSSNTHRNRSFTRNKDHNQHIGYIRSLSWSVSRSWSASRQLQGIGNNLATPRASDVMATNGLALTVYTMTSILLFVTWVLVAAIPCQDRGLHVHFYFPRHFQWAVPVMSLHDKIMDESKKRDKKKKGCGLLREINQIERNSRMLSDLIDSDNFSLTDEKCTLEVKERVQELMNVCEAIKEGLDPFDRKVRDVFHQIVRTRTEALDSLGKLQNQE

SEQ ID NO: 95922 - DNA, 1440 bp, Arabidopsis thaliana
  misc_feature (1)..(1440): Ceres Seq. ID no. 12731163
  misc_feature: MA Experiment ID: 20000307 Result: Down-regulated in Transcription
  misc_feature: MA Experiment 20000307 PARAMETER Experiment Name: At_Germinating_Seeds_Sub_P Parameter: Age (hr) Value: 24 vs. 0
  misc_feature: MA Experiment 20000307 PARAMETER Experiment Name: At_Germinating_Seeds_Sub_P Parameter: Organism Value: A. thaliana
  misc_feature: MA Experiment 20000307 PARAMETER Experiment Name: At_Germinating_Seeds_Sub_P Parameter: Plant Line Value: WS
  misc_feature: MA Experiment 20000307 PARAMETER Experiment Name: At_Germinating_Seeds_Sub_P Parameter: Tissue Value: Germinating Seeds
atggtgggaggtaagtggcggttcctagaagtagcagtcgtagtaatggtgttgcagtggtcgtgcgattataatggtaatttagctgaaggatttccagtacaagatcttgtgacaaagctgcctggacaacctgaagtggcattcagacaatttgcgggctatgtcgatatcgatgtcaaagctggtcggagtctcttttattacttcgtcgaagctgagaagcaaccccactctaaaccgttaactctttggctcaatggaggaccaggctgttcttccataggaggaggagctttcacagagttgggcccattttaccccaccggagatgctcgtggcctccgcagaaatcccaaatcttggaacaaagcctcaaatctattgtttgtggattcacctgctggagtaggatggtcttattctaacacaacttctgattacaccactggcgatgaatccaccgccaaggatatgttggtgttcatgttaagatggttagaaaaatttccacaattcaagactcgaaacctatttctcgcgggcgaaagctacgcaggacactatgtacctcaactagccgatgtgatactcgaatacaacgcacaacggtcaaatagattcaagttcaatctcaaagggattgcaattggaaatccgcttttgaagcttgaccgcgatgttccagcgatatatgagttcttctggtcacacgggatgatctctgatgaacttggcctcactatcatgaaccaatgcgactttgaagattacacattcacagattcacacaacataagcaaactttgcgaagctgcagtgaatcaagctggaaccatcatcactcaatatgttaattactacgacattctcctcgatgtatgctacccgtctctcttcgagcaagagcttaggctcaagaaaatgggtacaaggatgagttttggggtggacgtgtgcatgagctttgaagagcaattgtatttaaatcttcctgaggttcaaaaggctctccatgctaaccgaactaaactaccgtatgaatggtctatgtgcagcagcctcttgaactacaaatacactgacgggaacgccaacatgcttccaattcttaaaagaatcgtgaagagcaaagtccctgtttgggtcttcagtggagatgaagattctgtaattccacttcttggttcaagaactttggtaaaagaacttgcagatgatctcaacttcaataccacagttccttatggagcttggttcgacaaaggacaggttggcggatgggtagtagagtatgggaatctactgacattcgcaacggtgagaggagcggctcatatggtgccgtactcgcagccttcacgagctttacatttgttcaccagctttgtgcttggccggaaattgccacacaagtcgcctcctgctcttcatgattga

SEQ ID NO: 95923 - protein, 479 aa, Arabidopsis thaliana
  peptide (1)..(479): Ceres Seq. ID no. 12731164
  misc_feature (1)..(479): Homolog of NCBI NO: 15218514 NR Description: serine carboxypeptidase II, putative; protein id:
  misc_feature (1)..(473): Homolog of NCBI NO: 15238328 NR Description: serine carboxypeptidase II-like; protein id:
  misc_feature (29)..(479): Homolog of NCBI NO: 15238327 NR Description: serine carboxypeptidase-II like; protein id:
  misc_feature (7)..(472): Homolog of NCBI NO: 15224454 NR Description: putative serine carboxypeptidase II; protein id: [Arabidopsis thaliana] >gi|25289797|pir||D84503 probable serine
  misc_feature (7)..(309): Homolog of NCBI NO: 28393789 NR Description: putative serine carboxypeptidase II [Arabidopsis
  misc_feature (317)..(472): Homolog of NCBI NO: 28393789 NR Description: putative serine carboxypeptidase II [Arabidopsis
  misc_feature (36)..(472): Homolog of NCBI NO: 30685740 NR Description: serine carboxypeptidase -related [Arabidopsis >gi|18377727|gb|AAL67013.1| putative serine carboxypeptidase II
  misc_feature (36)..(472): Homolog of NCBI NO: 25289793 NR Description: probable serine carboxypeptidase II [imported] - thaliana >gi|2459435|gb|AAB80670.1| putative serine
  misc_feature (36)..(472): Homolog of NCBI NO: 25289785 NR Description: probable serine carboxypeptidase II [imported] - thaliana >gi|12322985|gb|AAG51475.1|AC069471_6 serine
  misc_feature (36)..(472): Homolog of NCBI NO: 18396647 NR Description: serine carboxypeptidase II, putative; protein id: supported by cDNA: gi_16648968 [Arabidopsis thaliana]
MVGGKWRFLEVAVVVMVLQWSCDYNGNLAEGFPVQDLVTKLPGQPEVAFRQFAGYVDIDVKAGRSLFYYFVEAEKQPHSKPLTLWLNGGPGCSSIGGGAFTELGPFYPTGDARGLRRNPKSWNKASNLLFVDSPAGVGWSYSNTTSDYTTGDESTAKDMLVFMLRWLEKFPQFKTRNLFLAGESYAGHYVPQLADVILEYNAQRSNRFKFNLKGIAIGNPLLKLDRDVPAIYEFFWSHGMISDELGLTIMNQCDFEDYTFTDSHNISKLCEAAVNQAGTIITQYVNYYDILLDVCYPSLFEQELRLKKMGTRMSFGVDVCMSFEEQLYLNLPEVQKALHANRTKLPYEWSMCSSLLNYKYTDGNANMLPILKRIVKSKVPVWVFSGDEDSVIPLLGSRTLVKELADDLNFNTTVPYGAWFDKGQVGGWVVEYGNLLTFATVRGAAHMVPYSQPSRALHLFTSFVLGRKLPHKSPPALHD

SEQ ID NO: 95924 - protein, 464 aa, Arabidopsis thaliana
  peptide (1)..(464): Ceres Seq. ID no. 12731165
  misc_feature (1)..(464): Homolog of NCBI NO: 15218514 NR Description: serine carboxypeptidase II, putative; protein id:
  misc_feature (1)..(458): Homolog of NCBI NO: 15238328 NR Description: serine carboxypeptidase II-like; protein id:
  misc_feature (14)..(464): Homolog of NCBI NO: 15238327 NR Description: serine carboxypeptidase-II like; protein id:
  misc_feature (1)..(457): Homolog of NCBI NO: 15224454 NR Description: putative serine carboxypeptidase II; protein id: [Arabidopsis thaliana] >gi|25289797|pir||D84503 probable serine
  misc_feature (1)..(294): Homolog of NCBI NO: 28393789 NR Description: putative serine carboxypeptidase II [Arabidopsis
  misc_feature (302)..(457): Homolog of NCBI NO: 28393789 NR Description: putative serine carboxypeptidase II [Arabidopsis
  misc_feature (21)..(457): Homolog of NCBI NO: 30685740 NR Description: serine carboxypeptidase -related [Arabidopsis >gi|18377727|gb|AAL67013.1| putative serine carboxypeptidase II
  misc_feature (21)..(457): Homolog of NCBI NO: 25289793 NR Description: probable serine carboxypeptidase II [imported] - thaliana >gi|2459435|gb|AAB80670.1| putative serine
  misc_feature (21)..(457): Homolog of NCBI NO: 25289785 NR Description: probable serine carboxypeptidase II [imported] - thaliana >gi|12322985|gb|AAG51475.1|AC069471_6 serine
  misc_feature (21)..(457): Homolog of NCBI NO: 18396647 NR Description: serine carboxypeptidase II, putative; protein id: supported by cDNA: gi_16648968 [Arabidopsis thaliana]
MVLQWSCDYNGNLAEGFPVQDLVTKLPGQPEVAFRQFAGYVDIDVKAGRSLFYYFVEAEKQPHSKPLTLWLNGGPGCSSIGGGAFTELGPFYPTGDARGLRRNPKSWNKASNLLFVDSPAGVGWSYSNTTSDYTTGDESTAKDMLVFMLRWLEKFPQFKTRNLFLAGESYAGHYVPQLADVILEYNAQRSNRFKFNLKGIAIGNPLLKLDRDVPAIYEFFWSHGMISDELGLTIMNQCDFEDYTFTDSHNISKLCEAAVNQAGTIITQYVNYYDILLDVCYPSLFEQELRLKKMGTRMSFGVDVCMSFEEQLYLNLPEVQKALHANRTKLPYEWSMCSSLLNYKYTDGNANMLPILKRIVKSKVPVWVFSGDEDSVIPLLGSRTLVKELADDLNFNTTVPYGAWFDKGQVGGWVVEYGNLLTFATVRGAAHMVPYSQPSRALHLFTSFVLGRKLPHKSPPALHD

SEQ ID NO: 95925 - protein, 321 aa, Arabidopsis thaliana
  peptide (1)..(321): Ceres Seq. ID no. 12731166
  misc_feature (1)..(321): Homolog of NCBI NO: 15218514 NR Description: serine carboxypeptidase II, putative; protein id:
  misc_feature (1)..(315): Homolog of NCBI NO: 15238328 NR Description: serine carboxypeptidase II-like; protein id:
  misc_feature (1)..(321): Homolog of NCBI NO: 15238327 NR Description: serine carboxypeptidase-II like; protein id:
  misc_feature (1)..(314): Homolog of NCBI NO: 15224454 NR Description: putative serine carboxypeptidase II; protein id: [Arabidopsis thaliana] >gi|25289797|pir||D84503 probable serine
  misc_feature (1)..(151): Homolog of NCBI NO: 28393789 NR Description: putative serine carboxypeptidase II [Arabidopsis
  misc_feature (159)..(314): Homolog of NCBI NO: 28393789 NR Description: putative serine carboxypeptidase II [Arabidopsis
  misc_feature (1)..(314): Homolog of NCBI NO: 30685740 NR Description: serine carboxypeptidase -related [Arabidopsis >gi|18377727|gb|AAL67013.1| putative serine carboxypeptidase II
  misc_feature (1)..(314): Homolog of NCBI NO: 25289793 NR Description: probable serine carboxypeptidase II [imported] - thaliana >gi|2459435|gb|AAB80670.1| putative serine
  misc_feature (1)..(314): Homolog of NCBI NO: 25289785 NR Description: probable serine carboxypeptidase II [imported] - thaliana >gi|12322985|gb|AAG51475.1|AC069471_6 serine
  misc_feature (1)..(314): Homolog of NCBI NO: 18396647 NR Description: serine carboxypeptidase II, putative; protein id: supported by cDNA: gi_16648968 [Arabidopsis thaliana]
MLVFMLRWLEKFPQFKTRNLFLAGESYAGHYVPQLADVILEYNAQRSNRFKFNLKGIAIGNPLLKLDRDVPAIYEFFWSHGMISDELGLTIMNQCDFEDYTFTDSHNISKLCEAAVNQAGTIITQYVNYYDILLDVCYPSLFEQELRLKKMGTRMSFGVDVCMSFEEQLYLNLPEVQKALHANRTKLPYEWSMCSSLLNYKYTDGNANMLPILKRIVKSKVPVWVFSGDEDSVIPLLGSRTLVKELADDLNFNTTVPYGAWFDKGQVGGWVVEYGNLLTFATVRGAAHMVPYSQPSRALHLFTSFVLGRKLPHKSPPALHD

SEQ ID NO: 95926 - DNA, 1218 bp, Arabidopsis thaliana
  misc_feature (1)..(1218): Ceres Seq. ID no. 12731192
  misc_feature: MA Experiment ID: 20000265 Result: Down-regulated in Transcription
  misc_feature: MA Experiment 20000265 PARAMETER Experiment Name: At_Open_Flower_P Parameter: Age (day) Value: 21
  misc_feature: MA Experiment 20000265 PARAMETER Experiment Name: At_Open_Flower_P Parameter: Plant Line Value: WS
  misc_feature: MA Experiment 20000265 PARAMETER Experiment Name: At_Open_Flower_P Parameter: Tissue Value: Closed Flower vs. Whole Plant
  misc_feature: MA Experiment ID: 20000439 Result: Down-regulated in Transcription
  misc_feature: MA Experiment 20000439 PARAMETER Experiment Name: At_Roots__P Parameter: Age (day) Value: 14 vs. 21
  misc_feature: MA Experiment 20000439 PARAMETER Experiment Name: At_Roots__P Parameter: Organism Value: A. thaliana
  misc_feature: MA Experiment 20000439 PARAMETER Experiment Name: At_Roots__P Parameter: Tissue Value: Roots vs. Whole Plant
  misc_feature: MA Experiment ID: 20000794 Result: Down-regulated in Transcription
  misc_feature: MA Experiment 20000794 PARAMETER Experiment Name: At_Petals_P Parameter: Age (day) Value: 23-25 days
  misc_feature: MA Experiment 20000794 PARAMETER Experiment Name: At_Petals_P Parameter: Plant Line Value: WS
  misc_feature: MA Experiment 20000794 PARAMETER Experiment Name: At_Petals_P Parameter: Tissue Value: Petals vs. Whole plant
  misc_feature: MA Experiment ID: 20001556 Result: Down-regulated in Transcription
  misc_feature: MA Experiment 20001556 PARAMETER Experiment Name: At_Drought_Soil_Dry_P Parameter: Age (day) Value: 26
  misc_feature: MA Experiment 20001556 PARAMETER Experiment Name: At_Drought_Soil_Dry_P Parameter: Organism Value: A. thaliana
  misc_feature: MA Experiment 20001556 PARAMETER Experiment Name: At_Drought_Soil_Dry_P Parameter: Plant Line Value: WS
  misc_feature: MA Experiment 20001556 PARAMETER Experiment Name: At_Drought_Soil_Dry_P Parameter: Post Timepoint (hr) Value: None
  misc_feature: MA Experiment 20001556 PARAMETER Experiment Name: At_Drought_Soil_Dry_P Parameter: Post-Treatment Value: None
  misc_feature: MA Experiment 20001556 PARAMETER Experiment Name: At_Drought_Soil_Dry_P Parameter: Timepoint (day) Value: 12
  misc_feature: MA Experiment 20001556 PARAMETER Experiment Name: At_Drought_Soil_Dry_P Parameter: Treatment Value: Drought vs. No Drought
  misc_feature: MA Experiment ID: 20001560 Result: Down-regulated in Transcription
  misc_feature: MA Experiment 20001560 PARAMETER Experiment Name: At_Drought_Soil_Dry_P Parameter: Age (day) Value: 28
  misc_feature: MA Experiment 20001560 PARAMETER Experiment Name: At_Drought_Soil_Dry_P Parameter: Organism Value: A. thaliana
  misc_feature: MA Experiment 20001560 PARAMETER Experiment Name: At_Drought_Soil_Dry_P Parameter: Plant Line Value: WS
  misc_feature: MA Experiment 20001560 PARAMETER Experiment Name: At_Drought_Soil_Dry_P Parameter: Post Timepoint (hr) Value: None
  misc_feature: MA Experiment 20001560 PARAMETER Experiment Name: At_Drought_Soil_Dry_P Parameter: Post-Treatment Value: None
  misc_feature: MA Experiment 20001560 PARAMETER Experiment Name: At_Drought_Soil_Dry_P Parameter: Timepoint (day) Value: 14
  misc_feature: MA Experiment 20001560 PARAMETER Experiment Name: At_Drought_Soil_Dry_P Parameter: Treatment Value: Drought vs. No Drought
atgatatcaagattttctcttcttctgttcttgttcttggtcatagttcctctatcaaaatcttcaatcttcaaaaccttcatcaaatcctctccttcctcagtcgtcttccctctctccggcaacgtcttccctctcggatactactcagtcttaatgcaaataggaagccctccaaaggcatttcaatttgatattgataccggaagcgatctcacttgggttcaatgtgatgctccttgcagtggttgcactttgcctcctaatcttcagtacaagcctaaaggaaacattatcccgtgctcaaacccgatctgtacagctcttcactggcctaacaagcctcattgcccaaacccgcaagaacaatgtgactatgaagttaaatatgctgatcaaggttcatcaatgggtgcacttgttaccgatcagtttcctttaaaactcgtaaatggctcgttcatgcaacctcctgtagcattcgggtgtggttatgatcagagttaccctagtgcacatcctccgcccgcgactgctggagttttgggacttggaagagggaaaatcggtctcttgacacagcttgtctccgcgggactaacaagaaatgtggttggacattgcttaagttctaaaggtggaggctttttgttctttggagacaatcttgttccttccattggtgtggcatggacaccattattatcacaagacaaccactacacgaccggaccagccgatcttctcttcaacggaaagccaacaggtttaaaaggacttaaactcatttttgacaccggaagctcttacacttacttcaacagcaaggcataccaaacaataattaacctgatcggaaatgatctgaaagtctcaccgttgaaggttgcgaaagaagataagaccttaccaatctgctggaaaggagctaagccctttaaatctgttcttgaggtcaagaactttttcaagaccataacaatcaacttcaccaatgggagaagaaacactcagctctatcttgcacccgaattatatctcattgtctctaaaactggaaacgtatgcttgggactactaaatggaagtgaagtaggattacaaaactccaacgtaatcggagatatctctatgcaagggctaatgatgatctacgacaacgagaagcaacaactcggatgggtttcttcagattgcaataagcttcccaaaacatga

SEQ ID NO: 95927 - protein, 405 aa, Arabidopsis thaliana
  peptide (1)..(405): Ceres Seq. ID no. 12731193
  misc_feature (14)..(397): Pfam Name: Eukaryotic aspartyl protease Pfam Description: Eukaryotic aspartyl protease
  misc_feature (1)..(405): Homolog of NCBI NO: 15219354 NR Description: nucellin, putative; protein id: At1g44130.1
  misc_feature (33)..(405): Homolog of NCBI NO: 30699263 NR Description: nucellin protein, putative [Arabidopsis thaliana]
  misc_feature (33)..(403): Homolog of NCBI NO: 30699261 NR Description: nucellin protein, putative [Arabidopsis thaliana]
  misc_feature (33)..(405): Homolog of NCBI NO: 25350204 NR Description: nucellin-like protein, 27671-25467 [imported] -
  misc_feature (20)..(402): Homolog of NCBI NO: 18418224 NR Description: nucellin -like protein; protein id: At4g33490.1,
  misc_feature (20)..(402): Homolog of NCBI NO: 26452545 NR Description: putative nucellin [Arabidopsis thaliana]
  misc_feature (33)..(350): Homolog of NCBI NO: 7484812 NR Description: aspartic proteinase homolog F17M5.250 -
  misc_feature (55)..(405): Homolog of NCBI NO: 21805926 NR Description: nucellin-like aspartic protease [Zea mays]
  misc_feature (32)..(405): Homolog of NCBI NO: 33340111 NR Description: nucellin-like protein [Oryza sativa]
  misc_feature (14)..(399): Homolog of NCBI NO: 18402471 NR Description: expressed protein; protein id: At1g49050.1, by cDNA: gi_13430539 [Arabidopsis thaliana] F27J15.15 [Arabidopsis thaliana]
MISRFSLLLFLFLVIVPLSKSSIFKTFIKSSPSSVVFPLSGNVFPLGYYSVLMQIGSPPKAFQFDIDTGSDLTWVQCDAPCSGCTLPPNLQYKPKGNIIPCSNPICTALHWPNKPHCPNPQEQCDYEVKYADQGSSMGALVTDQFPLKLVNGSFMQPPVAFGCGYDQSYPSAHPPPATAGVLGLGRGKIGLLTQLVSAGLTRNVVGHCLSSKGGGFLFFGDNLVPSIGVAWTPLLSQDNHYTTGPADLLFNGKPTGLKGLKLIFDTGSSYTYFNSKAYQTIINLIGNDLKVSPLKVAKEDKTLPICWKGAKPFKSVLEVKNFFKTITINFTNGRRNTQLYLAPELYLIVSKTGNVCLGLLNGSEVGLQNSNVIGDISMQGLMMIYDNEKQQLGWVSSDCNKLPKT

SEQ ID NO: 95928 - protein, 353 aa, Arabidopsis thaliana
  peptide (1)..(353): Ceres Seq. ID no. 12731194
  misc_feature (1)..(345): Pfam Name: Eukaryotic aspartyl protease Pfam Description: Eukaryotic aspartyl protease
  misc_feature (1)..(353): Homolog of NCBI NO: 15219354 NR Description: nucellin, putative; protein id: At1g44130.1
  misc_feature (1)..(353): Homolog of NCBI NO: 30699263 NR Description: nucellin protein, putative [Arabidopsis thaliana]
  misc_feature (1)..(351): Homolog of NCBI NO: 30699261 NR Description: nucellin protein, putative [Arabidopsis thaliana]
  misc_feature (1)..(353): Homolog of NCBI NO: 25350204 NR Description: nucellin-like protein, 27671-25467 [imported] -
  misc_feature (1)..(350): Homolog of NCBI NO: 18418224 NR Description: nucellin -like protein; protein id: At4g33490.1,
  misc_feature (1)..(350): Homolog of NCBI NO: 26452545 NR Description: putative nucellin [Arabidopsis thaliana]
  misc_feature (1)..(298): Homolog of NCBI NO: 7484812 NR Description: aspartic proteinase homolog F17M5.250 -
  misc_feature (3)..(353): Homolog of NCBI NO: 21805926 NR Description: nucellin-like aspartic protease [Zea mays]
  misc_feature (1)..(353): Homolog of NCBI NO: 33340111 NR Description: nucellin-like protein [Oryza sativa]
  misc_feature (1)..(347): Homolog of NCBI NO: 18402471 NR Description: expressed protein; protein id: At1g49050.1, by cDNA: gi_13430539 [Arabidopsis thaliana] F27J15.15 [Arabidopsis thaliana]
MQIGSPPKAFQFDIDTGSDLTWVQCDAPCSGCTLPPNLQYKPKGNIIPCSNPICTALHWPNKPHCPNPQEQCDYEVKYADQGSSMGALVTDQFPLKLVNGSFMQPPVAFGCGYDQSYPSAHPPPATAGVLGLGRGKIGLLTQLVSAGLTRNVVGHCLSSKGGGFLFFGDNLVPSIGVAWTPLLSQDNHYTTGPADLLFNGKPTGLKGLKLIFDTGSSYTYFNSKAYQTIINLIGNDLKVSPLKVAKEDKTLPICWKGAKPFKSVLEVKNFFKTITINFTNGRRNTQLYLAPELYLIVSKTGNVCLGLLNGSEVGLQNSNVIGDISMQGLMMIYDNEKQQLGWVSSDCNKLPKT

SEQ ID NO: 95929 - protein, 269 aa, Arabidopsis thaliana
  peptide (1)..(269): Ceres Seq. ID no. 12731195
  misc_feature (1)..(261): Pfam Name: Eukaryotic aspartyl protease Pfam Description: Eukaryotic aspartyl protease
  misc_feature (1)..(269): Homolog of NCBI NO: 15219354 NR Description: nucellin, putative; protein id: At1g44130.1
  misc_feature (1)..(269): Homolog of NCBI NO: 30699263 NR Description: nucellin protein, putative [Arabidopsis thaliana]
  misc_feature (1)..(267): Homolog of NCBI NO: 30699261 NR Description: nucellin protein, putative [Arabidopsis thaliana]
  misc_feature (1)..(269): Homolog of NCBI NO: 25350204 NR Description: nucellin-like protein, 27671-25467 [imported] -
  misc_feature (1)..(266): Homolog of NCBI NO: 18418224 NR Description: nucellin -like protein; protein id: At4g33490.1,
  misc_feature (1)..(266): Homolog of NCBI NO: 26452545 NR Description: putative nucellin [Arabidopsis thaliana]
  misc_feature (1)..(214): Homolog of NCBI NO: 7484812 NR Description: aspartic proteinase homolog F17M5.250 -
  misc_feature (1)..(269): Homolog of NCBI NO: 21805926 NR Description: nucellin-like aspartic protease [Zea mays]
  misc_feature (1)..(269): Homolog of NCBI NO: 33340111 NR Description: nucellin-like protein [Oryza sativa]
  misc_feature (1)..(263): Homolog of NCBI NO: 18402471 NR Description: expressed protein; protein id: At1g49050.1, by cDNA: gi_13430539 [Arabidopsis thaliana] F27J15.15 [Arabidopsis thaliana]
MGALVTDQFPLKLVNGSFMQPPVAFGCGYDQSYPSAHPPPATAGVLGLGRGKIGLLTQLVSAGLTRNVVGHCLSSKGGGFLFFGDNLVPSIGVAWTPLLSQDNHYTTGPADLLFNGKPTGLKGLKLIFDTGSSYTYFNSKAYQTIINLIGNDLKVSPLKVAKEDKTLPICWKGAKPFKSVLEVKNFFKTITINFTNGRRNTQLYLAPELYLIVSKTGNVCLGLLNGSEVGLQNSNVIGDISMQGLMMIYDNEKQQLGWVSSDCNKLPKT

SEQ ID NO: 95930 - DNA, 1034 bp, Arabidopsis thaliana
  misc_feature (1)..(1034): Ceres Seq. ID no. 12731212
  misc_feature: MA Experiment ID: 20000171 Result: Down-regulated in Transcription
  misc_feature: MA Experiment 20000171 PARAMETER Experiment Name: At_42deg_Heat_P Parameter: Age (day) Value: 14
  misc_feature: MA Experiment 20000171 PARAMETER Experiment Name: At_42deg_Heat_P Parameter: Organism Value: A. thaliana
  misc_feature: MA Experiment 20000171 PARAMETER Experiment Name: At_42deg_Heat_P Parameter: Plant Line Value: WS
  misc_feature: MA Experiment 20000171 PARAMETER Experiment Name: At_42deg_Heat_P Parameter: Temperature (deg C) Value: 42 vs. 22
  misc_feature: MA Experiment 20000171 PARAMETER Experiment Name: At_42deg_Heat_P Parameter: Timepoint (hr) Value: 1
  misc_feature: MA Experiment 20000171 PARAMETER Experiment Name: At_42deg_Heat_P Parameter: Tissue Value: Aerial
  misc_feature: MA Experiment ID: 20000179 Result: Up-regulated in Transcription
  misc_feature: MA Experiment 20000179 PARAMETER Experiment Name: At_Germinating_Seeds_P Parameter: Age (hr) Value: 6 vs. 0
  misc_feature: MA Experiment 20000179 PARAMETER Experiment Name: At_Germinating_Seeds_P Parameter: Tissue Value: Germinating Seeds
  misc_feature: MA Experiment ID: 20000180 Result: Up-regulated in Transcription
  misc_feature: MA Experiment 20000180 PARAMETER Experiment Name: At_Germinating_Seeds_P Parameter: Age (hr) Value: 24 vs. 0
  misc_feature: MA Experiment 20000180 PARAMETER Experiment Name: At_Germinating_Seeds_P Parameter: Tissue Value: Germinating Seeds
  misc_feature: MA Experiment ID: 20000185 Result: Down-regulated in Transcription
  misc_feature: MA Experiment 20000185 PARAMETER Experiment Name: At_Roots__P Parameter: Age (day) Value: 7 vs. 21
  misc_feature: MA Experiment 20000185 PARAMETER Experiment Name: At_Roots__P Parameter: Organism Value: A. thaliana
  misc_feature: MA Experiment 20000185 PARAMETER Experiment Name: At_Roots__P Parameter: Tissue Value: Roots vs. Whole Plant
  misc_feature: MA Experiment ID: 20000227 Result: Up-regulated in Transcription
  misc_feature: MA Experiment 20000227 PARAMETER Experiment Name: At_Root-Tips-vs-Tops_P Parameter: Tissue Value: Root Tips vs. Root Tops
  misc_feature: MA Experiment ID: 20000264 Result: Up-regulated in Transcription
  misc_feature: MA Experiment 20000264 PARAMETER Experiment Name: At_Open_Flower_P Parameter: Age (day) Value: 21
  misc_feature: MA Experiment 20000264 PARAMETER Experiment Name: At_Open_Flower_P Parameter: Plant Line Value: WS
  misc_feature: MA Experiment 20000264 PARAMETER Experiment Name: At_Open_Flower_P Parameter: Tissue Value: Open Flower vs. Whole Plant
  misc_feature: MA Experiment ID: 20000265 Result: Up-regulated in Transcription
  misc_feature: MA Experiment 20000265 PARAMETER Experiment Name: At_Open_Flower_P Parameter: Age (day) Value: 21
  misc_feature: MA Experiment 20000265 PARAMETER Experiment Name: At_Open_Flower_P Parameter: Plant Line Value: WS
  misc_feature: MA Experiment 20000265 PARAMETER Experiment Name: At_Open_Flower_P Parameter: Tissue Value: Closed Flower vs. Whole Plant
  misc_feature: MA Experiment ID: 20000286 Result: Up-regulated in Transcription
  misc_feature: MA Experiment 20000286 PARAMETER Experiment Name: At_Open_Flower_P Parameter: Age (day) Value: 21
  misc_feature: MA Experiment 20000286 PARAMETER Experiment Name: At_Open_Flower_P Parameter: Plant Line Value: WS
  misc_feature: MA Experiment 20000286 PARAMETER Experiment Name: At_Open_Flower_P Parameter: Tissue Value: Half Open vs. Whole Plant
  misc_feature: MA Experiment ID: 20000439 Result: Down-regulated in Transcription
  misc_feature: MA Experiment 20000439 PARAMETER Experiment Name: At_Roots__P Parameter: Age (day) Value: 14 vs. 21
  misc_feature: MA Experiment 20000439 PARAMETER Experiment Name: At_Roots__P Parameter: Organism Value: A. thaliana
  misc_feature: MA Experiment 20000439 PARAMETER Experiment Name: At_Roots__P Parameter: Tissue Value: Roots vs. Whole Plant
  misc_feature: MA Experiment ID: 20001555 Result: Up-regulated in Transcription
  misc_feature: MA Experiment 20001555 PARAMETER Experiment Name: At_Drought_Soil_Dry_P Parameter: Age (day) Value: 24
  misc_feature: MA Experiment 20001555 PARAMETER Experiment Name: At_Drought_Soil_Dry_P Parameter: Organism Value: A. thaliana
  misc_feature: MA Experiment 20001555 PARAMETER Experiment Name: At_Drought_Soil_Dry_P Parameter: Plant Line Value: WS
  misc_feature: MA Experiment 20001555 PARAMETER Experiment Name: At_Drought_Soil_Dry_P Parameter: Post Timepoint (hr) Value: None
  misc_feature: MA Experiment 20001555 PARAMETER Experiment Name: At_Drought_Soil_Dry_P Parameter: Post-Treatment Value: None
  misc_feature: MA Experiment 20001555 PARAMETER Experiment Name: At_Drought_Soil_Dry_P Parameter: Timepoint (day) Value: 10
  misc_feature: MA Experiment 20001555 PARAMETER Experiment Name: At_Drought_Soil_Dry_P Parameter: Treatment Value: Drought vs. No Drought
  misc_feature: MA Experiment ID: 20001556 Result: Up-regulated in Transcription
  misc_feature: MA Experiment 20001556 PARAMETER Experiment Name: At_Drought_Soil_Dry_P Parameter: Age (day) Value: 26
  misc_feature: MA Experiment 20001556 PARAMETER Experiment Name: At_Drought_Soil_Dry_P Parameter: Organism Value: A. thaliana
  misc_feature: MA Experiment 20001556 PARAMETER Experiment Name: At_Drought_Soil_Dry_P Parameter: Plant Line Value: WS
  misc_feature: MA Experiment 20001556 PARAMETER Experiment Name: At_Drought_Soil_Dry_P Parameter: Post Timepoint (hr) Value: None
  misc_feature: MA Experiment 20001556 PARAMETER Experiment Name: At_Drought_Soil_Dry_P Parameter: Post-Treatment Value: None
  misc_feature: MA Experiment 20001556 PARAMETER Experiment Name: At_Drought_Soil_Dry_P Parameter: Timepoint (day) Value: 12
  misc_feature: MA Experiment 20001556 PARAMETER Experiment Name: At_Drought_Soil_Dry_P Parameter: Treatment Value: Drought vs. No Drought
  misc_feature: MA Experiment ID: 20001559 Result: Up-regulated in Transcription
  misc_feature: MA Experiment 20001559 PARAMETER Experiment Name: At_Drought_Soil_Dry_P Parameter: Age (day) Value: 28
  misc_feature: MA Experiment 20001559 PARAMETER Experiment Name: At_Drought_Soil_Dry_P Parameter: Organism Value: A. thaliana
  misc_feature: MA Experiment 20001559 PARAMETER Experiment Name: At_Drought_Soil_Dry_P Parameter: Plant Line Value: WS
  misc_feature: MA Experiment 20001559 PARAMETER Experiment Name: At_Drought_Soil_Dry_P Parameter: Post Timepoint (hr) Value: 29
  misc_feature: MA Experiment 20001559 PARAMETER Experiment Name: At_Drought_Soil_Dry_P Parameter: Post-Treatment Value: Re-Water vs. No Drought
  misc_feature: MA Experiment 20001559 PARAMETER Experiment Name: At_Drought_Soil_Dry_P Parameter: Timepoint (day) Value: 14
  misc_feature: MA Experiment 20001559 PARAMETER Experiment Name: At_Drought_Soil_Dry_P Parameter: Treatment Value: Drought vs. No Drought
  misc_feature: MA Experiment ID: 20001904 Result: Up-regulated in Transcription
  misc_feature: MA Experiment 20001904 PARAMETER Experiment Name: At_Drought_Reproduction_P Parameter: Age (day) Value: 37
  misc_feature: MA Experiment 20001904 PARAMETER Experiment Name: At_Drought_Reproduction_P Parameter: Organism Value: A. thaliana
  misc_feature: MA Experiment 20001904 PARAMETER Experiment Name: At_Drought_Reproduction_P Parameter: Plant Line Value: WS
  misc_feature: MA Experiment 20001904 PARAMETER Experiment Name: At_Drought_Reproduction_P Parameter: Timepoint (day) Value: 7
  misc_feature: MA Experiment 20001904 PARAMETER Experiment Name: At_Drought_Reproduction_P Parameter: Tissue Value: Rosettes
  misc_feature: MA Experiment 20001904 PARAMETER Experiment Name: At_Drought_Reproduction_P Parameter: Treatment Value: Drought vs. No Drought
actaccaattaaatctctctttttcttctcttaccattttcacattttcgagttttacaccaaagcctcttcactttctctctctctctactatagtctcctactacctactactacttcttctctctctctttcattcactacataaaaagcttcgagctcccatcactatataccctccaaagatgcaattttcaagaaactcaatccttaggcaactaagccgaaaagaaggttggagatcggcttctaaaaggtggacttccggagatagctcaacagccttcaacgacgacacaagtggtggtggttactcatcaatggagggtctttatggagtttactccggtggagacacggcggcgagaagtaagagagtgatggttgtagttgatgaaagttcgaggtctaagcatgctatgatgtgggctttgactcatttgactaacaaaggagatttagtgactcttcttcatgttgtgtctcctgatgatgaagctactccttctttggctcaatctcttggttctctttgcaaagcttgtaaacccgaggtggatgtggaggcattggtgattcaaggaccaaagctagcaacagtgttaagccaagtaaagaaacttgaagtctctgttcttgtgttgggtcagaagaaatctgcaccactcatctcttgcttatgtggacctagcagatcagaggagctcgtgaatcgttgcatcaacggtgcagattgtttaacgattggtgtgagaaaacaatgcaaaggtgttggtgggtacttgatcaatacacgatggcagaagaatttctggctcttggcctaatcacaattctaatcttattagataatttgtgttaattctgtgtttattgtagtttaataaactctatgtagtctctttgttgtcttatgttaacctaacttgtcttatatgtcttgtaagaaaaattaaagttgaatctttttatcccactacatcgattcctccgtagtctccaaattcttgtcccatataaacaaatacgttttc

SEQ ID NO: 95931 - protein, 274 aa, Arabidopsis thaliana
  peptide (1)..(274): Ceres Seq. ID no. 12731213
  misc_feature (122)..(251): Pfam Name: Universal stress protein family Pfam Description: Universal stress protein family
  misc_feature (62)..(274): Homolog of NCBI NO: 15219439 NR Description: hypothetical protein; protein id: At1g44760.1, by cDNA: gi_17380775 [Arabidopsis thaliana]
  misc_feature (78)..(274): Homolog of NCBI NO: 34907308 NR Description: hypothetical protein~similar to Arabidopsis
  misc_feature (164)..(274): Homolog of NCBI NO: 18409190 NR Description: expressed protein; protein id: At1g69080.1, by cDNA: 22327. [Arabidopsis thaliana]
  misc_feature (164)..(274): Homolog of NCBI NO: 21592322 NR Description: unknown [Arabidopsis thaliana]
  misc_feature (167)..(274): Homolog of NCBI NO: 15237955 NR Description: putative protein; protein id: At5g17390.1
  misc_feature (167)..(274): Homolog of NCBI NO: 15228516 NR Description: hypothetical protein; protein id: At3g03290.1 thaliana] >gi|6714411|gb|AAF26099.1|AC012328_2 hypothetical
  misc_feature (127)..(218): Homolog of NCBI NO: 15227695 NR Description: unknown protein; protein id: At2g03720.1
  misc_feature (90)..(222): Homolog of NCBI NO: 15237955 NR Description: putative protein; protein id: At5g17390.1
YQLNLSFSSLTIFTFSSFTPKPLHFLSLSTIVSYYLLLLLLSLFHSLHKKLRAPITIYPPKMQFSRNSILRQLSRKEGWRSASKRWTSGDSSTAFNDDTSGGGYSSMEGLYGVYSGGDTAARSKRVMVVVDESSRSKHAMMWALTHLTNKGDLVTLLHVVSPDDEATPSLAQSLGSLCKACKPEVDVEALVIQGPKLATVLSQVKKLEVSVLVLGQKKSAPLISCLCGPSRSEELVNRCINGADCLTIGVRKQCKGVGGYLINTRWQKNFWLLA

SEQ ID NO: 95932 - protein, 213 aa, Arabidopsis thaliana
  peptide (1)..(213): Ceres Seq. ID no. 12731214
  misc_feature (61)..(190): Pfam Name: Universal stress protein family Pfam Description: Universal stress protein family
  misc_feature (1)..(213): Homolog of NCBI NO: 15219439 NR Description: hypothetical protein; protein id: At1g44760.1, by cDNA: gi_17380775 [Arabidopsis thaliana]
  misc_feature (17)..(213): Homolog of NCBI NO: 34907308 NR Description: hypothetical protein~similar to Arabidopsis
  misc_feature (103)..(213): Homolog of NCBI NO: 18409190 NR Description: expressed protein; protein id: At1g69080.1, by cDNA: 22327. [Arabidopsis thaliana]
  misc_feature (103)..(213): Homolog of NCBI NO: 21592322 NR Description: unknown [Arabidopsis thaliana]
  misc_feature (106)..(213): Homolog of NCBI NO: 15237955 NR Description: putative protein; protein id: At5g17390.1
  misc_feature (106)..(213): Homolog of NCBI NO: 15228516 NR Description: hypothetical protein; protein id: At3g03290.1 thaliana] >gi|6714411|gb|AAF26099.1|AC012328_2 hypothetical
  misc_feature (66)..(157): Homolog of NCBI NO: 15227695 NR Description: unknown protein; protein id: At2g03720.1
  misc_feature (29)..(161): Homolog of NCBI NO: 15237955 NR Description: putative protein; protein id: At5g17390.1
MQFSRNSILRQLSRKEGWRSASKRWTSGDSSTAFNDDTSGGGYSSMEGLYGVYSGGDTAARSKRVMVVVDESSRSKHAMMWALTHLTNKGDLVTLLHVVSPDDEATPSLAQSLGSLCKACKPEVDVEALVIQGPKLATVLSQVKKLEVSVLVLGQKKSAPLISCLCGPSRSEELVNRCINGADCLTIGVRKQCKGVGGYLINTRWQKNFWLLA

SEQ ID NO: 95933 - protein, 168 aa, Arabidopsis thaliana; identical to SEQ ID NO: 28118
  peptide (1)..(168): Ceres Seq. ID no. 12731215
  misc_feature (16)..(145): Pfam Name: Universal stress protein family Pfam Description: Universal stress protein family
  misc_feature (1)..(168): Homolog of NCBI NO: 15219439 NR Description: hypothetical protein; protein id: At1g44760.1, by cDNA: gi_17380775 [Arabidopsis thaliana]
  misc_feature (1)..(168): Homolog of NCBI NO: 34907308 NR Description: hypothetical protein~similar to Arabidopsis
  misc_feature (58)..(168): Homolog of NCBI NO: 18409190 NR Description: expressed protein; protein id: At1g69080.1, by cDNA: 22327. [Arabidopsis thaliana]
  misc_feature (58)..(168): Homolog of NCBI NO: 21592322 NR Description: unknown [Arabidopsis thaliana]
  misc_feature (61)..(168): Homolog of NCBI NO: 15237955 NR Description: putative protein; protein id: At5g17390.1
  misc_feature (61)..(168): Homolog of NCBI NO: 15228516 NR Description: hypothetical protein; protein id: At3g03290.1 thaliana] >gi|6714411|gb|AAF26099.1|AC012328_2 hypothetical
  misc_feature (21)..(112): Homolog of NCBI NO: 15227695 NR Description: unknown protein; protein id: At2g03720.1
  misc_feature (1)..(116): Homolog of NCBI NO: 15237955 NR Description: putative protein; protein id: At5g17390.1

SEQ ID NO: 95934 - DNA, 636 bp, Arabidopsis thaliana
  misc_feature (1)..(636): Ceres Seq. ID no. 12731219
  misc_feature: MA Experiment ID: 20000173 Result: Down-regulated in Transcription
  misc_feature: MA Experiment 20000173 PARAMETER Experiment Name: At_42deg_Heat_P Parameter: Age (day) Value: 14
  misc_feature: MA Experiment 20000173 PARAMETER Experiment Name: At_42deg_Heat_P Parameter: Organism Value: A. thaliana
  misc_feature: MA Experiment 20000173 PARAMETER Experiment Name: At_42deg_Heat_P Parameter: Plant Line Value: WS
  misc_feature: MA Experiment 20000173 PARAMETER Experiment Name: At_42deg_Heat_P Parameter: Temperature (deg C) Value: 42 vs. 22
  misc_feature: MA Experiment 20000173 PARAMETER Experiment Name: At_42deg_Heat_P Parameter: Timepoint (hr) Value: 6
  misc_feature: MA Experiment 20000173 PARAMETER Experiment Name: At_42deg_Heat_P Parameter: Tissue Value: Aerial
  misc_feature: MA Experiment ID: 20000180 Result: Up-regulated in Transcription
  misc_feature: MA Experiment 20000180 PARAMETER Experiment Name: At_Germinating_Seeds_P Parameter: Age (hr) Value: 24 vs. 0
  misc_feature: MA Experiment 20000180 PARAMETER Experiment Name: At_Germinating_Seeds_P Parameter: Tissue Value: Germinating Seeds
  misc_feature: MA Experiment ID: 20000264 Result: Down-regulated in Transcription
  misc_feature: MA Experiment 20000264 PARAMETER Experiment Name: At_Open_Flower_P Parameter: Age (day) Value: 21
  misc_feature: MA Experiment 20000264 PARAMETER Experiment Name: At_Open_Flower_P Parameter: Plant Line Value: WS
  misc_feature: MA Experiment 20000264 PARAMETER Experiment Name: At_Open_Flower_P Parameter: Tissue Value: Open Flower vs. Whole Plant
  misc_feature: MA Experiment ID: 20000441 Result: Up-regulated in Transcription
  misc_feature: MA Experiment 20000441 PARAMETER Experiment Name: At_1uM_BR-BRZ__P Parameter: Tissue Value: Shoot Apices
  misc_feature: MA Experiment 20000441 PARAMETER Experiment Name: At_1uM_BR-BRZ__P Parameter: Treatment Value: 1uM BR vs. No Treatment
  misc_feature: MA Experiment ID: 20000443 Result: Up-regulated in Transcription
  misc_feature: MA Experiment 20000443 PARAMETER Experiment Name: At_1uM_BR-BRZ__P Parameter: Tissue Value: Shoot Apices
  misc_feature: MA Experiment 20000443 PARAMETER Experiment Name: At_1uM_BR-BRZ__P Parameter: Treatment Value: 1uM BRZ vs. No Treatment
  misc_feature: MA Experiment ID: 20000453 Result: Up-regulated in Transcription
  misc_feature: MA Experiment 20000453 PARAMETER Experiment Name: At_100uM_ABA_P Parameter: Age (day) Value: 15
  misc_feature: MA Experiment 20000453 PARAMETER Experiment Name: At_100uM_ABA_P Parameter: Organism Value: A. thaliana
  misc_feature: MA Experiment 20000453 PARAMETER Experiment Name: At_100uM_ABA_P Parameter: Plant Line Value: WS
  misc_feature: MA Experiment 20000453 PARAMETER Experiment Name: At_100uM_ABA_P Parameter: Timepoint (hr) Value: 24
  misc_feature: MA Experiment 20000453 PARAMETER Experiment Name: At_100uM_ABA_P Parameter: Tissue Value: Aerial
  misc_feature: MA Experiment 20000453 PARAMETER Experiment Name: At_100uM_ABA_P Parameter: Treatment Value: 100uM ABA vs. No Treatment
  misc_feature: MA Experiment ID: 20000460 Result: Up-regulated in Transcription
  misc_feature: MA Experiment 20000460 PARAMETER Experiment Name: At_10percent_PEG_P Parameter: Age (day) Value: 12
  misc_feature: MA Experiment 20000460 PARAMETER Experiment Name: At_10percent_PEG_P Parameter: Organism Value: A. thaliana
  misc_feature: MA Experiment 20000460 PARAMETER Experiment Name: At_10percent_PEG_P Parameter: Plant Line Value: WS
  misc_feature: MA Experiment 20000460 PARAMETER Experiment Name: At_10percent_PEG_P Parameter: Timepoint (day) Value: 12
  misc_feature: MA Experiment 20000460 PARAMETER Experiment Name: At_10percent_PEG_P Parameter: Tissue Value: Whole Plant
  misc_feature: MA Experiment 20000460 PARAMETER Experiment Name: At_10percent_PEG_P Parameter: Treatment Value: 10percent PEG vs. No Treatment
  misc_feature: MA Experiment ID: 20001248 Result: Up-regulated in Transcription
  misc_feature: MA Experiment 20001248 PARAMETER Experiment Name: At_Far-red-induction_P Parameter: Age (day) Value: 7
  misc_feature: MA Experiment 20001248 PARAMETER Experiment Name: At_Far-red-induction_P Parameter: Light Value: Far-red vs. White
  misc_feature: MA Experiment 20001248 PARAMETER Experiment Name: At_Far-red-induction_P Parameter: Organism Value: A. thaliana
  misc_feature: MA Experiment 20001248 PARAMETER Experiment Name: At_Far-red-induction_P Parameter: Plant Line Value: Columbia
  misc_feature: MA Experiment 20001248 PARAMETER Experiment Name: At_Far-red-induction_P Parameter: Timepoint (hr) Value: 4
  misc_feature: MA Experiment 20001248 PARAMETER Experiment Name: At_Far-red-induction_P Parameter: Tissue Value: Whole Plant
  misc_feature: MA Experiment ID: 20001450 Result: Up-regulated in Transcription
  misc_feature: MA Experiment 20001450 PARAMETER Experiment Name: At_Far-red-induction_P Parameter: Age (day) Value: 7
  misc_feature: MA Experiment 20001450 PARAMETER Experiment Name: At_Far-red-induction_P Parameter: Light Value: Far-red vs. White
  misc_feature: MA Experiment 20001450 PARAMETER Experiment Name: At_Far-red-induction_P Parameter: Organism Value: A. thaliana
  misc_feature: MA Experiment 20001450 PARAMETER Experiment Name: At_Far-red-induction_P Parameter: Plant Line Value: Columbia
  misc_feature: MA Experiment 20001450 PARAMETER Experiment Name: At_Far-red-induction_P Parameter: Timepoint (hr) Value: 8
  misc_feature: MA Experiment 20001450 PARAMETER Experiment Name: At_Far-red-induction_P Parameter: Tissue Value: Whole Plant
  misc_feature: MA Experiment ID: 20001558 Result: Up-regulated in Transcription
  misc_feature: MA Experiment 20001558 PARAMETER Experiment Name: At_Drought_Soil_Dry_P Parameter: Age (day) Value: 27
  misc_feature: MA Experiment 20001558 PARAMETER Experiment Name: At_Drought_Soil_Dry_P Parameter: Organism Value: A. thaliana
  misc_feature: MA Experiment 20001558 PARAMETER Experiment Name: At_Drought_Soil_Dry_P Parameter: Plant Line Value: WS
  misc_feature: MA Experiment 20001558 PARAMETER Experiment Name: At_Drought_Soil_Dry_P Parameter: Post Timepoint (hr) Value: 6
  misc_feature: MA Experiment 20001558 PARAMETER Experiment Name: At_Drought_Soil_Dry_P Parameter: Post-Treatment Value: Re-Water vs. No Drought
  misc_feature: MA Experiment 20001558 PARAMETER Experiment Name: At_Drought_Soil_Dry_P Parameter: Timepoint (day) Value: 13
  misc_feature: MA Experiment 20001558 PARAMETER Experiment Name: At_Drought_Soil_Dry_P Parameter: Treatment Value: Drought vs. No Drought
  misc_feature: MA Experiment ID: 20001770 Result: Up-regulated in Transcription
  misc_feature: MA Experiment 20001770 PARAMETER Experiment Name: At_Far-red-enriched-adult_P Parameter: Age (day) Value: 28
  misc_feature: MA Experiment 20001770 PARAMETER Experiment Name: At_Far-red-enriched-adult_P Parameter: Light Value: Far-red enriched vs. White
  misc_feature: MA Experiment 20001770 PARAMETER Experiment Name: At_Far-red-enriched-adult_P Parameter: Organism Value: A. thaliana
  misc_feature: MA Experiment 20001770 PARAMETER Experiment Name: At_Far-red-enriched-adult_P Parameter: Plant Line Value: Columbia
  misc_feature: MA Experiment 20001770 PARAMETER Experiment Name: At_Far-red-enriched-adult_P Parameter: Timepoint (hr) Value: 8
  misc_feature: MA Experiment 20001770 PARAMETER Experiment Name: At_Far-red-enriched-adult_P Parameter: Tissue Value: Aerial
  misc_feature: MA Experiment ID: 20001910 Result: Down-regulated in Transcription
  misc_feature: MA Experiment 20001910 PARAMETER Experiment Name: At_Drought_Reproduction_P Parameter: Age (day) Value: 37
  misc_feature: MA Experiment 20001910 PARAMETER Experiment Name: At_Drought_Reproduction_P Parameter: Organism Value: A. thaliana
  misc_feature: MA Experiment 20001910 PARAMETER Experiment Name: At_Drought_Reproduction_P Parameter: Plant Line Value: WS
  misc_feature: MA Experiment 20001910 PARAMETER Experiment Name: At_Drought_Reproduction_P Parameter: Timepoint (day) Value: 7
  misc_feature: MA Experiment 20001910 PARAMETER Experiment Name: At_Drought_Reproduction_P Parameter: Tissue Value: Flowers
  misc_feature: MA Experiment 20001910 PARAMETER Experiment Name: At_Drought_Reproduction_P Parameter: Treatment Value: Drought vs. No Drought
atggtgaaaacacttcaaaagacaccaaagagaatgtcatctccatcatcatcatcttcatcatcctcatcaacatcatcatcatccataaggatgaagaagtacaagggagtgagaatgagaagttggggttcatgggtttcagagatcagagctcctaatcaaaagacaaggatctggcttggttcttactcaactgctgaagccgcggctagagcctacgacgcagcactcctatgtcttaaaggatcctcagctaataatctcaacttcccagagatctcaacttctctctaccatattatcaacaatggtgataacaacaatgacatgtcccctaagtctatacaaagagtagcagctgcagctgctgctgccaacacagatccttcctcatcatcagtctctacttcatctccattgctttcctctccatctgaagatctctatgatgttgtctccatgtcacagtatgaccaacaagtctccttgtctgaatcatcatcatggtacaactgctttgatggtgatgatcagttcatgttcattaatggagtctccgcgccgtatttgacaacatcactttctgatgatttctttgaggaaggagatatcagattatggaacttctgctga

SEQ ID NO: 95935 - protein, 211 aa, Arabidopsis thaliana
  peptide (1)..(211): Ceres Seq. ID no. 12731220
  misc_feature (32)..(97): Pfam Name: AP2 domain Pfam Description: AP2 domain
  misc_feature (1)..(211): Homolog of NCBI NO: 15219452 NR Description: transcription factor, putative; protein id: [Arabidopsis thaliana] >gi|25352175|pir||D96507 hypothetical
  misc_feature (8)..(210): Homolog of NCBI NO: 15219139 NR Description: TINY-like protein; protein id: At1g21910.1, by cDNA: 19721. [Arabidopsis thaliana] >gi|25402947|pir||D86352
  misc_feature (8)..(210): Homolog of NCBI NO: 21554056 NR Description: TINY-like protein [Arabidopsis thaliana]
  misc_feature (5)..(172): Homolog of NCBI NO: 15224024 NR Description: hypothetical protein; protein id: At1g77640.1
  misc_feature (23)..(135): Homolog of NCBI NO: 34902130 NR Description: hypothetical protein [Oryza sativa (japonica group)] >gi|29893600|gb|AAP06854.1| hypothetical protein [Oryza
  misc_feature (2)..(201): Homolog of NCBI NO: 15223860 NR Description: transcription factor TINY, putative; protein id:
  misc_feature (7)..(184): Homolog of NCBI NO: 15235858 NR Description: AP2 domain TINY-related protein; protein id: [Arabidopsis thaliana] >gi|25350649|pir||F85186 apetala2 domain
  misc_feature (6)..(150): Homolog of NCBI NO: 15227471 NR Description: putative AP2 domain transcription factor; protein At2g35700.1 [Arabidopsis thaliana] >gi|25350648|pir||H84771
  misc_feature (9)..(162): Homolog of NCBI NO: 9279711 NR Description: transcription factor TINY-like protein
  misc_feature (9)..(162): Homolog of NCBI NO: 15228171 NR Description: transcription factor TINY, putative; protein id: [Arabidopsis thaliana] >gi|2062174|gb|AAB63648.1| transcription
MVKTLQKTPKRMSSPSSSSSSSSSTSSSSIRMKKYKGVRMRSWGSWVSEIRAPNQKTRIWLGSYSTAEAAARAYDAALLCLKGSSANNLNFPEISTSLYHIINNGDNNNDMSPKSIQRVAAAAAAANTDPSSSSVSTSSPLLSSPSEDLYDVVSMSQYDQQVSLSESSSWYNCFDGDDQFMFINGVSAPYLTTSLSDDFFEEGDIRLWNFC

SEQ ID NO: 95936 - protein, 200 aa, Arabidopsis thaliana
  peptide (1)..(200): Ceres Seq. ID no. 12731221
  misc_feature (21)..(86): Pfam Name: AP2 domain Pfam Description: AP2 domain
  misc_feature (1)..(200): Homolog of NCBI NO: 15219452 NR Description: transcription factor, putative; protein id: [Arabidopsis thaliana] >gi|25352175|pir||D96507 hypothetical
  misc_feature (1)..(199): Homolog of NCBI NO: 15219139 NR Description: TINY-like protein; protein id: At1g21910.1, by cDNA: 19721. [Arabidopsis thaliana] >gi|25402947|pir||D86352
  misc_feature (1)..(199): Homolog of NCBI NO: 21554056 NR Description: TINY-like protein [Arabidopsis thaliana]
  misc_feature (1)..(161): Homolog of NCBI NO: 15224024 NR Description: hypothetical protein; protein id: At1g77640.1
  misc_feature (12)..(124): Homolog of NCBI NO: 34902130 NR Description: hypothetical protein [Oryza sativa (japonica group)] >gi|29893600|gb|AAP06854.1| hypothetical protein [Oryza
  misc_feature (1)..(190): Homolog of NCBI NO: 15223860 NR Description: transcription factor TINY, putative; protein id:
  misc_feature (1)..(173): Homolog of NCBI NO: 15235858 NR Description: AP2 domain TINY-related protein; protein id: [Arabidopsis thaliana] >gi|25350649|pir||F85186 apetala2 domain
  misc_feature (1)..(139): Homolog of NCBI NO: 15227471 NR Description: putative AP2 domain transcription factor; protein At2g35700.1 [Arabidopsis thaliana] >gi|25350648|pir||H84771
  misc_feature (1)..(151): Homolog of NCBI NO: 9279711 NR Description: transcription factor TINY-like protein
  misc_feature (1)..(151): Homolog of NCBI NO: 15228171 NR Description: transcription factor TINY, putative; protein id: [Arabidopsis thaliana] >gi|2062174|gb|AAB63648.1| transcription
MSSPSSSSSSSSSTSSSSIRMKKYKGVRMRSWGSWVSEIRAPNQKTRIWLGSYSTAEAAARAYDAALLCLKGSSANNLNFPEISTSLYHIINNGDNNNDMSPKSIQRVAAAAAAANTDPSSSSVSTSSPLLSSPSEDLYDVVSMSQYDQQVSLSESSSWYNCFDGDDQFMFINGVSAPYLTTSLSDDFFEEGDIRLWNFC

SEQ ID NO: 95937 - protein, 180 aa, Arabidopsis thaliana
  peptide (1)..(180): Ceres Seq. ID no. 12731222
  misc_feature (1)..(66): Pfam Name: AP2 domain Pfam Description: AP2 domain
  misc_feature (1)..(180): Homolog of NCBI NO: 15219452 NR Description: transcription factor, putative; protein id: [Arabidopsis thaliana] >gi|25352175|pir||D96507 hypothetical
  misc_feature (1)..(179): Homolog of NCBI NO: 15219139 NR Description: TINY-like protein; protein id: At1g21910.1, by cDNA: 19721. [Arabidopsis thaliana] >gi|25402947|pir||D86352
  misc_feature (1)..(179): Homolog of NCBI NO: 21554056 NR Description: TINY-like protein [Arabidopsis thaliana]
  misc_feature (1)..(141): Homolog of NCBI NO: 15224024 NR Description: hypothetical protein; protein id: At1g77640.1
  misc_feature (1)..(104): Homolog of NCBI NO: 34902130 NR Description: hypothetical protein [Oryza sativa (japonica group)] >gi|29893600|gb|AAP06854.1| hypothetical protein [Oryza
  misc_feature (1)..(170): Homolog of NCBI NO: 15223860 NR Description: transcription factor TINY, putative; protein id:
  misc_feature (1)..(153): Homolog of NCBI NO: 15235858 NR Description: AP2 domain TINY-related protein; protein id: [Arabidopsis thaliana] >gi|25350649|pir||F85186 apetala2 domain
  misc_feature (1)..(119): Homolog of NCBI NO: 15227471 NR Description: putative AP2 domain transcription factor; protein At2g35700.1 [Arabidopsis thaliana] >gi|25350648|pir||H84771
  misc_feature (1)..(131): Homolog of NCBI NO: 9279711 NR Description: transcription factor TINY-like protein
  misc_feature (1)..(131): Homolog of NCBI NO: 15228171 NR Description: transcription factor TINY, putative; protein id: [Arabidopsis thaliana] >gi|2062174|gb|AAB63648.1| transcription
MKKYKGVRMRSWGSWVSEIRAPNQKTRIWLGSYSTAEAAARAYDAALLCLKGSSANNLNFPEISTSLYHIINNGDNNNDMSPKSIQRVAAAAAAANTDPSSSSVSTSSPLLSSPSEDLYDVVSMSQYDQQVSLSESSSWYNCFDGDDQFMFINGVSAPYLTTSLSDDFFEEGDIRLWNFC

SEQ ID NO: 95938 - DNA, 2787 bp, Arabidopsis thaliana
  misc_feature (1)..(2787): Ceres Seq. ID no. 12731223
  misc_feature: MA Experiment ID: 20000171 Result: Down-regulated in Transcription
  misc_feature: MA Experiment 20000171 PARAMETER Experiment Name: At_42deg_Heat_P Parameter: Age (day) Value: 14
  misc_feature: MA Experiment 20000171 PARAMETER Experiment Name: At_42deg_Heat_P Parameter: Organism Value: A. thaliana
  misc_feature: MA Experiment 20000171 PARAMETER Experiment Name: At_42deg_Heat_P Parameter: Plant Line Value: WS
  misc_feature: MA Experiment 20000171 PARAMETER Experiment Name: At_42deg_Heat_P Parameter: Temperature (deg C) Value: 42 vs. 22
  misc_feature: MA Experiment 20000171 PARAMETER Experiment Name: At_42deg_Heat_P Parameter: Timepoint (hr) Value: 1
  misc_feature: MA Experiment 20000171 PARAMETER Experiment Name: At_42deg_Heat_P Parameter: Tissue Value: Aerial
  misc_feature: MA Experiment ID: 20001247 Result: Up-regulated in Transcription
  misc_feature: MA Experiment 20001247 PARAMETER Experiment Name: At_Far-red-induction_P Parameter: Age (day) Value: 7
  misc_feature: MA Experiment 20001247 PARAMETER Experiment Name: At_Far-red-induction_P Parameter: Light Value: Far-red vs. White
  misc_feature: MA Experiment 20001247 PARAMETER Experiment Name: At_Far-red-induction_P Parameter: Organism Value: A. thaliana
  misc_feature: MA Experiment 20001247 PARAMETER Experiment Name: At_Far-red-induction_P Parameter: Plant Line Value: Columbia
  misc_feature: MA Experiment 20001247 PARAMETER Experiment Name: At_Far-red-induction_P Parameter: Timepoint (hr) Value: 1
  misc_feature: MA Experiment 20001247 PARAMETER Experiment Name: At_Far-red-induction_P Parameter: Tissue Value: Whole Plant
  misc_feature: MA Experiment ID: 20001557 Result: Up-regulated in Transcription
  misc_feature: MA Experiment 20001557 PARAMETER Experiment Name: At_Drought_Soil_Dry_P Parameter: Age (day) Value: 27
  misc_feature: MA Experiment 20001557 PARAMETER Experiment Name: At_Drought_Soil_Dry_P Parameter: Organism Value: A. thaliana
  misc_feature: MA Experiment 20001557 PARAMETER Experiment Name: At_Drought_Soil_Dry_P Parameter: Plant Line Value: WS
  misc_feature: MA Experiment 20001557 PARAMETER Experiment Name: At_Drought_Soil_Dry_P Parameter: Post Timepoint (hr) Value: 3
  misc_feature: MA Experiment 20001557 PARAMETER Experiment Name: At_Drought_Soil_Dry_P Parameter: Post-Treatment Value: Re-Water vs. No Drought
  misc_feature: MA Experiment 20001557 PARAMETER Experiment Name: At_Drought_Soil_Dry_P Parameter: Timepoint (day) Value: 13
  misc_feature: MA Experiment 20001557 PARAMETER Experiment Name: At_Drought_Soil_Dry_P Parameter: Treatment Value: Drought vs. No Drought
  misc_feature: MA Experiment ID: 20001558 Result: Up-regulated in Transcription
  misc_feature: MA Experiment 20001558 PARAMETER Experiment Name: At_Drought_Soil_Dry_P Parameter: Age (day) Value: 27
  misc_feature: MA Experiment 20001558 PARAMETER Experiment Name: At_Drought_Soil_Dry_P Parameter: Organism Value: A. thaliana
  misc_feature: MA Experiment 20001558 PARAMETER Experiment Name: At_Drought_Soil_Dry_P Parameter: Plant Line Value: WS
  misc_feature: MA Experiment 20001558 PARAMETER Experiment Name: At_Drought_Soil_Dry_P Parameter: Post Timepoint (hr) Value: 6
  misc_feature: MA Experiment 20001558 PARAMETER Experiment Name: At_Drought_Soil_Dry_P Parameter: Post-Treatment Value: Re-Water vs. No Drought
  misc_feature: MA Experiment 20001558 PARAMETER Experiment Name: At_Drought_Soil_Dry_P Parameter: Timepoint (day) Value: 13
  misc_feature: MA Experiment 20001558 PARAMETER Experiment Name: At_Drought_Soil_Dry_P Parameter: Treatment Value: Drought vs. No Drought
atggaggctcctacgcctctcctccttctcgtcctcctcacaaccataaccttcttcaccacctccgtcgctgatgaccaaacagcaatgctcgctttagctaaatcattcaatcctccgccgtcagattggtcttccaccaccgatttctgcaaatggtccggcgtacgatgtaccggcggtcgtgtcacaaccatcagcctcgctgataaatctctcaccggattcatcgcacctgagatctcgactctttcagagctcaaatctgtttctattcaacgtaacaaactctccggtacaatcccttcgtttgctaaactctcgtctcttcaagagatctatatggatgagaataatttcgtcggagttgaaaccggagctttcgccggacttactagtctccagatcttgagtttaagcgataacaacaacattactacttggagtttcccatcggagctcgtcgattcgacttctctcactacgatttatctcgataacacaaacatcgccggagttttgcctgacattttcgattccttagcttctcttcaaaatctccggttatcttacaacaacatcaccggcgttttaccaccgtcgcttggaaaatcttcgattcagaatctttggatcaacaatcaagacctaggaatgtcaggaacgatcgaagttctttcgagtatgacgtccttgtcacaagcttggcttcacaagaatcacttctttggaccgattccagatctctccaagagcgagaatctcttcgatctacagctccgggataatgatttaaccggaatagtacctccgacgcttcttacactcgctagcttgaagaatatttctctagataacaataaatttcaaggacctcttcctttgttttcaccggaggttaaagtaacaatagaccacaacgttttttgtactactaaagctggacaaagctgtagtcctcaggtgatgacgcttttagcggtggctggaggtttgggatatccttcaatgttggctgagtcttggcaaggtgatgatgcttgtagtggttgggcttatgttagttgtgattcagctgggaagaatgttgtcacgttgaatcttgggaaacatggattcaccgggtttatatctccggcgattgcgaatcttacttcattgaagagtctttatcttaatggtaacgatttgactggtgttattcctaaggagttgacatttatgactagtttgcagttaattgatgtctcgaataacaatcttagaggggagatacctaagtttccggctacggtgaagtttagttacaaaccggggaatgctttgttgggaactaatggtggagatggttcgagtcctggaactggtggtgctagtggtggtcctggtgggtcttctggtggtggtggtagtaaggttggtgtgattgttggtgtgattgtggcggttttagtgtttcttgccattttaggatttgtggtttataaatttgttatgaagaggaagtatgggaggtttaataggacggatcctgagaaggttgggaagattttggttagtgatgctgtatctaatggtggtagtggtaatggtggatatgctaatgggcatggagctaataacttcaatgctttgaatagtcctagtagtggtgacaatagtgatcgtttccttcttgaaggtggaagtgttaccattccaatggaggttcttcgccaggttacaaataatttcagtgaggataacatattgggcagagggggtttcggtgtcgtgtatgctggagaattacacgatggaacaaagactgctgttaagaggatggaatgtgcagcaatgggtaataaaggaatgagcgagtttcaggctgagatagcggtacttactaaggtcaggcatagacatttggttgctctattgggttactgtgtgaacgggaacgagaggttgcttgtctatgagtacatgccacagggaaatcttggacagcatttgtttgagtggagtgaactcggttactctcctttgacatggaaacagagagtgagcattgctttagacgtggcaagaggtgtggaatatctccatagcttggctcaacaaagcttcatccacagagatttaaagccctctaacatccttctaggagatgacatgagagccaaggttgctgattttggattggtcaagaacgcacctgatggtaaatactctgttgaaacaagattagcaggcacattcggttatctagcaccagaatacgccgctactggaagagtaacgacgaaagtggatgtgtatgcatttggtgtggttctcatggaaatactaactggaagaaaagctttagatgattcattaccagacgagagatctcatctagtcacatggttcagaagaatcctaatcaacaaagaaaacatcccaaaggcactcgaccaaaccttagaagcagacgaggaaacaatggagagcatttacagagttgctgagctagctggacactgcacagcccgcgaacctcaacaaagacccgacatgggccacgcagtaaacgtgctaggtccacttgtagagaagtggaaaccgtcgtgccaagaagaagaagagagtttcggaatcgatgtgaacatgagtttacctcaagctctacaaagatggcaaaacgaaggaacatcgtcatcaacaatgttccatggagacttctcttattctcagacacagtctagtattcctcctaaagcctctggctttcctaatactttcgattcagctgatggtcggtga

SEQ ID NO: 95939 - protein, 928 aa, Arabidopsis thaliana
  peptide (1)..(928): Ceres Seq. ID no. 12731224
MEAPTPLLLLVLLTTITFFTTSVADDQTAMLALAKSFNPPPSDWSSTTDFCKWSGVRCTGGRVTTISLADKSLTGFIAPEISTLSELKSVSIQRNKLSGTIPSFAKLSSLQEIYMDENNFVGVETGAFAGLTSLQILSLSDNNNITTWSFPSELVDSTSLTTIYLDNTNIAGVLPDIFDSLASLQNLRLSYNNITGVLPPSLGKSSIQNLWINNQDLGMSGTIEVLSSMTSLSQAWLHKNHFFGPIPDLSKSENLFDLQLRDNDLTGIVPPTLLTLASLKNISLDNNKFQGPLPLFSPEVKVTIDHNVFCTTKAGQSCSPQVMTLLAVAGGLGYPSMLAESWQGDDACSGWAYVSCDSAGKNVVTLNLGKHGFTGFISPAIANLTSLKSLYLNGNDLTGVIPKELTFMTSLQLIDVSNNNLRGEIPKFPATVKFSYKPGNALLGTNGGDGSSPGTGGASGGPGGSSGGGGSKVGVIVGVIVAVLVFLAILGFVVYKFVMKRKYGRFNRTDPEKVGKILVSDAVSNGGSGNGGYANGHGANNFNALNSPSSGDNSDRFLLEGGSVTIPMEVLRQVTNNFSEDNILGRGGFGVVYAGELHDGTKTAVKRMECAAMGNKGMSEFQAEIAVLTKVRHRHLVALLGYCVNGNERLLVYEYMPQGNLGQHLFEWSELGYSPLTWKQRVSIALDVARGVEYLHSLAQQSFIHRDLKPSNILLGDDMRAKVADFGLVKNAPDGKYSVETRLAGTFGYLAPEYAATGRVTTKVDVYAFGVVLMEILTGRKALDDSLPDERSHLVTWFRRILINKENIPKALDQTLEADEETMESIYRVAELAGHCTAREPQQRPDMGHAVNVLGPLVEKWKPSCQEEEESFGIDVNMSLPQALQRWQNEGTSSSTMFHGDFSYSQTQSSIPPKASGFPNTFDSADGR

SEQ ID NO: 95940 - protein, 899 aa, Arabidopsis thaliana
  peptide (1)..(899): Ceres Seq. ID no. 12731225
MLALAKSFNPPPSDWSSTTDFCKWSGVRCTGGRVTTISLADKSLTGFIAPEISTLSELKSVSIQRNKLSGTIPSFAKLSSLQEIYMDENNFVGVETGAFAGLTSLQILSLSDNNNITTWSFPSELVDSTSLTTIYLDNTNIAGVLPDIFDSLASLQNLRLSYNNITGVLPPSLGKSSIQNLWINNQDLGMSGTIEVLSSMTSLSQAWLHKNHFFGPIPDLSKSENLFDLQLRDNDLTGIVPPTLLTLASLKNISLDNNKFQGPLPLFSPEVKVTIDHNVFCTTKAGQSCSPQVMTLLAVAGGLGYPSMLAESWQGDDACSGWAYVSCDSAGKNVVTLNLGKHGFTGFISPAIANLTSLKSLYLNGNDLTGVIPKELTFMTSLQLIDVSNNNLRGEIPKFPATVKFSYKPGNALLGTNGGDGSSPGTGGASGGPGGSSGGGGSKVGVIVGVIVAVLVFLAILGFVVYKFVMKRKYGRFNRTDPEKVGKILVSDAVSNGGSGNGGYANGHGANNFNALNSPSSGDNSDRFLLEGGSVTIPMEVLRQVTNNFSEDNILGRGGFGVVYAGELHDGTKTAVKRMECAAMGNKGMSEFQAEIAVLTKVRHRHLVALLGYCVNGNERLLVYEYMPQGNLGQHLFEWSELGYSPLTWKQRVSIALDVARGVEYLHSLAQQSFIHRDLKPSNILLGDDMRAKVADFGLVKNAPDGKYSVETRLAGTFGYLAPEYAATGRVTTKVDVYAFGVVLMEILTGRKALDDSLPDERSHLVTWFRRILINKENIPKALDQTLEADEETMESIYRVAELAGHCTAREPQQRPDMGHAVNVLGPLVEKWKPSCQEEEESFGIDVNMSLPQALQRWQNEGTSSSTMFHGDFSYSQTQSSIPPKASGFPNTFDSADGR

SEQ ID NO: 95941 - protein, 814 aa, Arabidopsis thaliana
  peptide (1)..(814): Ceres Seq. ID no. 12731226
MDENNFVGVETGAFAGLTSLQILSLSDNNNITTWSFPSELVDSTSLTTIYLDNTNIAGVLPDIFDSLASLQNLRLSYNNITGVLPPSLGKSSIQNLWINNQDLGMSGTIEVLSSMTSLSQAWLHKNHFFGPIPDLSKSENLFDLQLRDNDLTGIVPPTLLTLASLKNISLDNNKFQGPLPLFSPEVKVTIDHNVFCTTKAGQSCSPQVMTLLAVAGGLGYPSMLAESWQGDDACSGWAYVSCDSAGKNVVTLNLGKHGFTGFISPAIANLTSLKSLYLNGNDLTGVIPKELTFMTSLQLIDVSNNNLRGEIPKFPATVKFSYKPGNALLGTNGGDGSSPGTGGASGGPGGSSGGGGSKVGVIVGVIVAVLVFLAILGFVVYKFVMKRKYGRFNRTDPEKVGKILVSDAVSNGGSGNGGYANGHGANNFNALNSPSSGDNSDRFLLEGGSVTIPMEVLRQVTNNFSEDNILGRGGFGVVYAGELHDGTKTAVKRMECAAMGNKGMSEFQAEIAVLTKVRHRHLVALLGYCVNGNERLLVYEYMPQGNLGQHLFEWSELGYSPLTWKQRVSIALDVARGVEYLHSLAQQSFIHRDLKPSNILLGDDMRAKVADFGLVKNAPDGKYSVETRLAGTFGYLAPEYAATGRVTTKVDVYAFGVVLMEILTGRKALDDSLPDERSHLVTWFRRILINKENIPKALDQTLEADEETMESIYRVAELAGHCTAREPQQRPDMGHAVNVLGPLVEKWKPSCQEEEESFGIDVNMSLPQALQRWQNEGTSSSTMFHGDFSYSQTQSSIPPKASGFPNTFDSADGR

SEQ ID NO: 95942 - DNA, 1008 bp, Arabidopsis thaliana
  misc_feature (1)..(1008): Ceres Seq. ID no. 12731239
  misc_feature: MA Experiment ID: 20000180 Result: Down-regulated in Transcription
  misc_feature: MA Experiment 20000180 PARAMETER Experiment Name: At_Germinating_Seeds_P Parameter: Age (hr) Value: 24 vs. 0
  misc_feature: MA Experiment 20000180 PARAMETER Experiment Name: At_Germinating_Seeds_P Parameter: Tissue Value: Germinating Seeds
atggatcaaatgtcacctgataacataaatggagtcattttagcagtgtcttcaagtatctttattggttctagcttcatcatcaagaaaaaaggtctcaagaaagccggtgcaagcggtgtccgagcaggtgaaggagggtatggatacttgaaggagccatggtggtgggctggaatgataacaatgattgttggggaagtagctaattttgcagcctatgcatttgcaccggctattttggtaacacctttgggagctttaagtattatattcagcgcagtgctcgcgcattttattttgaaagagaaattgcatatgtttgggatacttggttgcattctctgtgttgttgggtctacaactatagtcttacacgcaccacatgaacagaaaatagaatcagtcaagcaaatatggcagcttgctattgaaccaggtttccttgtgtattctgctgtgattgtgattgtggtggctatactgatcttctactatgaaccgcgctacgggaagactcatatgatcgtatatgtcggaatctgctccttaatgggttctcttactgttatgagtgtcaaagctgtggcgattgcgattaaactgacattttcagggacgaatcagtttaaatacttcaacacttggattttcattttagtagttgcaacttgttgcattttgcagatcaactacttgaacaaggcattggatacattcaacacagcggttatttctccggtttactacgttatgttcacaacattcacaatcatagctagtatgatcatgttcaaggattgggcttctcagagtggattaaagattgcaacagagttgtgtggttttgtgacgattttatcaggaacttttctgcttcacaagaccaaagatatgggaaacagtgcaagtggtcgtggttctatctcaatgcctactagagacactcctgtcttcactaattcaggatccggtcggagctccagctctgataaagtagcttcctga

SEQ ID NO: 95943 - protein, 335 aa, Arabidopsis thaliana
  peptide (1)..(335): Ceres Seq. ID no. 12731240
  misc_feature (4)..(303): Pfam Name: Protein of unknown function (DUF803) Pfam Description: Protein of unknown function (DUF803)
  misc_feature (1)..(335): Homolog of NCBI NO: 15229534 NR Description: unknown protein; protein id: At3g23870.1 thaliana] >gi|9294655|dbj|BAB03004.1|
  misc_feature (1)..(334): Homolog of NCBI NO: 18414079 NR Description: expressed protein; protein id: At4g13800.1,
  misc_feature (4)..(334): Homolog of NCBI NO: 21593618 NR Description: unknown [Arabidopsis thaliana]
  misc_feature (4)..(323): Homolog of NCBI NO: 18399280 NR Description: expressed protein; protein id: At1g34470.1, by cDNA: 110782. [Arabidopsis thaliana] F12K21.21 [Arabidopsis thaliana]
  misc_feature (1)..(323): Homolog of NCBI NO: 20161440 NR Description: B1065E10.15 [Oryza sativa (japonica
  misc_feature (4)..(304): Homolog of NCBI NO: 18409942 NR Description: expressed protein; protein id: At1g71900.1, by cDNA: gi_15028240, supported by cDNA: gi_19310780 [Arabidopsis >gi|15028241|gb|AAK76709.1| unknown protein [Arabidopsis
  misc_feature (4)..(303): Homolog of NCBI NO: 25406128 NR Description: unknown protein F17M19.5 [imported] - Arabidopsis
  misc_feature (4)..(298): Homolog of NCBI NO: 30681265 NR Description: expressed protein [Arabidopsis thaliana]
  misc_feature (4)..(298): Homolog of NCBI NO: 26449939 NR Description: unknown protein [Arabidopsis thaliana]
  misc_feature (4)..(298): Homolog of NCBI NO: 25412015 NR Description: hypothetical protein At2g21120 [imported] - thaliana >gi|4803931|gb|AAD29804.1| unknown protein [Arabidopsis
MDQMSPDNINGVILAVSSSIFIGSSFIIKKKGLKKAGASGVRAGEGGYGYLKEPWWWAGMITMIVGEVANFAAYAFAPAILVTPLGALSIIFSAVLAHFILKEKLHMFGILGCILCVVGSTTIVLHAPHEQKIESVKQIWQLAIEPGFLVYSAVIVIVVAILIFYYEPRYGKTHMIVYVGICSLMGSLTVMSVKAVAIAIKLTFSGTNQFKYFNTWIFILVVATCCILQINYLNKALDTFNTAVISPVYYVMFTTFTIIASMIMFKDWASQSGLKIATELCGFVTILSGTFLLHKTKDMGNSASGRGSISMPTRDTPVFTNSGSGRSSSSDKVAS

SEQ ID NO: 95944 - protein, 332 aa, Arabidopsis thaliana
  peptide (1)..(332): Ceres Seq. ID no. 12731241
  misc_feature (1)..(300): Pfam Name: Protein of unknown function (DUF803) Pfam Description: Protein of unknown function (DUF803)
  misc_feature (1)..(332): Homolog of NCBI NO: 15229534 NR Description: unknown protein; protein id: At3g23870.1 thaliana] >gi|9294655|dbj|BAB03004.1|
  misc_feature (1)..(331): Homolog of NCBI NO: 18414079 NR Description: expressed protein; protein id: At4g13800.1,
  misc_feature (1)..(331): Homolog of NCBI NO: 21593618 NR Description: unknown [Arabidopsis thaliana]
  misc_feature (1)..(320): Homolog of NCBI NO: 18399280 NR Description: expressed protein; protein id: At1g34470.1, by cDNA: 110782. [Arabidopsis thaliana] F12K21.21 [Arabidopsis thaliana]
  misc_feature (1)..(320): Homolog of NCBI NO: 20161440 NR Description: B1065E10.15 [Oryza sativa (japonica
  misc_feature (1)..(301): Homolog of NCBI NO: 18409942 NR Description: expressed protein; protein id: At1g71900.1, by cDNA: gi_15028240, supported by cDNA: gi_19310780 [Arabidopsis >gi|15028241|gb|AAK76709.1| unknown protein [Arabidopsis
  misc_feature (1)..(300): Homolog of NCBI NO: 25406128 NR Description: unknown protein F17M19.5 [imported] - Arabidopsis
  misc_feature (1)..(295): Homolog of NCBI NO: 30681265 NR Description: expressed protein [Arabidopsis thaliana]
  misc_feature (1)..(295): Homolog of NCBI NO: 26449939 NR Description: unknown protein [Arabidopsis thaliana]
  misc_feature (1)..(295): Homolog of NCBI NO: 25412015 NR Description: hypothetical protein At2g21120 [imported] - thaliana >gi|4803931|gb|AAD29804.1| unknown protein [Arabidopsis
MSPDNINGVILAVSSSIFIGSSFIIKKKGLKKAGASGVRAGEGGYGYLKEPWWWAGMITMIVGEVANFAAYAFAPAILVTPLGALSIIFSAVLAHFILKEKLHMFGILGCILCVVGSTTIVLHAPHEQKIESVKQIWQLAIEPGFLVYSAVIVIVVAILIFYYEPRYGKTHMIVYVGICSLMGSLTVMSVKAVAIAIKLTFSGTNQFKYFNTWIFILVVATCCILQINYLNKALDTFNTAVISPVYYVMFTTFTIIASMIMFKDWASQSGLKIATELCGFVTILSGTFLLHKTKDMGNSASGRGSISMPTRDTPVFTNSGSGRSSSSDKVAS

SEQ ID NO: 95945 - protein, 276 aa, Arabidopsis thaliana
  peptide (1)..(276): Ceres Seq. ID no. 12731242
  misc_feature (1)..(244): Pfam Name: Protein of unknown function (DUF803) Pfam Description: Protein of unknown function (DUF803)
  misc_feature (1)..(276): Homolog of NCBI NO: 15229534 NR Description: unknown protein; protein id: At3g23870.1 thaliana] >gi|9294655|dbj|BAB03004.1|
  misc_feature (1)..(275): Homolog of NCBI NO: 18414079 NR Description: expressed protein; protein id: At4g13800.1,
  misc_feature (1)..(275): Homolog of NCBI NO: 21593618 NR Description: unknown [Arabidopsis thaliana]
  misc_feature (1)..(264): Homolog of NCBI NO: 18399280 NR Description: expressed protein; protein id: At1g34470.1, by cDNA: 110782. [Arabidopsis thaliana] F12K21.21 [Arabidopsis thaliana]
  misc_feature (1)..(264): Homolog of NCBI NO: 20161440 NR Description: B1065E10.15 [Oryza sativa (japonica
  misc_feature (1)..(245): Homolog of NCBI NO: 18409942 NR Description: expressed protein; protein id: At1g71900.1, by cDNA: gi_15028240, supported by cDNA: gi_19310780 [Arabidopsis >gi|15028241|gb|AAK76709.1| unknown protein [Arabidopsis
  misc_feature (1)..(244): Homolog of NCBI NO: 25406128 NR Description: unknown protein F17M19.5 [imported] - Arabidopsis
  misc_feature (1)..(239): Homolog of NCBI NO: 30681265 NR Description: expressed protein [Arabidopsis thaliana]
  misc_feature (1)..(239): Homolog of NCBI NO: 26449939 NR Description: unknown protein [Arabidopsis thaliana]
  misc_feature (1)..(239): Homolog of NCBI NO: 25412015 NR Description: hypothetical protein At2g21120 [imported] - thaliana >gi|4803931|gb|AAD29804.1| unknown protein [Arabidopsis
MITMIVGEVANFAAYAFAPAILVTPLGALSIIFSAVLAHFILKEKLHMFGILGCILCVVGSTTIVLHAPHEQKIESVKQIWQLAIEPGFLVYSAVIVIVVAILIFYYEPRYGKTHMIVYVGICSLMGSLTVMSVKAVAIAIKLTFSGTNQFKYFNTWIFILVVATCCILQINYLNKALDTFNTAVISPVYYVMFTTFTIIASMIMFKDWASQSGLKIATELCGFVTILSGTFLLHKTKDMGNSASGRGSISMPTRDTPVFTNSGSGRSSSSDKVAS

SEQ ID NO: 95946 - DNA, 1197 bp, Arabidopsis thaliana
  misc_feature (1)..(1197): Ceres Seq. ID no. 12731298
  misc_feature: MA Experiment ID: 20000440 Result: Up-regulated in Transcription
  misc_feature: MA Experiment 20000440 PARAMETER Experiment Name: At_Closed-Flower__Sub_P Parameter: Tissue Value: Closed Flower vs. Whole Plant
atgaaacgtttcttatgctgtctcaaaggaggaagctcaagtaacgcagcgcaaggtaacgacgagaacgacgaagtagatgtcgagcgcctatttgggaataacgagcgcctcaatcatctttggagaaatcatctccgactccctgacgatcgtgaagttgcagatccgactgctgctctgttaccagtatctccacctctacctgataattgtggagaatcatttctatggcgtgagctcgtaaacggaaccataaacttccgggacgaattttatctcggcaaaggcaacttcggcgaagtccatcgctgctatttctcaagacttaatgtggatggagcggtaaaggttcaaaatccacagaatccaactggtcatgttgagttcttggcagaggttacaacgttacgtgcaactaatcatccaaatgtgattagacttcttggcaactgttacggccaaaggaaccgtgctataatttacgaattcatggccaacggagatcttgagcgtcacatctttgcacacaaaacgatggtggagggtccgcgacctaagggtctaacactaccaattagggttttggattggtacacgaggatgaaaattgctgtgggtgtagccaagggcctggtttatctacacgaggagctgaaagtgattaacagagatgtcaaggccggaaacatattacttgatgcagattttgttccgaagctgacagattttggattggcgactaaaatcgttgaagatgaaaacggtgttgagcagcagcaacggatcattccgatgaaggcatctatgggatacattgcaccggaaggagagatttcctggttggtttcgactaagactgatgtctatagctatggagcttttctgttagtgcttttcaccggaaggaaacctttttattcggataatcctgctgggaaaaagaatctcactgattggtttttgagagtatgggataggatcgaggatgcgcctgtgaaagctgatgttgcgctcggtaataggtactcggttgaaggtttaaagaagatatttgatactgcgaggatgtgtataaaggcagagagacttgaacggcctaccatgagtgaagtggaagcgatggttctcgaagctgcagctttcccggtccaagtgccgcgccaggtgacaaggaggcgttcggcttcaacataa

SEQ ID NO: 95947 - protein, 398 aa, Arabidopsis thaliana
  peptide (1)..(398): Ceres Seq. ID no. 12731299
  misc_feature (1)..(398): Homolog of NCBI NO: 15238616 NR Description: protein kinase - like; protein id: At5g60090.1 thaliana] >gi|8777348|dbj|BAA96938.1| contains similarity to
  misc_feature (76)..(397): Homolog of NCBI NO: 15238615 NR Description: protein kinase - like; protein id: At5g60080.1
  misc_feature (71)..(386): Homolog of NCBI NO: 30696629 NR Description: protein kinase, putative [Arabidopsis thaliana]
  misc_feature (74)..(377): Homolog of NCBI NO: 20453162 NR Description: At5g56885 [Arabidopsis thaliana]
  misc_feature (74)..(377): Homolog of NCBI NO: 22327898 NR Description: Expressed protein; protein id: At5g56890.1,
  misc_feature (74)..(397): Homolog of NCBI NO: 7573596 NR Description: protein kinase 1 [Populus nigra]
  misc_feature (74)..(322): Homolog of NCBI NO: 21740745 NR Description: OSJNBa0072K14.10 [Oryza sativa (japonica
  misc_feature (332)..(372): Homolog of NCBI NO: 21740745 NR Description: OSJNBa0072K14.10 [Oryza sativa (japonica
  misc_feature (74)..(372): Homolog of NCBI NO: 11259782 NR Description: protein kinase-like - Arabidopsis thaliana
  misc_feature (74)..(372): Homolog of NCBI NO: 30679773 NR Description: protein kinase family [Arabidopsis thaliana]
MKRFLCCLKGGSSSNAAQGNDENDEVDVERLFGNNERLNHLWRNHLRLPDDREVADPTAALLPVSPPLPDNCGESFLWRELVNGTINFRDEFYLGKGNFGEVHRCYFSRLNVDGAVKVQNPQNPTGHVEFLAEVTTLRATNHPNVIRLLGNCYGQRNRAIIYEFMANGDLERHIFAHKTMVEGPRPKGLTLPIRVLDWYTRMKIAVGVAKGLVYLHEELKVINRDVKAGNILLDADFVPKLTDFGLATKIVEDENGVEQQQRIIPMKASMGYIAPEGEISWLVSTKTDVYSYGAFLLVLFTGRKPFYSDNPAGKKNLTDWFLRVWDRIEDAPVKADVALGNRYSVEGLKKIFDTARMCIKAERLERPTMSEVEAMVLEAAAFPVQVPRQVTRRRSAST

SEQ ID NO: 95948 - protein, 234 aa, Arabidopsis thaliana
  peptide (1)..(234): Ceres Seq. ID no. 12731300
  misc_feature (1)..(234): Homolog of NCBI NO: 15238616 NR Description: protein kinase - like; protein id: At5g60090.1 thaliana] >gi|8777348|dbj|BAA96938.1| contains similarity to
  misc_feature (1)..(233): Homolog of NCBI NO: 15238615 NR Description: protein kinase - like; protein id: At5g60080.1
  misc_feature (1)..(222): Homolog of NCBI NO: 30696629 NR Description: protein kinase, putative [Arabidopsis thaliana]
  misc_feature (1)..(213): Homolog of NCBI NO: 20453162 NR Description: At5g56885 [Arabidopsis thaliana]
  misc_feature (1)..(213): Homolog of NCBI NO: 22327898 NR Description: Expressed protein; protein id: At5g56890.1,
  misc_feature (1)..(233): Homolog of NCBI NO: 7573596 NR Description: protein kinase 1 [Populus nigra]
  misc_feature (1)..(158): Homolog of NCBI NO: 21740745 NR Description: OSJNBa0072K14.10 [Oryza sativa (japonica
  misc_feature (168)..(208): Homolog of NCBI NO: 21740745 NR Description: OSJNBa0072K14.10 [Oryza sativa (japonica
  misc_feature (1)..(208): Homolog of NCBI NO: 11259782 NR Description: protein kinase-like - Arabidopsis thaliana
  misc_feature (1)..(208): Homolog of NCBI NO: 30679773 NR Description: protein kinase family [Arabidopsis thaliana]
MANGDLERHIFAHKTMVEGPRPKGLTLPIRVLDWYTRMKIAVGVAKGLVYLHEELKVINRDVKAGNILLDADFVPKLTDFGLATKIVEDENGVEQQQRIIPMKASMGYIAPEGEISWLVSTKTDVYSYGAFLLVLFTGRKPFYSDNPAGKKNLTDWFLRVWDRIEDAPVKADVALGNRYSVEGLKKIFDTARMCIKAERLERPTMSEVEAMVLEAAAFPVQVPRQVTRRRSAST

SEQ ID NO: 95949 - protein, 219 aa, Arabidopsis thaliana
  peptide (1)..(219): Ceres Seq. ID no. 12731301
  misc_feature (1)..(219): Homolog of NCBI NO: 15238616 NR Description: protein kinase - like; protein id: At5g60090.1 thaliana] >gi|8777348|dbj|BAA96938.1| contains similarity to
  misc_feature (1)..(218): Homolog of NCBI NO: 15238615 NR Description: protein kinase - like; protein id: At5g60080.1
  misc_feature (1)..(207): Homolog of NCBI NO: 30696629 NR Description: protein kinase, putative [Arabidopsis thaliana]
  misc_feature (1)..(198): Homolog of NCBI NO: 20453162 NR Description: At5g56885 [Arabidopsis thaliana]
  misc_feature (1)..(198): Homolog of NCBI NO: 22327898 NR Description: Expressed protein; protein id: At5g56890.1,
  misc_feature (1)..(218): Homolog of NCBI NO: 7573596 NR Description: protein kinase 1 [Populus nigra]
  misc_feature (1)..(143): Homolog of NCBI NO: 21740745 NR Description: OSJNBa0072K14.10 [Oryza sativa (japonica
  misc_feature (153)..(193): Homolog of NCBI NO: 21740745 NR Description: OSJNBa0072K14.10 [Oryza sativa (japonica
  misc_feature (1)..(193): Homolog of NCBI NO: 11259782 NR Description: protein kinase-like - Arabidopsis thaliana
  misc_feature (1)..(193): Homolog of NCBI NO: 30679773 NR Description: protein kinase family [Arabidopsis thaliana]
MVEGPRPKGLTLPIRVLDWYTRMKIAVGVAKGLVYLHEELKVINRDVKAGNILLDADFVPKLTDFGLATKIVEDENGVEQQQRIIPMKASMGYIAPEGEISWLVSTKTDVYSYGAFLLVLFTGRKPFYSDNPAGKKNLTDWFLRVWDRIEDAPVKADVALGNRYSVEGLKKIFDTARMCIKAERLERPTMSEVEAMVLEAAAFPVQVPRQVTRRRSAST

SEQ ID NO: 95950 - DNA, 1488 bp, Arabidopsis thaliana
  misc_feature (1)..(1488): Ceres Seq. ID no. 12731302
  misc_feature: MA Experiment ID: 20000173 Result: Down-regulated in Transcription
  misc_feature: MA Experiment 20000173 PARAMETER Experiment Name: At_42deg_Heat_P Parameter: Age (day) Value: 14
  misc_feature: MA Experiment 20000173 PARAMETER Experiment Name: At_42deg_Heat_P Parameter: Organism Value: A. thaliana
  misc_feature: MA Experiment 20000173 PARAMETER Experiment Name: At_42deg_Heat_P Parameter: Plant Line Value: WS
  misc_feature: MA Experiment 20000173 PARAMETER Experiment Name: At_42deg_Heat_P Parameter: Temperature (deg C) Value: 42 vs. 22
  misc_feature: MA Experiment 20000173 PARAMETER Experiment Name: At_42deg_Heat_P Parameter: Timepoint (hr) Value: 6
  misc_feature: MA Experiment 20000173 PARAMETER Experiment Name: At_42deg_Heat_P Parameter: Tissue Value: Aerial
  misc_feature: MA Experiment ID: 20000179 Result: Up-regulated in Transcription
  misc_feature: MA Experiment 20000179 PARAMETER Experiment Name: At_Germinating_Seeds_P Parameter: Age (hr) Value: 6 vs. 0
  misc_feature: MA Experiment 20000179 PARAMETER Experiment Name: At_Germinating_Seeds_P Parameter: Tissue Value: Germinating Seeds
  misc_feature: MA Experiment ID: 20000182 Result: Down-regulated in Transcription
  misc_feature: MA Experiment 20000182 PARAMETER Experiment Name: At_2mM_SA_P Parameter: Age (day) Value: 14
  misc_feature: MA Experiment 20000182 PARAMETER Experiment Name: At_2mM_SA_P Parameter: Organism Value: A. thaliana
  misc_feature: MA Experiment 20000182 PARAMETER Experiment Name: At_2mM_SA_P Parameter: Plant Line Value: WS
  misc_feature: MA Experiment 20000182 PARAMETER Experiment Name: At_2mM_SA_P Parameter: Timepoint (hr) Value: 6
  misc_feature: MA Experiment 20000182 PARAMETER Experiment Name: At_2mM_SA_P Parameter: Tissue Value: Aerial
  misc_feature: MA Experiment 20000182 PARAMETER Experiment Name: At_2mM_SA_P Parameter: Treatment Value: 2mM SA vs. No Treatment
  misc_feature: MA Experiment ID: 20000185 Result: Down-regulated in Transcription
  misc_feature: MA Experiment 20000185 PARAMETER Experiment Name: At_Roots__P Parameter: Age (day) Value: 7 vs. 21
  misc_feature: MA Experiment 20000185 PARAMETER Experiment Name: At_Roots__P Parameter: Organism Value: A. thaliana
  misc_feature: MA Experiment 20000185 PARAMETER Experiment Name: At_Roots__P Parameter: Tissue Value: Roots vs. Whole Plant
  misc_feature: MA Experiment ID: 20000438 Result: Down-regulated in Transcription
  misc_feature: MA Experiment 20000438 PARAMETER Experiment Name: At_Shoots__P Parameter: Age (day) Value: 14
  misc_feature: MA Experiment 20000438 PARAMETER Experiment Name: At_Shoots__P Parameter: Tissue Value: Shoots vs. Whole Plant
  misc_feature: MA Experiment ID: 20000439 Result: Down-regulated in Transcription
  misc_feature: MA Experiment 20000439 PARAMETER Experiment Name: At_Roots__P Parameter: Age (day) Value: 14 vs. 21
  misc_feature: MA Experiment 20000439 PARAMETER Experiment Name: At_Roots__P Parameter: Organism Value: A. thaliana
  misc_feature: MA Experiment 20000439 PARAMETER Experiment Name: At_Roots__P Parameter: Tissue Value: Roots vs. Whole Plant
  misc_feature: MA Experiment ID: 20000441 Result: Down-regulated in Transcription
  misc_feature: MA Experiment 20000441 PARAMETER Experiment Name: At_1uM_BR-BRZ__P Parameter: Tissue Value: Shoot Apices
  misc_feature: MA Experiment 20000441 PARAMETER Experiment Name: At_1uM_BR-BRZ__P Parameter: Treatment Value: 1uM BR vs. No Treatment
  misc_feature: MA Experiment ID: 20000443 Result: Down-regulated in Transcription
  misc_feature: MA Experiment 20000443 PARAMETER Experiment Name: At_1uM_BR-BRZ__P Parameter: Tissue Value: Shoot Apices
  misc_feature: MA Experiment 20000443 PARAMETER Experiment Name: At_1uM_BR-BRZ__P Parameter: Treatment Value: 1uM BRZ vs. No Treatment
  misc_feature: MA Experiment ID: 20000573 Result: Up-regulated in Transcription
  misc_feature: MA Experiment 20000573 PARAMETER Experiment Name: At_100uM_ABA_Mutants__P Parameter: Organism Value: A. thaliana
  misc_feature: MA Experiment 20000573 PARAMETER Experiment Name: At_100uM_ABA_Mutants__P Parameter: Plant Line Value: CS22 vs. Ler wt
  misc_feature: MA Experiment 20000573 PARAMETER Experiment Name: At_100uM_ABA_Mutants__P Parameter: Timepoint (hr) Value: N/A
  misc_feature: MA Experiment 20000573 PARAMETER Experiment Name: At_100uM_ABA_Mutants__P Parameter: Tissue Value: Whole Plant
  misc_feature: MA Experiment 20000573 PARAMETER Experiment Name: At_100uM_ABA_Mutants__P Parameter: Treatment Value: None
  misc_feature: MA Experiment ID: 20000794 Result: Up-regulated in Transcription
  misc_feature: MA Experiment 20000794 PARAMETER Experiment Name: At_Petals_P Parameter: Age (day) Value: 23-25 days
  misc_feature: MA Experiment 20000794 PARAMETER Experiment Name: At_Petals_P Parameter: Plant Line Value: WS
  misc_feature: MA Experiment 20000794 PARAMETER Experiment Name: At_Petals_P Parameter: Tissue Value: Petals vs. Whole plant
  misc_feature: MA Experiment ID: 20001247 Result: Down-regulated in Transcription
  misc_feature: MA Experiment 20001247 PARAMETER Experiment Name: At_Far-red-induction_P Parameter: Age (day) Value: 7
  misc_feature: MA Experiment 20001247 PARAMETER Experiment Name: At_Far-red-induction_P Parameter: Light Value: Far-red vs. White
  misc_feature: MA Experiment 20001247 PARAMETER Experiment Name: At_Far-red-induction_P Parameter: Organism Value: A. thaliana
  misc_feature: MA Experiment 20001247 PARAMETER Experiment Name: At_Far-red-induction_P Parameter: Plant Line Value: Columbia
  misc_feature: MA Experiment 20001247 PARAMETER Experiment Name: At_Far-red-induction_P Parameter: Timepoint (hr) Value: 1
  misc_feature: MA Experiment 20001247 PARAMETER Experiment Name: At_Far-red-induction_P Parameter: Tissue Value: Whole Plant
  misc_feature: MA Experiment ID: 20001248 Result: Up-regulated in Transcription
  misc_feature: MA Experiment 20001248 PARAMETER Experiment Name: At_Far-red-induction_P Parameter: Age (day) Value: 7
  misc_feature: MA Experiment 20001248 PARAMETER Experiment Name: At_Far-red-induction_P Parameter: Light Value: Far-red vs. White
  misc_feature: MA Experiment 20001248 PARAMETER Experiment Name: At_Far-red-induction_P Parameter: Organism Value: A. thaliana
  misc_feature: MA Experiment 20001248 PARAMETER Experiment Name: At_Far-red-induction_P Parameter: Plant Line Value: Columbia
  misc_feature: MA Experiment 20001248 PARAMETER Experiment Name: At_Far-red-induction_P Parameter: Timepoint (hr) Value: 4
  misc_feature: MA Experiment 20001248 PARAMETER Experiment Name: At_Far-red-induction_P Parameter: Tissue Value: Whole Plant
  misc_feature: MA Experiment ID: 20001451 Result: Down-regulated in Transcription
  misc_feature: MA Experiment 20001451 PARAMETER Experiment Name: At_Far-red-induction_P Parameter: Age (day) Value: 7
  misc_feature: MA Experiment 20001451 PARAMETER Experiment Name: At_Far-red-induction_P Parameter: Light Value: Far-red vs. White
  misc_feature: MA Experiment 20001451 PARAMETER Experiment Name: At_Far-red-induction_P Parameter: Organism Value: A. thaliana
  misc_feature: MA Experiment 20001451 PARAMETER Experiment Name: At_Far-red-induction_P Parameter: Plant Line Value: Columbia
  misc_feature: MA Experiment 20001451 PARAMETER Experiment Name: At_Far-red-induction_P Parameter: Timepoint (hr) Value: 24
  misc_feature: MA Experiment 20001451 PARAMETER Experiment Name: At_Far-red-induction_P Parameter: Tissue Value: Whole Plant
  misc_feature: MA Experiment ID: 20001458 Result: Up-regulated in Transcription
  misc_feature: MA Experiment 20001458 PARAMETER Experiment Name: At_50mM_NH4NO3_L-to-H_P Parameter: Age (day) Value: Undefined
  misc_feature: MA Experiment 20001458 PARAMETER Experiment Name: At_50mM_NH4NO3_L-to-H_P Parameter: Organism Value: Undefined
  misc_feature: MA Experiment 20001458 PARAMETER Experiment Name: At_50mM_NH4NO3_L-to-H_P Parameter: Plant Line Value: Undefined
  misc_feature: MA Experiment 20001458 PARAMETER Experiment Name: At_50mM_NH4NO3_L-to-H_P Parameter: Timepoint (hr) Value: 2
  misc_feature: MA Experiment 20001458 PARAMETER Experiment Name: At_50mM_NH4NO3_L-to-H_P Parameter: Tissue Value: Siliques
  misc_feature: MA Experiment 20001458 PARAMETER Experiment Name: At_50mM_NH4NO3_L-to-H_P Parameter: Treatment Value: 50mM NH4NO3 vs. 100mM Manitol
  misc_feature: MA Experiment ID: 20001459 Result: Down-regulated in Transcription
  misc_feature: MA Experiment 20001459 PARAMETER Experiment Name: At_50mM_NH4NO3_L-to-H_P Parameter: Age (day) Value: Undefined
  misc_feature: MA Experiment 20001459 PARAMETER Experiment Name: At_50mM_NH4NO3_L-to-H_P Parameter: Organism Value: Undefined
  misc_feature: MA Experiment 20001459 PARAMETER Experiment Name: At_50mM_NH4NO3_L-to-H_P Parameter: Plant Line Value: Undefined
  misc_feature: MA Experiment 20001459 PARAMETER Experiment Name: At_50mM_NH4NO3_L-to-H_P Parameter: Timepoint (hr) Value: 4
  misc_feature: MA Experiment 20001459 PARAMETER Experiment Name: At_50mM_NH4NO3_L-to-H_P Parameter: Tissue Value: Siliques
  misc_feature: MA Experiment 20001459 PARAMETER Experiment Name: At_50mM_NH4NO3_L-to-H_P Parameter: Treatment Value: 50mM NH4NO3 vs. 100mM Manitol
atgtgttttaataacattgaaactggtgatgaagtggaaaccgagaggcaagtgtttggttcatctgaagaagatgaatttcgagttgaagatactgctagaaataccaacaatgtacagatttctcaacaacagcagcaaccgctagctcatgttgtgaagtgggagaggtatctcccagttagatcgcttaaggttcttctggtggagaatgatgactcaacacgccatattgttactgcccttttaaagaattgcagctatgaagttactgctgttccggatgtccttgaagcctggagaattctagaagatgagaaaagttgcattgatcttgtcttaacagaggttgacatgcctgtgcattcaggaaccggtctgctgtccaagattatgagccataagacacttaagaacatccccgtcataatgatgtcatcacatgattctatggttctggtctttaagtgtttgtcgaatggtgctgttgattttctcgtgaaacccattagaaagaacgaactaaagaatctttggcaacatgtctggagaagatgtcacagctctagcggaagcggaagtgagagtggaatacatgacaagaagtcggtgaaacctgaaagcacccaagggtcagaaaatgatgccagcatcagtgatgaacacaggaatgaaagtgggagtagtggtggtttgagtaaccaagatggtgggagtgataacgggagtggaactcagagttcttggacaaaaagagccagtgatactaagagcacctcgccttcaaatcaatttcccgatgcacccaacaagaaaggaacctatgaaaatggatgtgcacatgttaatagactgaaggaggctgaagatcagaaggaacaaataggcacgggatcacagacaggaatgtctatgagtaagaaagctgaagaaccaggagatcttgaaaagaatgcaaagtattctgttcaagctttggagagaaacaatgatgacacgctgaatcgctcttctggtaactcacaagtagaaagcaaagcaccttcatctaaccgagaagatttgcaatcactcgagcaaactctgaaaaaaacaagagaggatagagattacaaagtcggtgatcgaagtgtgttgaggcattcaaatctctctgcattctcaaaatacaataatggtgctacttctgctaagaaggctccagaagaaaatgtggaaagttgttctcctcatgacagtcctattgcaaaactgttgggttcgagttcaagcagtgacaatcctttaaagcagcagtctagtggaagtgaccgatgggcacaaagagaagctgctttgatgaagtttcgccttaaacgtaaagagcgatgttttgagaaaaaggttaggtaccatagcaggaagaaactagctgagcaacggcctcacgtcaaaggtcaattcattcgcaagagggatgatcataaatcaggaagtgaagacaattga

SEQ ID NO: 95951 - protein, 495 aa, Arabidopsis thaliana
  peptide (1)..(495): Ceres Seq. ID no. 12731303
  misc_feature (64)..(187): Pfam Name: Response regulator receiver domain Pfam Description: Response regulator receiver domain
  misc_feature (1)..(495): Homolog of NCBI NO: 18424319 NR Description: pseudo-response regulator - like; protein id: supported by cDNA: gi_10281007 [Arabidopsis thaliana] emb|CAB86035.1~gene_id:MGO3.8~similar to unknown protein
  misc_feature (10)..(368): Homolog of NCBI NO: 18414032 NR Description: putative protein; protein id: At5g02810.1, by cDNA: gi_10281003, supported by cDNA: gi_14532637 [Arabidopsis
  misc_feature (420)..(495): Homolog of NCBI NO: 18414032 NR Description: putative protein; protein id: At5g02810.1, by cDNA: gi_10281003, supported by cDNA: gi_14532637 [Arabidopsis
  misc_feature (10)..(368): Homolog of NCBI NO: 11357905 NR Description: hypothetical protein F9G14.120 - Arabidopsis >gi|7413556|emb|CAB86035.1| putative protein [Arabidopsis
  misc_feature (420)..(495): Homolog of NCBI NO: 11357905 NR Description: hypothetical protein F9G14.120 - Arabidopsis >gi|7413556|emb|CAB86035.1| putative protein [Arabidopsis
  misc_feature (23)..(248): Homolog of NCBI NO: 24796813 NR Description: putative pseudo-response regulator [Oryza sativa
  misc_feature (391)..(494): Homolog of NCBI NO: 24796813 NR Description: putative pseudo-response regulator [Oryza sativa
  misc_feature (50)..(483): Homolog of NCBI NO: 18407171 NR Description: expressed protein; protein id: At2g46790.1, by cDNA: gi_10280999, supported by cDNA: gi_9247021 [Arabidopsis
  misc_feature (41)..(432): Homolog of NCBI NO: 34394035 NR Description: putative pseudo-response regulator [Oryza sativa
  misc_feature (52)..(414): Homolog of NCBI NO: 9758535 NR Description: contains similarity to two-component response protein~gene_id:T31K7.5 [Arabidopsis thaliana]
MCFNNIETGDEVETERQVFGSSEEDEFRVEDTARNTNNVQISQQQQQPLAHVVKWERYLPVRSLKVLLVENDDSTRHIVTALLKNCSYEVTAVPDVLEAWRILEDEKSCIDLVLTEVDMPVHSGTGLLSKIMSHKTLKNIPVIMMSSHDSMVLVFKCLSNGAVDFLVKPIRKNELKNLWQHVWRRCHSSSGSGSESGIHDKKSVKPESTQGSENDASISDEHRNESGSSGGLSNQDGGSDNGSGTQSSWTKRASDTKSTSPSNQFPDAPNKKGTYENGCAHVNRLKEAEDQKEQIGTGSQTGMSMSKKAEEPGDLEKNAKYSVQALERNNDDTLNRSSGNSQVESKAPSSNREDLQSLEQTLKKTREDRDYKVGDRSVLRHSNLSAFSKYNNGATSAKKAPEENVESCSPHDSPIAKLLGSSSSSDNPLKQQSSGSDRWAQREAALMKFRLKRKERCFEKKVRYHSRKKLAEQRPHVKGQFIRKRDDHKSGSEDN

SEQ ID NO: 95952 - protein, 377 aa, Arabidopsis thaliana
  peptide (1)..(377): Ceres Seq. ID no. 12731304
  misc_feature (1)..(69): Pfam Name: Response regulator receiver domain Pfam Description: Response regulator receiver domain
  misc_feature (1)..(377): Homolog of NCBI NO: 18424319 NR Description: pseudo-response regulator - like; protein id: supported by cDNA: gi_10281007 [Arabidopsis thaliana] emb|CAB86035.1~gene_id:MGO3.8~similar to unknown protein
  misc_feature (1)..(250): Homolog of NCBI NO: 18414032 NR Description: putative protein; protein id: At5g02810.1, by cDNA: gi_10281003, supported by cDNA: gi_14532637 [Arabidopsis
  misc_feature (302)..(377): Homolog of NCBI NO: 18414032 NR Description: putative protein; protein id: At5g02810.1, by cDNA: gi_10281003, supported by cDNA: gi_14532637 [Arabidopsis
  misc_feature (1)..(250): Homolog of NCBI NO: 11357905 NR Description: hypothetical protein F9G14.120 - Arabidopsis >gi|7413556|emb|CAB86035.1| putative protein [Arabidopsis
  misc_feature (302)..(377): Homolog of NCBI NO: 11357905 NR Description: hypothetical protein F9G14.120 - Arabidopsis >gi|7413556|emb|CAB86035.1| putative protein [Arabidopsis
  misc_feature (1)..(130): Homolog of NCBI NO: 24796813 NR Description: putative pseudo-response regulator [Oryza sativa
  misc_feature (273)..(376): Homolog of NCBI NO: 24796813 NR Description: putative pseudo-response regulator [Oryza sativa
  misc_feature (1)..(365): Homolog of NCBI NO: 18407171 NR Description: expressed protein; protein id: At2g46790.1, by cDNA: gi_10280999, supported by cDNA: gi_9247021 [Arabidopsis
  misc_feature (1)..(314): Homolog of NCBI NO: 34394035 NR Description: putative pseudo-response regulator [Oryza sativa
  misc_feature (1)..(296): Homolog of NCBI NO: 9758535 NR Description: contains similarity to two-component response protein~gene_id:T31K7.5 [Arabidopsis thaliana]
MPVHSGTGLLSKIMSHKTLKNIPVIMMSSHDSMVLVFKCLSNGAVDFLVKPIRKNELKNLWQHVWRRCHSSSGSGSESGIHDKKSVKPESTQGSENDASISDEHRNESGSSGGLSNQDGGSDNGSGTQSSWTKRASDTKSTSPSNQFPDAPNKKGTYENGCAHVNRLKEAEDQKEQIGTGSQTGMSMSKKAEEPGDLEKNAKYSVQALERNNDDTLNRSSGNSQVESKAPSSNREDLQSLEQTLKKTREDRDYKVGDRSVLRHSNLSAFSKYNNGATSAKKAPEENVESCSPHDSPIAKLLGSSSSSDNPLKQQSSGSDRWAQREAALMKFRLKRKERCFEKKVRYHSRKKLAEQRPHVKGQFIRKRDDHKSGSEDN

SEQ ID NO: 95953 - protein, 364 aa, Arabidopsis thaliana
  peptide (1)..(364): Ceres Seq. ID no. 12731305
  misc_feature (1)..(56): Pfam Name: Response regulator receiver domain Pfam Description: Response regulator receiver domain
  misc_feature (1)..(364): Homolog of NCBI NO: 18424319 NR Description: pseudo-response regulator - like; protein id: supported by cDNA: gi_10281007 [Arabidopsis thaliana] emb|CAB86035.1~gene_id:MGO3.8~similar to unknown protein
  misc_feature (1)..(237): Homolog of NCBI NO: 18414032 NR Description: putative protein; protein id: At5g02810.1, by cDNA: gi_10281003, supported by cDNA: gi_14532637 [Arabidopsis
  misc_feature (289)..(364): Homolog of NCBI NO: 18414032 NR Description: putative protein; protein id: At5g02810.1, by cDNA: gi_10281003, supported by cDNA: gi_14532637 [Arabidopsis
  misc_feature (1)..(237): Homolog of NCBI NO: 11357905 NR Description: hypothetical protein F9G14.120 - Arabidopsis >gi|7413556|emb|CAB86035.1| putative protein [Arabidopsis
  misc_feature (289)..(364): Homolog of NCBI NO: 11357905 NR Description: hypothetical protein F9G14.120 - Arabidopsis >gi|7413556|emb|CAB86035.1| putative protein [Arabidopsis
  misc_feature (1)..(117): Homolog of NCBI NO: 24796813 NR Description: putative pseudo-response regulator [Oryza sativa
  misc_feature (260)..(363): Homolog of NCBI NO: 24796813 NR Description: putative pseudo-response regulator [Oryza sativa
  misc_feature (1)..(352): Homolog of NCBI NO: 18407171 NR Description: expressed protein; protein id: At2g46790.1, by cDNA: gi_10280999, supported by cDNA: gi_9247021 [Arabidopsis
  misc_feature (1)..(301): Homolog of NCBI NO: 34394035 NR Description: putative pseudo-response regulator [Oryza sativa
  misc_feature (1)..(283): Homolog of NCBI NO: 9758535 NR Description: contains similarity to two-component response protein~gene_id:T31K7.5 [Arabidopsis thaliana]
MSHKTLKNIPVIMMSSHDSMVLVFKCLSNGAVDFLVKPIRKNELKNLWQHVWRRCHSSSGSGSESGIHDKKSVKPESTQGSENDASISDEHRNESGSSGGLSNQDGGSDNGSGTQSSWTKRASDTKSTSPSNQFPDAPNKKGTYENGCAHVNRLKEAEDQKEQIGTGSQTGMSMSKKAEEPGDLEKNAKYSVQALERNNDDTLNRSSGNSQVESKAPSSNREDLQSLEQTLKKTREDRDYKVGDRSVLRHSNLSAFSKYNNGATSAKKAPEENVESCSPHDSPIAKLLGSSSSSDNPLKQQSSGSDRWAQREAALMKFRLKRKERCFEKKVRYHSRKKLAEQRPHVKGQFIRKRDDHKSGSEDN

SEQ ID NO: 95954 - DNA, 2007 bp, Arabidopsis thaliana
  misc_feature (1)..(2007): Ceres Seq. ID no. 12731328
  misc_feature: MA Experiment ID: 20000437 Result: Down-regulated in Transcription
  misc_feature: MA Experiment 20000437 PARAMETER Experiment Name: At_Drought_P Parameter: Age (day) Value: 8
  misc_feature: MA Experiment 20000437 PARAMETER Experiment Name: At_Drought_P Parameter: Organism Value: A. thaliana
  misc_feature: MA Experiment 20000437 PARAMETER Experiment Name: At_Drought_P Parameter: Plant Line Value: WS
  misc_feature: MA Experiment 20000437 PARAMETER Experiment Name: At_Drought_P Parameter: Timepoint (hr) Value: 24
  misc_feature: MA Experiment 20000437 PARAMETER Experiment Name: At_Drought_P Parameter: Tissue Value: Whole Plant
  misc_feature: MA Experiment 20000437 PARAMETER Experiment Name: At_Drought_P Parameter: Treatment Value: Drought vs. No Drought
  misc_feature: MA Experiment ID: 20000495 Result: Down-regulated in Transcription
  misc_feature: MA Experiment 20000495 PARAMETER Experiment Name: At_Guard_Cells_P Parameter: Harvest Date Value: 8/2/2002
  misc_feature: MA Experiment 20000495 PARAMETER Experiment Name: At_Guard_Cells_P Parameter: Organism Value: A. thaliana
  misc_feature: MA Experiment 20000495 PARAMETER Experiment Name: At_Guard_Cells_P Parameter: Tissue Value: Guard Cells vs. Leaves
  misc_feature: MA Experiment ID: 20001557 Result: Up-regulated in Transcription
  misc_feature: MA Experiment 20001557 PARAMETER Experiment Name: At_Drought_Soil_Dry_P Parameter: Age (day) Value: 27
  misc_feature: MA Experiment 20001557 PARAMETER Experiment Name: At_Drought_Soil_Dry_P Parameter: Organism Value: A. thaliana
  misc_feature: MA Experiment 20001557 PARAMETER Experiment Name: At_Drought_Soil_Dry_P Parameter: Plant Line Value: WS
  misc_feature: MA Experiment 20001557 PARAMETER Experiment Name: At_Drought_Soil_Dry_P Parameter: Post Timepoint (hr) Value: 3
  misc_feature: MA Experiment 20001557 PARAMETER Experiment Name: At_Drought_Soil_Dry_P Parameter: Post-Treatment Value: Re-Water vs. No Drought
  misc_feature: MA Experiment 20001557 PARAMETER Experiment Name: At_Drought_Soil_Dry_P Parameter: Timepoint (day) Value: 13
  misc_feature: MA Experiment 20001557 PARAMETER Experiment Name: At_Drought_Soil_Dry_P Parameter: Treatment Value: Drought vs. No Drought
atgattcgaggattgcttttgggaatcatctggatgatattttgtgtttgttcatcatttcagcaagagacgccgtttgtttacaacaactttggtcacgtagatcatcttcaccttgacggtagtgcaagaatcattcccagtggtggtatcctgcaactgacaaatgcaaccaatagccaaataggtcatgttttctacgagaagccgattgagttcaaatcatctgaatcagtctcgttctcgacatattttgtgtgtgcactgctccctgctggtgatccgagtggccatggcatgaccttttttgtgtctcattccactgatttcaaaggcgcagaagcaactcgatacttcgggattttcaacagaaatggttctacttccacacgtgtgttggctgtagagcttgacacttctctagcttcagatgtgaaagacatcagcgataatcatgttgggattgatgtgaacagcgcagagtctattacatctgccaatgcttcttatttttcagacaaagaagggaagaagattgacataaaactcttgagtggtgatcctatccaggtttgggtggactatgaaggaacaacgctcaacgtttcattggctcctcttagaaacaagaaaccaagccgacctcttttgtcatcaacatccatcaatctaactgatattttgcaaggtagaagaatgtttgttgggttttctggctcaaccggatcaagcatgagttaccagtacatactcgggtggagtttcagcaaaagcatggcgtctctgccgaacattgacatctcaaaacttcccaaagttcctcactctagcactaaaaagaagtctacatctcctgtgctcagtgttctgcttggtttaatagctttcatagttttggggattcttgttgtagcttatttgtataggagaaacttgtactctgaagtaagagaggaatgggaaaaagagtatggtccaattaggtattcctacaaatctctatacaaagcaaccaaaggattcaataggagtgaatttcttgggagaggaggttttggtgaagtctacaaaggaactctccctcggagcagagaactgagagaagtagcagtgaagcgagtatcacatgatggtgagcacggtatgaagcaatttgttgctgagatcgtgagcatgaggagtttaaaacaccggagcttggttccacttcttgggtattgcaggagaaaacatgagttattactggtgtctgagtacatgccaaatggtagtcttgaccattacttgtttaatcatgatagattgtctcttccctggtggagaagacttgcgatccttagggacatcgcatcagctcttagttacttacatacagaagctgaccaagttgttatacacagagacatcaaagctgcaaatgttatgttggatgcagagttcaatggaaggttgggagattttggtatgtccaggttatatgacagaggggctgatccaagcacaacagctgcagtgggaactgttggttacatggcacctgagcttacaacaatgggagcttctactggaactgatgtgtacgcgtttggtgttttcttgcttgaagtaacttgtgggaggagacctgtggaacccggcttacctgaagcaaaacgttttctgatcaaatgggttagtgaatgctggaaaaggtcttctttgattgatgctagagatccaaggttgacagaattctcatcccaggaagtcgagaaggttctgaaactcggtttgctatgtgcaaaccttgctccagattcaagaccggccatggaacaagtggtgcaatacttaaatggaaacctagctttacccgagttttggcccaattctccagggattggagttctgtctccaatggcgctttccccagcaccactcgtgatcccttcactatcattttcgtcttcctcctccaacaactctatgtttattactcactcagtcctctacgggagtgggcgatga

SEQ ID NO: 95955 - protein, 668 aa, Arabidopsis thaliana
  peptide (1)..(668): Ceres Seq. ID no. 12731329
  misc_feature (341)..(542): Pfam Name: Protein kinase domain Pfam Description: Protein kinase domain
  misc_feature (1)..(668): Homolog of NCBI NO: 15230700 NR Description: receptor like protein kinase; protein id:
  misc_feature (19)..(668): Homolog of NCBI NO: 15239268 NR Description: receptor-like protein kinase; protein id:
  misc_feature (5)..(668): Homolog of NCBI NO: 15230670 NR Description: receptor-like protein kinase; protein id:
  misc_feature (1)..(661): Homolog of NCBI NO: 15239263 NR Description: receptor like protein kinase; protein id:
  misc_feature (7)..(668): Homolog of NCBI NO: 15239261 NR Description: receptor like protein kinase; protein id:
  misc_feature (1)..(661): Homolog of NCBI NO: 15810557 NR Description: putative receptor protein kinase [Arabidopsis
  misc_feature (5)..(668): Homolog of NCBI NO: 15230694 NR Description: receptor-like protein kinase; protein id:
  misc_feature (5)..(668): Homolog of NCBI NO: 15230696 NR Description: receptor-like protein kinase; protein id:
  misc_feature (62)..(655): Homolog of NCBI NO: 15230698 NR Description: receptor like protein kinase; protein id:
  misc_feature (3)..(645): Homolog of NCBI NO: 34899514 NR Description: putative receptor-like protein kinase [Oryza
MIRGLLLGIIWMIFCVCSSFQQETPFVYNNFGHVDHLHLDGSARIIPSGGILQLTNATNSQIGHVFYEKPIEFKSSESVSFSTYFVCALLPAGDPSGHGMTFFVSHSTDFKGAEATRYFGIFNRNGSTSTRVLAVELDTSLASDVKDISDNHVGIDVNSAESITSANASYFSDKEGKKIDIKLLSGDPIQVWVDYEGTTLNVSLAPLRNKKPSRPLLSSTSINLTDILQGRRMFVGFSGSTGSSMSYQYILGWSFSKSMASLPNIDISKLPKVPHSSTKKKSTSPVLSVLLGLIAFIVLGILVVAYLYRRNLYSEVREEWEKEYGPIRYSYKSLYKATKGFNRSEFLGRGGFGEVYKGTLPRSRELREVAVKRVSHDGEHGMKQFVAEIVSMRSLKHRSLVPLLGYCRRKHELLLVSEYMPNGSLDHYLFNHDRLSLPWWRRLAILRDIASALSYLHTEADQVVIHRDIKAANVMLDAEFNGRLGDFGMSRLYDRGADPSTTAAVGTVGYMAPELTTMGASTGTDVYAFGVFLLEVTCGRRPVEPGLPEAKRFLIKWVSECWKRSSLIDARDPRLTEFSSQEVEKVLKLGLLCANLAPDSRPAMEQVVQYLNGNLALPEFWPNSPGIGVLSPMALSPAPLVIPSLSFSSSSSNNSMFITHSVLYGSGR

SEQ ID NO: 95956 - protein, 657 aa, Arabidopsis thaliana
  peptide (1)..(657): Ceres Seq. ID no. 12731330
  misc_feature (330)..(531): Pfam Name: Protein kinase domain Pfam Description: Protein kinase domain
  misc_feature (1)..(657): Homolog of NCBI NO: 15230700 NR Description: receptor like protein kinase; protein id:
  misc_feature (8)..(657): Homolog of NCBI NO: 15239268 NR Description: receptor-like protein kinase; protein id:
  misc_feature (1)..(657): Homolog of NCBI NO: 15230670 NR Description: receptor-like protein kinase; protein id:
  misc_feature (1)..(650): Homolog of NCBI NO: 15239263 NR Description: receptor like protein kinase; protein id:
  misc_feature (1)..(657): Homolog of NCBI NO: 15239261 NR Description: receptor like protein kinase; protein id:
  misc_feature (1)..(650): Homolog of NCBI NO: 15810557 NR Description: putative receptor protein kinase [Arabidopsis
  misc_feature (1)..(657): Homolog of NCBI NO: 15230694 NR Description: receptor-like protein kinase; protein id:
  misc_feature (1)..(657): Homolog of NCBI NO: 15230696 NR Description: receptor-like protein kinase; protein id:
  misc_feature (51)..(644): Homolog of NCBI NO: 15230698 NR Description: receptor like protein kinase; protein id:
  misc_feature (1)..(634): Homolog of NCBI NO: 34899514 NR Description: putative receptor-like protein kinase [Oryza
MIFCVCSSFQQETPFVYNNFGHVDHLHLDGSARIIPSGGILQLTNATNSQIGHVFYEKPIEFKSSESVSFSTYFVCALLPAGDPSGHGMTFFVSHSTDFKGAEATRYFGIFNRNGSTSTRVLAVELDTSLASDVKDISDNHVGIDVNSAESITSANASYFSDKEGKKIDIKLLSGDPIQVWVDYEGTTLNVSLAPLRNKKPSRPLLSSTSINLTDILQGRRMFVGFSGSTGSSMSYQYILGWSFSKSMASLPNIDISKLPKVPHSSTKKKSTSPVLSVLLGLIAFIVLGILVVAYLYRRNLYSEVREEWEKEYGPIRYSYKSLYKATKGFNRSEFLGRGGFGEVYKGTLPRSRELREVAVKRVSHDGEHGMKQFVAEIVSMRSLKHRSLVPLLGYCRRKHELLLVSEYMPNGSLDHYLFNHDRLSLPWWRRLAILRDIASALSYLHTEADQVVIHRDIKAANVMLDAEFNGRLGDFGMSRLYDRGADPSTTAAVGTVGYMAPELTTMGASTGTDVYAFGVFLLEVTCGRRPVEPGLPEAKRFLIKWVSECWKRSSLIDARDPRLTEFSSQEVEKVLKLGLLCANLAPDSRPAMEQVVQYLNGNLALPEFWPNSPGIGVLSPMALSPAPLVIPSLSFSSSSSNNSMFITHSVLYGSGR

SEQ ID NO: 95957 - protein, 569 aa, Arabidopsis thaliana
  peptide (1)..(569): Ceres Seq. ID no. 12731331
  misc_feature (242)..(443): Pfam Name: Protein kinase domain Pfam Description: Protein kinase domain
  misc_feature (1)..(569): Homolog of NCBI NO: 15230700 NR Description: receptor like protein kinase; protein id:
  misc_feature (1)..(569): Homolog of NCBI NO: 15239268 NR Description: receptor-like protein kinase; protein id:
  misc_feature (1)..(569): Homolog of NCBI NO: 15230670 NR Description: receptor-like protein kinase; protein id:
  misc_feature (1)..(562): Homolog of NCBI NO: 15239263 NR Description: receptor like protein kinase; protein id:
  misc_feature (1)..(569): Homolog of NCBI NO: 15239261 NR Description: receptor like protein kinase; protein id:
  misc_feature (1)..(562): Homolog of NCBI NO: 15810557 NR Description: putative receptor protein kinase [Arabidopsis
  misc_feature (1)..(569): Homolog of NCBI NO: 15230694 NR Description: receptor-like protein kinase; protein id:
  misc_feature (1)..(569): Homolog of NCBI NO: 15230696 NR Description: receptor-like protein kinase; protein id:
  misc_feature (1)..(556): Homolog of NCBI NO: 15230698 NR Description: receptor like protein kinase; protein id:
  misc_feature (1)..(546): Homolog of NCBI NO: 34899514 NR Description: putative receptor-like protein kinase [Oryza
MTFFVSHSTDFKGAEATRYFGIFNRNGSTSTRVLAVELDTSLASDVKDISDNHVGIDVNSAESITSANASYFSDKEGKKIDIKLLSGDPIQVWVDYEGTTLNVSLAPLRNKKPSRPLLSSTSINLTDILQGRRMFVGFSGSTGSSMSYQYILGWSFSKSMASLPNIDISKLPKVPHSSTKKKSTSPVLSVLLGLIAFIVLGILVVAYLYRRNLYSEVREEWEKEYGPIRYSYKSLYKATKGFNRSEFLGRGGFGEVYKGTLPRSRELREVAVKRVSHDGEHGMKQFVAEIVSMRSLKHRSLVPLLGYCRRKHELLLVSEYMPNGSLDHYLFNHDRLSLPWWRRLAILRDIASALSYLHTEADQVVIHRDIKAANVMLDAEFNGRLGDFGMSRLYDRGADPSTTAAVGTVGYMAPELTTMGASTGTDVYAFGVFLLEVTCGRRPVEPGLPEAKRFLIKWVSECWKRSSLIDARDPRLTEFSSQEVEKVLKLGLLCANLAPDSRPAMEQVVQYLNGNLALPEFWPNSPGIGVLSPMALSPAPLVIPSLSFSSSSSNNSMFITHSVLYGSGR

SEQ ID NO: 95958 - DNA, 2442 bp, Arabidopsis thaliana
  misc_feature (1)..(2442): Ceres Seq. ID no. 12731332
aggcttgaatcactgatacagaagcttacatcctctttttgtccattttttctccagcttgcgaggttatgattcatcatcagatccagactctctgattcatcatctgcaatggctcgttggttgcttcagatcctgatcatctcttctcttcatctgagctctgtatcaagtcaacaagagacaagctttgtctatgaaagcttcctcgaccgacaaaatctttatcttgacaaatctgcaatagtacttcccagtggattattgcagttgacaaatgcttcagagcaccagatgggtcatgctttccacaagaaaccaattgagttcagttcatctggaccactctccttctcaacacactttgtgtgtgctttggtgcctaagccaggttttgaaggtggccatggtattgtctttgtattgtctccttctatggactttactcacgcagaatcaactagatacttggggattttcaatgcttcaacaaatggatcttcctcttatcacgtacttgctgttgagcttgacactatttggaacccagatttcaaagatattgaccacaatcatgtggggattgatgtgaacagtcctatatctgtcgcaatagcttcagcatcttactattccgacatgaaagggagtaatgaaagcataaacctcttgagtggaaaccctatacaggtctgggtggattatgaaggcactttgctcaatgtttcggttgctcctcttgaagtccagaagccaactcgacctcttttatcacaccccatcaaccttacagaactttttccaaatagatcaagtctgtttgctgggttctctgcagcaacagggacagcgatcagtgatcaatatattctctggtggagttttagcatagacagaggatcgctgcagcgacttgatatctcaaaacttcctgaagttcctcatcctagagctccacataagaaagtatctacactgattattctcctacccgtttgtctggctattttggtgttggctgttcttgcaggactttatttccgcaggagacgcaagtattcagaagtatctgaaacatgggaaaaggagtttgatgcgcatcggttctcttacaggtccttgttcaaagcaacaaaggggttcagcaaagatgaatttctgggaaaaggaggttttggagaagtttatagaggaaatctcccacaaggcagagaaatagcagtgaaaagagtgtcccataatggtgatgaaggtgtgaagcagtttgtggctgaagtcgtgagcatgagatgtctgaaacacaggaatcttgtaccactgtttgggtattgcagaagaaaacgagaacttcttcttgtctcagagtacatgcccaatggtagtcttgacgagcatttgtttgatgaccagaaaccggttctttcttggtcacagagacttgtggtcgttaagggtatagcctctgctctctggtacctgcatacaggtgctgaccaagttgttctgcaccgagatgtcaaagcttccaacattatgttagacgcggagttccatggaaggttaggggattttggcatggccaggtttcatgagcacggaggcaatgcagctacaacagcagctgttgggactgtagggtacatggccccggagctaatcacaatgggagcttccactggaactgatgtttacgcatttggtgttttcatgcttgaagtaacctgtgggaggagacccgtggaaccgcagttgcaagttgagaaacgacatatgatcaaatgggtttgtgagtgctggaaaaaggattctttgcttgatgctactgacccgagattgggaggtaaatttgtagctgaggaagtcgagatggttatgaaactgggtctgctctgttcaaatatagtgccagaatccagacccacaatggaacaagtggtcctgtacctaaacaaaaacctacctttgccagatttctcaccatacactttggggattggcacatttgctccggttctggtagatgcatcctcccttgtagtctcttccgcttcatggagtttgtcaggtccatcgatgtcttcatcctcgcccaaccactcaccttacgcttggcagtcaacagatcagccatggggacagacaatagacactaagaactctcttcacatagttgcagaaccagagaagccctcacccgctgtcaaaatggtcacattgcctgcagaagatcctcagtccaatcattccagcatcagcagtcagaggtaaattagtgatgtacatatcagcaagaagatatcattattagctctcaatattgttttcatctgtctcacttgtcgcaacaaaatctgtttgttcgttgtataatcagttaatgattatacaattctcatattacaacttgtactcctcaatatgattttatacatgatttggtcc

SEQ ID NO: 95959 - protein, 718 aa, Arabidopsis thaliana; identical to SEQ ID NO: 76993
  peptide (1)..(718): Ceres Seq. ID no. 12731333
  misc_feature (344)..(612): Pfam Name: Protein kinase domain Pfam Description: Protein kinase domain
  misc_feature (1)..(560): Homolog of NCBI NO: 15239265 NR Description: receptor like protein kinase; protein id:
  misc_feature (598)..(660): Homolog of NCBI NO: 15239265 NR Description: receptor like protein kinase; protein id:
  misc_feature (62)..(663): Homolog of NCBI NO: 15230698 NR Description: receptor like protein kinase; protein id:
  misc_feature (8)..(658): Homolog of NCBI NO: 15239268 NR Description: receptor-like protein kinase; protein id:
  misc_feature (1)..(663): Homolog of NCBI NO: 15230700 NR Description: receptor like protein kinase; protein id:
  misc_feature (5)..(665): Homolog of NCBI NO: 15230670 NR Description: receptor-like protein kinase; protein id:
  misc_feature (9)..(647): Homolog of NCBI NO: 15239261 NR Description: receptor like protein kinase; protein id:
  misc_feature (1)..(645): Homolog of NCBI NO: 15230694 NR Description: receptor-like protein kinase; protein id:
  misc_feature (8)..(642): Homolog of NCBI NO: 15230696 NR Description: receptor-like protein kinase; protein id:
  misc_feature (8)..(661): Homolog of NCBI NO: 34899518 NR Description: putative receptor-like protein kinase [Oryza

SEQ ID NO: 95960 - protein, 657 aa, Arabidopsis thaliana; identical to SEQ ID NO: 76994
  peptide (1)..(657): Ceres Seq. ID no. 12731334
  misc_feature (283)..(551): Pfam Name: Protein kinase domain Pfam Description: Protein kinase domain
  misc_feature (1)..(499): Homolog of NCBI NO: 15239265 NR Description: receptor like protein kinase; protein id:
  misc_feature (537)..(599): Homolog of NCBI NO: 15239265 NR Description: receptor like protein kinase; protein id:
  misc_feature (1)..(602): Homolog of NCBI NO: 15230698 NR Description: receptor like protein kinase; protein id:
  misc_feature (1)..(597): Homolog of NCBI NO: 15239268 NR Description: receptor-like protein kinase; protein id:
  misc_feature (1)..(602): Homolog of NCBI NO: 15230700 NR Description: receptor like protein kinase; protein id:
  misc_feature (1)..(604): Homolog of NCBI NO: 15230670 NR Description: receptor-like protein kinase; protein id:
  misc_feature (1)..(586): Homolog of NCBI NO: 15239261 NR Description: receptor like protein kinase; protein id:
  misc_feature (1)..(584): Homolog of NCBI NO: 15230694 NR Description: receptor-like protein kinase; protein id:
  misc_feature (1)..(581): Homolog of NCBI NO: 15230696 NR Description: receptor-like protein kinase; protein id:
  misc_feature (1)..(600): Homolog of NCBI NO: 34899518 NR Description: putative receptor-like protein kinase [Oryza

SEQ ID NO: 95961 - protein, 610 aa, Arabidopsis thaliana; identical to SEQ ID NO: 76995
  peptide (1)..(610): Ceres Seq. ID no. 12731335
  misc_feature (236)..(504): Pfam Name: Protein kinase domain Pfam Description: Protein kinase domain
  misc_feature (1)..(452): Homolog of NCBI NO: 15239265 NR Description: receptor like protein kinase; protein id:
  misc_feature (490)..(552): Homolog of NCBI NO: 15239265 NR Description: receptor like protein kinase; protein id:
  misc_feature (1)..(555): Homolog of NCBI NO: 15230698 NR Description: receptor like protein kinase; protein id:
  misc_feature (1)..(550): Homolog of NCBI NO: 15239268 NR Description: receptor-like protein kinase; protein id:
  misc_feature (1)..(555): Homolog of NCBI NO: 15230700 NR Description: receptor like protein kinase; protein id:
  misc_feature (1)..(557): Homolog of NCBI NO: 15230670 NR Description: receptor-like protein kinase; protein id:
  misc_feature (1)..(539): Homolog of NCBI NO: 15239261 NR Description: receptor like protein kinase; protein id:
  misc_feature (1)..(537): Homolog of NCBI NO: 15230694 NR Description: receptor-like protein kinase; protein id:
  misc_feature (1)..(534): Homolog of NCBI NO: 15230696 NR Description: receptor-like protein kinase; protein id:
  misc_feature (1)..(553): Homolog of NCBI NO: 34899518 NR Description: putative receptor-like protein kinase [Oryza

SEQ ID NO: 95962 - DNA, 1226 bp, Arabidopsis thaliana
  misc_feature (1)..(1226): Ceres Seq. ID no. 12731371
  misc_feature: MA Experiment ID: 20000173 Result: Down-regulated in Transcription
  misc_feature: MA Experiment 20000173 PARAMETER Experiment Name: At_42deg_Heat_P Parameter: Age (day) Value: 14
  misc_feature: MA Experiment 20000173 PARAMETER Experiment Name: At_42deg_Heat_P Parameter: Organism Value: A. thaliana
  misc_feature: MA Experiment 20000173 PARAMETER Experiment Name: At_42deg_Heat_P Parameter: Plant Line Value: WS
  misc_feature: MA Experiment 20000173 PARAMETER Experiment Name: At_42deg_Heat_P Parameter: Temperature (deg C) Value: 42 vs. 22
  misc_feature: MA Experiment 20000173 PARAMETER Experiment Name: At_42deg_Heat_P Parameter: Timepoint (hr) Value: 6
  misc_feature: MA Experiment 20000173 PARAMETER Experiment Name: At_42deg_Heat_P Parameter: Tissue Value: Aerial
  misc_feature: MA Experiment ID: 20000182 Result: Up-regulated in Transcription
  misc_feature: MA Experiment 20000182 PARAMETER Experiment Name: At_2mM_SA_P Parameter: Age (day) Value: 14
  misc_feature: MA Experiment 20000182 PARAMETER Experiment Name: At_2mM_SA_P Parameter: Organism Value: A. thaliana
  misc_feature: MA Experiment 20000182 PARAMETER Experiment Name: At_2mM_SA_P Parameter: Plant Line Value: WS
  misc_feature: MA Experiment 20000182 PARAMETER Experiment Name: At_2mM_SA_P Parameter: Timepoint (hr) Value: 6
  misc_feature: MA Experiment 20000182 PARAMETER Experiment Name: At_2mM_SA_P Parameter: Tissue Value: Aerial
  misc_feature: MA Experiment 20000182 PARAMETER Experiment Name: At_2mM_SA_P Parameter: Treatment Value: 2mM SA vs. No Treatment
aagtctttgttcttccttctcgacgacggtgtcacttgcgatgaatctctccacgaggctcgctgaaaaacttcccggaatcttaccggcgccgtcttctcctctcctgcgtaaaggagtctccgagttaagatgcttttcaattgctaaccaaagtagaagattgagatggggattacaaaagaagatggtttggagtttggagagagctgagacctgtgtagtgagcaaatcatgtttagttcatcctgcaactgaagcctatgcacaagaagctattgaagctatcaaatccgaaaaagttattgctgtgcctaccgatacgctttatggcttcgcttgtgatgcttgttctttagaagcggttagccggatttatgagatcaaagggcgtaaacttacaagccctttagctatctgcgttggtgatgtattagatatcaagagagtggctaccacaagtcacttacctcacggtttacttgattcgctcttgcccggtccagtcactcttgtacttcaacgagtgttttaaacaggtgaatcaagcattcttgaaaagtccttgaacccagggattggtactattggagtacgggttccagattgtgaattcattagagaagtatcgagaggttcgggcagtgtgttggctcttacaagtgctaatttaagcggtgatagaagcagcgtttgtgttaaagattttgagaatctttggcagcattgtgcttatgtctatgatggtggtttacttccatcgggccgcgcaggatctacaatagtcgatctgactaaagttggaaagtacaagatcattaggcccggaagcgcgaaacaagcaacagtggcaattcttgagaagtatttgctggaagaagaagaagaagaagaccataaagagaagagagctagttaaactctgaatcatctgatctgacttgcaaaaatttgaggttttgctttggttcttactaaatttttgatattgggttaagatatgtttgtttttagtgcaatacgagaagattgttagtgttgagggggtatgctaatgctacctcccattcccatggtacgcatgtgtaatttgaagaaacttggtggaccatttcgtaatttttacttaagtttcttattattgctccatttggaaattaaactttgttgtaatcttattaaaaaattatcaaatattagtggaaatttttcctatttttaagaac

SEQ ID NO: 95963 - protein, 177 aa, Arabidopsis thaliana
  peptide (1)..(177): Ceres Seq. ID no. 12731372
  misc_feature (93)..(177): Pfam Name: yrdC domain Pfam Description: yrdC domain
  misc_feature (63)..(177): Homolog of NCBI NO: 9759323 NR Description: gene_id:MUP24.1~pir||T31603~similar to unknown
  misc_feature (14)..(177): Homolog of NCBI NO: 18424373 NR Description: putative protein; protein id: At5g60590.1, by cDNA: gi_14190378, supported by cDNA: gi_15215870 [Arabidopsis >gi|14190379|gb|AAK55670.1|AF378867_1 AT5g60590/muf9_240
  misc_feature (85)..(177): Homolog of NCBI NO: 23956354 NR Description: hypothetical protein MGC38336 [Mus musculus]
  misc_feature (85)..(177): Homolog of NCBI NO: 30908964 NR Description: ischemia/reperfusion inducible protein [Mus
  misc_feature (85)..(177): Homolog of NCBI NO: 30691316 NR Description: YRDC protein [Homo sapiens]
  misc_feature (85)..(177): Homolog of NCBI NO: 31088868 NR Description: ischemia/reperfusion inducible protein [Homo >gi|30909242|gb|AAP37053.1| ischemia/reperfusion inducible transcript variant 1 [Homo sapiens] >gi|30909244|gb|AAP37054.1|
  misc_feature (86)..(177): Homolog of NCBI NO: 28573691 NR Description: CG33005-PB [Drosophila melanogaster]
  misc_feature (107)..(177): Homolog of NCBI NO: 28278078 NR Description: Similar to hypothetical protein MGC38336 [Xenopus
  misc_feature (101)..(177): Homolog of NCBI NO: 39591298 NR Description: Hypothetical protein CBG20783 [Caenorhabditis
  misc_feature (101)..(177): Homolog of NCBI NO: 17537239 NR Description: yrdC domain containing protein [Caenorhabditis
SLCSSFSTTVSLAMNLSTRLAEKLPGILPAPSSPLLRKGVSELRCFSIANQSRRLRWGLQKKMVWSLERAETCVVSKSCLVHPATEAYAQEAIEAIKSEKVIAVPTDTLYGFACDACSLEAVSRIYEIKGRKLTSPLAICVGDVLDIKRVATTSHLPHGLLDSLLPGPVTLVLQRVF

SEQ ID NO: 95964 - protein, 164 aa, Arabidopsis thaliana
  peptide (1)..(164): Ceres Seq. ID no. 12731373
  misc_feature (80)..(164): Pfam Name: yrdC domain Pfam Description: yrdC domain
  misc_feature (50)..(164): Homolog of NCBI NO: 9759323 NR Description: gene_id:MUP24.1~pir||T31603~similar to unknown
  misc_feature (1)..(164): Homolog of NCBI NO: 18424373 NR Description: putative protein; protein id: At5g60590.1, by cDNA: gi_14190378, supported by cDNA: gi_15215870 [Arabidopsis >gi|14190379|gb|AAK55670.1|AF378867_1 AT5g60590/muf9_240
  misc_feature (72)..(164): Homolog of NCBI NO: 23956354 NR Description: hypothetical protein MGC38336 [Mus musculus]
  misc_feature (72)..(164): Homolog of NCBI NO: 30908964 NR Description: ischemia/reperfusion inducible protein [Mus
  misc_feature (72)..(164): Homolog of NCBI NO: 30691316 NR Description: YRDC protein [Homo sapiens]
  misc_feature (72)..(164): Homolog of NCBI NO: 31088868 NR Description: ischemia/reperfusion inducible protein [Homo >gi|30909242|gb|AAP37053.1| ischemia/reperfusion inducible transcript variant 1 [Homo sapiens] >gi|30909244|gb|AAP37054.1|
  misc_feature (73)..(164): Homolog of NCBI NO: 28573691 NR Description: CG33005-PB [Drosophila melanogaster]
  misc_feature (94)..(164): Homolog of NCBI NO: 28278078 NR Description: Similar to hypothetical protein MGC38336 [Xenopus
  misc_feature (88)..(164): Homolog of NCBI NO: 39591298 NR Description: Hypothetical protein CBG20783 [Caenorhabditis
  misc_feature (88)..(164): Homolog of NCBI NO: 17537239 NR Description: yrdC domain containing protein [Caenorhabditis
MNLSTRLAEKLPGILPAPSSPLLRKGVSELRCFSIANQSRRLRWGLQKKMVWSLERAETCVVSKSCLVHPATEAYAQEAIEAIKSEKVIAVPTDTLYGFACDACSLEAVSRIYEIKGRKLTSPLAICVGDVLDIKRVATTSHLPHGLLDSLLPGPVTLVLQRVF

SEQ ID NO: 95965 - protein, 115 aa, Arabidopsis thaliana
  peptide (1)..(115): Ceres Seq. ID no. 12731374
  misc_feature (31)..(115): Pfam Name: yrdC domain Pfam Description: yrdC domain
  misc_feature (1)..(115): Homolog of NCBI NO: 9759323 NR Description: gene_id:MUP24.1~pir||T31603~similar to unknown
  misc_feature (1)..(115): Homolog of NCBI NO: 18424373 NR Description: putative protein; protein id: At5g60590.1, by cDNA: gi_14190378, supported by cDNA: gi_15215870 [Arabidopsis >gi|14190379|gb|AAK55670.1|AF378867_1 AT5g60590/muf9_240
  misc_feature (23)..(115): Homolog of NCBI NO: 23956354 NR Description: hypothetical protein MGC38336 [Mus musculus]
  misc_feature (23)..(115): Homolog of NCBI NO: 30908964 NR Description: ischemia/reperfusion inducible protein [Mus
  misc_feature (23)..(115): Homolog of NCBI NO: 30691316 NR Description: YRDC protein [Homo sapiens]
  misc_feature (23)..(115): Homolog of NCBI NO: 31088868 NR Description: ischemia/reperfusion inducible protein [Homo >gi|30909242|gb|AAP37053.1| ischemia/reperfusion inducible transcript variant 1 [Homo sapiens] >gi|30909244|gb|AAP37054.1|
  misc_feature (24)..(115): Homolog of NCBI NO: 28573691 NR Description: CG33005-PB [Drosophila melanogaster]
  misc_feature (45)..(115): Homolog of NCBI NO: 28278078 NR Description: Similar to hypothetical protein MGC38336 [Xenopus
  misc_feature (39)..(115): Homolog of NCBI NO: 39591298 NR Description: Hypothetical protein CBG20783 [Caenorhabditis
  misc_feature (39)..(115): Homolog of NCBI NO: 17537239 NR Description: yrdC domain containing protein [Caenorhabditis
MVWSLERAETCVVSKSCLVHPATEAYAQEAIEAIKSEKVIAVPTDTLYGFACDACSLEAVSRIYEIKGRKLTSPLAICVGDVLDIKRVATTSHLPHGLLDSLLPGPVTLVLQRVF

SEQ ID NO: 95966 - DNA, 2199 bp, Arabidopsis thaliana
  misc_feature (1)..(2199): Ceres Seq. ID no. 12731390
  misc_feature: MA Experiment ID: 20000438 Result: Down-regulated in Transcription
  misc_feature: MA Experiment 20000438 PARAMETER Experiment Name: At_Shoots__P Parameter: Age (day) Value: 14
  misc_feature: MA Experiment 20000438 PARAMETER Experiment Name: At_Shoots__P Parameter: Tissue Value: Shoots vs. Whole Plant
aacctccttcattaccattaccttcctcctgattttaaccactctttccggctctgtctcactgctccatcttcctctcgctggtctagtcccgacgattactgctccatcttagccatgcccaccacaactctccctggctctatctctcccttcaatgtccctcatagtgttaggacgaaaaagccaaatgggcagcagaaaaaggaagaaatagagaaagaggtgtggatgttacgagagatgctggatcaagaagaaaagacacgtgagatattggaacaagtccaaaaacatcaacttccttcttcttcctcttcccttactcttcctgcttctctccctcccaagatgaaggaacttataacggaactatcaatcgtagaaggagaaatctcaagactagaaattcaaataagccatcttcagataaatctcaagcaagaacaagacgaaactttgaaacaagctacaacaagttcttcaagacgagcatggcaaactagtgagacttacaaggatgacaacataaacccttatcaagctccaacattaccaaaataccctaagctcccacctccaagccctatggtaaacaaaggcatgatgaagagtgaaaacaacaacaccaaatctactactagtcatcatcaagagaatgcaacatttggtacaaagacattgcatttcatcaacaaagctataaaaggtgattacgcgattgaaagcttccgcaagtctaacgagaaagttggagttgttgagaaggaaaatcatcggtcggtccaacatgaaaataaggtgcaagagaatatgaaaatgaaaaagattaggacgatgaaatcgccttcgcctctacgtgaacctagatatacctctcctaataagcctaataaggatcgtgtagcagcacttgatgcatcactagacattccaccaaaatctttatcaagcacaatcttgatggaagacggccaaaacattcagaagtggcacccaaacaagctcgccgagaacatcatgaagtgtctcaatttcatctacgttcgtcttcttagaaccacaagagtcatggagctagagaaaacaggacccatctcgagatccactaatttctctttgagctcaagaagctttagggtcgacaatgcaacctcaagcttgtcaaaatcgatgaatcttgtgtcttataaggaatcaagacaacaagatccttatggaatatttgatgtagaatcatctttggcaagagacattggtccttacaagaatcttgttatcttcacttcgagttctatggattccaagtgcatttcaagctctagctcggtttctttaatccagaaactcagggtactgatgaacaatcttgagactgtggatctaaaagtgttgagccatcaacaaaagctagcgttttggatcaacatgttcaatgcttgtgttatgcatggatatctacaacatggagttccaaaaactgctgagagattgcaatctcttgtatacaataaggctacaatgaatgtcggaggcaaaaacataagtgctcataccatagagcattgtatcctaaggaagtctacatcttctacaatgactcaggatcgacacgaagaaatgattattcgtaaactatatggcgtagaagcaacggatcctaacatcacatttgctctatcttgtggaactcgatcttctcctgcagtgaggatatacactggagaaggagtgacaacggagctagagaaatcaaagctggagtatctgcaagcctcgctggtggttaccgcggctaaacggataggcttgccggaacttctcctgaaacatgccaccgatttcgtggtgctcacggcggatggtggtactggagagatggagcagttaggatctttggtgaaatgggtttgcaaccaattaccaacctctggatcattgagaaaatcaatggtggattgttttaagaatccaaattccaaagcttcttcgtcctcctccgccgttgagaagataccttatgacttcgagtttcagtatcttttagccatttagggtactactactaattttttattcgtttatttgtgaaaatgttgtgtttcaaataaaaatatcaaaatttgtttgtttttttattatgaatatgtttgattgtaatatgacgtgtatatgtttgaacataatcatcgtatatct

SEQ ID NO: 95967 - protein, 684 aa, Arabidopsis thaliana
  peptide (1)..(684): Ceres Seq. ID no. 12731391
  misc_feature (451)..(590): Pfam Name: Protein of unknown function, DUF547 Pfam Description: Protein of unknown function, DUF547
  misc_feature (386)..(684): Homolog of NCBI NO: 15239037 NR Description: putative protein; protein id: At5g42690.1 thaliana] >gi|10177272|dbj|BAB10625.1|
  misc_feature (56)..(300): Homolog of NCBI NO: 15239037 NR Description: putative protein; protein id: At5g42690.1 thaliana] >gi|10177272|dbj|BAB10625.1|
  misc_feature (242)..(684): Homolog of NCBI NO: 9294368 NR Description: gb|AAB97123.1~gene_id:T16H11.2~similar to unknown
  misc_feature (66)..(152): Homolog of NCBI NO: 9294368 NR Description: gb|AAB97123.1~gene_id:T16H11.2~similar to unknown
  misc_feature (333)..(684): Homolog of NCBI NO: 15225527 NR Description: hypothetical protein; protein id: At2g39690.1
  misc_feature (333)..(684): Homolog of NCBI NO: 34895788 NR Description: P0434B04.9 [Oryza sativa (japonica
  misc_feature (366)..(682): Homolog of NCBI NO: 25407787 NR Description: hypothetical protein AT4g37080 [imported] - thaliana >gi|4006868|emb|CAB16786.1| putative protein thaliana] >gi|7270657|emb|CAB80374.1| putative protein
  misc_feature (366)..(682): Homolog of NCBI NO: 30690854 NR Description: expressed protein [Arabidopsis thaliana] AT4g37080/C7A10_280 [Arabidopsis thaliana]
  misc_feature (293)..(681): Homolog of NCBI NO: 30684987 NR Description: expressed protein [Arabidopsis thaliana] At1g16750/F19K19_26 [Arabidopsis thaliana]
  misc_feature (47)..(152): Homolog of NCBI NO: 30684987 NR Description: expressed protein [Arabidopsis thaliana] At1g16750/F19K19_26 [Arabidopsis thaliana]
NLLHYHYLPPDFNHSFRLCLTAPSSSRWSSPDDYCSILAMPTTTLPGSISPFNVPHSVRTKKPNGQQKKEEIEKEVWMLREMLDQEEKTREILEQVQKHQLPSSSSSLTLPASLPPKMKELITELSIVEGEISRLEIQISHLQINLKQEQDETLKQATTSSSRRAWQTSETYKDDNINPYQAPTLPKYPKLPPPSPMVNKGMMKSENNNTKSTTSHHQENATFGTKTLHFINKAIKGDYAIESFRKSNEKVGVVEKENHRSVQHENKVQENMKMKKIRTMKSPSPLREPRYTSPNKPNKDRVAALDASLDIPPKSLSSTILMEDGQNIQKWHPNKLAENIMKCLNFIYVRLLRTTRVMELEKTGPISRSTNFSLSSRSFRVDNATSSLSKSMNLVSYKESRQQDPYGIFDVESSLARDIGPYKNLVIFTSSSMDSKCISSSSSVSLIQKLRVLMNNLETVDLKVLSHQQKLAFWINMFNACVMHGYLQHGVPKTAERLQSLVYNKATMNVGGKNISAHTIEHCILRKSTSSTMTQDRHEEMIIRKLYGVEATDPNITFALSCGTRSSPAVRIYTGEGVTTELEKSKLEYLQASLVVTAAKRIGLPELLLKHATDFVVLTADGGTGEMEQLGSLVKWVCNQLPTSGSLRKSMVDCFKNPNSKASSSSSAVEKIPYDFEFQYLLAI

SEQ ID NO: 95968 - protein, 645 aa, Arabidopsis thaliana
  peptide (1)..(645): Ceres Seq. ID no. 12731392
  misc_feature (412)..(551): Pfam Name: Protein of unknown function, DUF547 Pfam Description: Protein of unknown function, DUF547
  misc_feature (347)..(645): Homolog of NCBI NO: 15239037 NR Description: putative protein; protein id: At5g42690.1 thaliana] >gi|10177272|dbj|BAB10625.1|
  misc_feature (17)..(261): Homolog of NCBI NO: 15239037 NR Description: putative protein; protein id: At5g42690.1 thaliana] >gi|10177272|dbj|BAB10625.1|
  misc_feature (203)..(645): Homolog of NCBI NO: 9294368 NR Description: gb|AAB97123.1~gene_id:T16H11.2~similar to unknown
  misc_feature (27)..(113): Homolog of NCBI NO: 9294368 NR Description: gb|AAB97123.1~gene_id:T16H11.2~similar to unknown
  misc_feature (294)..(645): Homolog of NCBI NO: 15225527 NR Description: hypothetical protein; protein id: At2g39690.1
  misc_feature (294)..(645): Homolog of NCBI NO: 34895788 NR Description: P0434B04.9 [Oryza sativa (japonica
  misc_feature (327)..(643): Homolog of NCBI NO: 25407787 NR Description: hypothetical protein AT4g37080 [imported] - thaliana >gi|4006868|emb|CAB16786.1| putative protein thaliana] >gi|7270657|emb|CAB80374.1| putative protein
  misc_feature (327)..(643): Homolog of NCBI NO: 30690854 NR Description: expressed protein [Arabidopsis thaliana] AT4g37080/C7A10_280 [Arabidopsis thaliana]
  misc_feature (254)..(642): Homolog of NCBI NO: 30684987 NR Description: expressed protein [Arabidopsis thaliana] At1g16750/F19K19_26 [Arabidopsis thaliana]
  misc_feature (8)..(113): Homolog of NCBI NO: 30684987 NR Description: expressed protein [Arabidopsis thaliana] At1g16750/F19K19_26 [Arabidopsis thaliana]
MPTTTLPGSISPFNVPHSVRTKKPNGQQKKEEIEKEVWMLREMLDQEEKTREILEQVQKHQLPSSSSSLTLPASLPPKMKELITELSIVEGEISRLEIQISHLQINLKQEQDETLKQATTSSSRRAWQTSETYKDDNINPYQAPTLPKYPKLPPPSPMVNKGMMKSENNNTKSTTSHHQENATFGTKTLHFINKAIKGDYAIESFRKSNEKVGVVEKENHRSVQHENKVQENMKMKKIRTMKSPSPLREPRYTSPNKPNKDRVAALDASLDIPPKSLSSTILMEDGQNIQKWHPNKLAENIMKCLNFIYVRLLRTTRVMELEKTGPISRSTNFSLSSRSFRVDNATSSLSKSMNLVSYKESRQQDPYGIFDVESSLARDIGPYKNLVIFTSSSMDSKCISSSSSVSLIQKLRVLMNNLETVDLKVLSHQQKLAFWINMFNACVMHGYLQHGVPKTAERLQSLVYNKATMNVGGKNISAHTIEHCILRKSTSSTMTQDRHEEMIIRKLYGVEATDPNITFALSCGTRSSPAVRIYTGEGVTTELEKSKLEYLQASLVVTAAKRIGLPELLLKHATDFVVLTADGGTGEMEQLGSLVKWVCNQLPTSGSLRKSMVDCFKNPNSKASSSSSAVEKIPYDFEFQYLLAI

SEQ ID NO: 95969 - protein, 607 aa, Arabidopsis thaliana
  peptide (1)..(607): Ceres Seq. ID no. 12731393
  misc_feature (374)..(513): Pfam Name: Protein of unknown function, DUF547 Pfam Description: Protein of unknown function, DUF547
  misc_feature (309)..(607): Homolog of NCBI NO: 15239037 NR Description: putative protein; protein id: At5g42690.1 thaliana] >gi|10177272|dbj|BAB10625.1|
  misc_feature (1)..(223): Homolog of NCBI NO: 15239037 NR Description: putative protein; protein id: At5g42690.1 thaliana] >gi|10177272|dbj|BAB10625.1|
  misc_feature (165)..(607): Homolog of NCBI NO: 9294368 NR Description: gb|AAB97123.1~gene_id:T16H11.2~similar to unknown
  misc_feature (1)..(75): Homolog of NCBI NO: 9294368 NR Description: gb|AAB97123.1~gene_id:T16H11.2~similar to unknown
  misc_feature (256)..(607): Homolog of NCBI NO: 15225527 NR Description: hypothetical protein; protein id: At2g39690.1
  misc_feature (256)..(607): Homolog of NCBI NO: 34895788 NR Description: P0434B04.9 [Oryza sativa (japonica
  misc_feature (289)..(605): Homolog of NCBI NO: 25407787 NR Description: hypothetical protein AT4g37080 [imported] - thaliana >gi|4006868|emb|CAB16786.1| putative protein thaliana] >gi|7270657|emb|CAB80374.1| putative protein
  misc_feature (289)..(605): Homolog of NCBI NO: 30690854 NR Description: expressed protein [Arabidopsis thaliana] AT4g37080/C7A10_280 [Arabidopsis thaliana]
  misc_feature (216)..(604): Homolog of NCBI NO: 30684987 NR Description: expressed protein [Arabidopsis thaliana] At1g16750/F19K19_26 [Arabidopsis thaliana]
  misc_feature (1)..(75): Homolog of NCBI NO: 30684987 NR Description: expressed protein [Arabidopsis thaliana] At1g16750/F19K19_26 [Arabidopsis thaliana]
MLREMLDQEEKTREILEQVQKHQLPSSSSSLTLPASLPPKMKELITELSIVEGEISRLEIQISHLQINLKQEQDETLKQATTSSSRRAWQTSETYKDDNINPYQAPTLPKYPKLPPPSPMVNKGMMKSENNNTKSTTSHHQENATFGTKTLHFINKAIKGDYAIESFRKSNEKVGVVEKENHRSVQHENKVQENMKMKKIRTMKSPSPLREPRYTSPNKPNKDRVAALDASLDIPPKSLSSTILMEDGQNIQKWHPNKLAENIMKCLNFIYVRLLRTTRVMELEKTGPISRSTNFSLSSRSFRVDNATSSLSKSMNLVSYKESRQQDPYGIFDVESSLARDIGPYKNLVIFTSSSMDSKCISSSSSVSLIQKLRVLMNNLETVDLKVLSHQQKLAFWINMFNACVMHGYLQHGVPKTAERLQSLVYNKATMNVGGKNISAHTIEHCILRKSTSSTMTQDRHEEMIIRKLYGVEATDPNITFALSCGTRSSPAVRIYTGEGVTTELEKSKLEYLQASLVVTAAKRIGLPELLLKHATDFVVLTADGGTGEMEQLGSLVKWVCNQLPTSGSLRKSMVDCFKNPNSKASSSSSAVEKIPYDFEFQYLLAI

SEQ ID NO: 95970 - DNA, 2250 bp, Arabidopsis thaliana
  misc_feature (1)..(2250): Ceres Seq. ID no. 12731394
  misc_feature: MA Experiment ID: 20000173 Result: Up-regulated in Transcription
  misc_feature: MA Experiment 20000173 PARAMETER Experiment Name: At_42deg_Heat_P Parameter: Age (day) Value: 14
  misc_feature: MA Experiment 20000173 PARAMETER Experiment Name: At_42deg_Heat_P Parameter: Organism Value: A. thaliana
  misc_feature: MA Experiment 20000173 PARAMETER Experiment Name: At_42deg_Heat_P Parameter: Plant Line Value: WS
  misc_feature: MA Experiment 20000173 PARAMETER Experiment Name: At_42deg_Heat_P Parameter: Temperature (deg C) Value: 42 vs. 22
  misc_feature: MA Experiment 20000173 PARAMETER Experiment Name: At_42deg_Heat_P Parameter: Timepoint (hr) Value: 6
  misc_feature: MA Experiment 20000173 PARAMETER Experiment Name: At_42deg_Heat_P Parameter: Tissue Value: Aerial
  misc_feature: MA Experiment ID: 20000185 Result: Up-regulated in Transcription
  misc_feature: MA Experiment 20000185 PARAMETER Experiment Name: At_Roots__P Parameter: Age (day) Value: 7 vs. 21
  misc_feature: MA Experiment 20000185 PARAMETER Experiment Name: At_Roots__P Parameter: Organism Value: A. thaliana
  misc_feature: MA Experiment 20000185 PARAMETER Experiment Name: At_Roots__P Parameter: Tissue Value: Roots vs. Whole Plant
  misc_feature: MA Experiment ID: 20000264 Result: Up-regulated in Transcription
  misc_feature: MA Experiment 20000264 PARAMETER Experiment Name: At_Open_Flower_P Parameter: Age (day) Value: 21
  misc_feature: MA Experiment 20000264 PARAMETER Experiment Name: At_Open_Flower_P Parameter: Plant Line Value: WS
  misc_feature: MA Experiment 20000264 PARAMETER Experiment Name: At_Open_Flower_P Parameter: Tissue Value: Open Flower vs. Whole Plant
  misc_feature: MA Experiment ID: 20000265 Result: Up-regulated in Transcription
  misc_feature: MA Experiment 20000265 PARAMETER Experiment Name: At_Open_Flower_P Parameter: Age (day) Value: 21
  misc_feature: MA Experiment 20000265 PARAMETER Experiment Name: At_Open_Flower_P Parameter: Plant Line Value: WS
  misc_feature: MA Experiment 20000265 PARAMETER Experiment Name: At_Open_Flower_P Parameter: Tissue Value: Closed Flower vs. Whole Plant
  misc_feature: MA Experiment ID: 20000286 Result: Up-regulated in Transcription
  misc_feature: MA Experiment 20000286 PARAMETER Experiment Name: At_Open_Flower_P Parameter: Age (day) Value: 21
  misc_feature: MA Experiment 20000286 PARAMETER Experiment Name: At_Open_Flower_P Parameter: Plant Line Value: WS
  misc_feature: MA Experiment 20000286 PARAMETER Experiment Name: At_Open_Flower_P Parameter: Tissue Value: Half Open vs. Whole Plant
  misc_feature: MA Experiment ID: 20000436 Result: Up-regulated in Transcription
  misc_feature: MA Experiment 20000436 PARAMETER Experiment Name: At_Drought_P Parameter: Age (day) Value: 7
  misc_feature: MA Experiment 20000436 PARAMETER Experiment Name: At_Drought_P Parameter: Organism Value: A. thaliana
  misc_feature: MA Experiment 20000436 PARAMETER Experiment Name: At_Drought_P Parameter: Plant Line Value: WS
  misc_feature: MA Experiment 20000436 PARAMETER Experiment Name: At_Drought_P Parameter: Timepoint (hr) Value: 12
  misc_feature: MA Experiment 20000436 PARAMETER Experiment Name: At_Drought_P Parameter: Tissue Value: Whole Plant
  misc_feature: MA Experiment 20000436 PARAMETER Experiment Name: At_Drought_P Parameter: Treatment Value: Drought vs. No Drought
  misc_feature: MA Experiment ID: 20000437 Result: Up-regulated in Transcription
  misc_feature: MA Experiment 20000437 PARAMETER Experiment Name: At_Drought_P Parameter: Age (day) Value: 8
  misc_feature: MA Experiment 20000437 PARAMETER Experiment Name: At_Drought_P Parameter: Organism Value: A. thaliana
  misc_feature: MA Experiment 20000437 PARAMETER Experiment Name: At_Drought_P Parameter: Plant Line Value: WS
  misc_feature: MA Experiment 20000437 PARAMETER Experiment Name: At_Drought_P Parameter: Timepoint (hr) Value: 24
  misc_feature: MA Experiment 20000437 PARAMETER Experiment Name: At_Drought_P Parameter: Tissue Value: Whole Plant
  misc_feature: MA Experiment 20000437 PARAMETER Experiment Name: At_Drought_P Parameter: Treatment Value: Drought vs. No Drought
  misc_feature: MA Experiment ID: 20000438 Result: Down-regulated in Transcription
  misc_feature: MA Experiment 20000438 PARAMETER Experiment Name: At_Shoots__P Parameter: Age (day) Value: 14
  misc_feature: MA Experiment 20000438 PARAMETER Experiment Name: At_Shoots__P Parameter: Tissue Value: Shoots vs. Whole Plant
  misc_feature: MA Experiment ID: 20000439 Result: Up-regulated in Transcription
  misc_feature: MA Experiment 20000439 PARAMETER Experiment Name: At_Roots__P Parameter: Age (day) Value: 14 vs. 21
  misc_feature: MA Experiment 20000439 PARAMETER Experiment Name: At_Roots__P Parameter: Organism Value: A. thaliana
  misc_feature: MA Experiment 20000439 PARAMETER Experiment Name: At_Roots__P Parameter: Tissue Value: Roots vs. Whole Plant
  misc_feature: MA Experiment ID: 20000527 Result: Up-regulated in Transcription
  misc_feature: MA Experiment 20000527 PARAMETER Experiment Name: At_10percent_PEG_P Parameter: Age (day) Value: 20
  misc_feature: MA Experiment 20000527 PARAMETER Experiment Name: At_10percent_PEG_P Parameter: Organism Value: A. thaliana
  misc_feature: MA Experiment 20000527 PARAMETER Experiment Name: At_10percent_PEG_P Parameter: Plant Line Value: WS
  misc_feature: MA Experiment 20000527 PARAMETER Experiment Name: At_10percent_PEG_P Parameter: Timepoint (day) Value: 20
  misc_feature: MA Experiment 20000527 PARAMETER Experiment Name: At_10percent_PEG_P Parameter: Tissue Value: Whole Plant
  misc_feature: MA Experiment 20000527 PARAMETER Experiment Name: At_10percent_PEG_P Parameter: Treatment Value: 10percent PEG vs. No Treatment
atgacggagacgacgaaggtgatgtacatagtggtggtcgatggaacggatacggcggagacggtggaagaagacgggaccgggacttggaaagattcgtttaggtatacacgtcctgttttgcagagtactcttcagcttatgggatgcaaagcccgtcacgccttcaagattagccgcagggtgtttgagttaataagaagtgagggatctttaatcctttctccctcgctttcgccctcgcatagtaaagaatctgaatttcagaagacaggtgatgcttcagcttgtgctaatgtagaaaaggctaacaaagttaacagtttggctactgatgatgttgataagagtaaaagtaagccgtttgaggtgtacaaaaggcgaacaaccgttgttgtttctcgtgaaatatttgtaaacgttgtctgtgatgccctggctgagtacaagtatgtgggtcatgaccaaagggcagacttgattctgtcgtgcagaatccgagaaaggaaagaatctgtgactgttctactgtgcggtactagtggctgtggcaaatctacactctccgcacttctggctttacaatactggattctgttttccttacagggaagtaggcttgggattacaacggtggtctcaaccgactcaatccgtcacatgatgaggagtttcgttgatgaaaagcagaatcctttgctatgggcttcaacataccatgctggagagtaccttgaccctgtggcagttgctgagtcaaaagccagaagaagaagagccaaaaaaatggatagtattgaggacgaaaaagcgaaagcctctgaaggtgggaaggctaagaatactcaacagactgatgttggatcaacaaaaaacacccctgtattgttaagtcccaagcaaatggctgtagaaggatttaaggctcaaagtgaaatggttattgacaatctcgataggctcattaccgcatgggaagaaaggaaagagtctgttattgttgaaggtgtccatttaagcctcaactttgtgatgggactgatgaaaaagcatccttctatagttcctttcatggtatacatcgcaaacgaggagaaacatttggaacgatttgcagttagagctaagtacatgaccctggacccagagaaaaacaagtatgtaaaatatatacgtaacatcagaacaatacaggattacttgtgtaaacgagctgacaaacatctcgtccccaagataaacaataccaatgtcgacaagagtgtggctgcgatccacgctacagtcttcagttgcctgcgtaggcgagaagcaggagagcatctctatgatgctactacaaatactgtctcagtgattgacgatgagtatagaaaccagtgtacagctaattcattgagctccaaaggaatgtttcagctgatccaaagaaaaggttcttctaggcatcttatggctcttctcaatactgatggcactttcgcaagaacttggcccgttactggtaaggtcgatgagagtggaaagccagtcttttgtaatgagatgattgaagaaaatggaatggagcacccggtctatggatacctacagaaagctgaaccggtgaatcttcagtttggtctatttgggatcagtgcttggcctagtgatggagccactagccgcgctgggagtgtagatgactgtaaagctgacatggctgaaaccagcagtcggtattactcttcttgctgcagctcgcctaggatgtctgaaggaacttctaaagagcttaaggaggatcagtcagtccatgggagcgatgaagaagtcgaggatgatcctcccgagccagatacagattttagcgatgacgataacaagcgagaccatgacgaggtgggttcggttgatgagcaatcaacaaagtcagatgaggagtacgatgatcttgctatggaagacaaaagctactggacagatgaagaggaagagtcacgagatacgattgcaataatgtctgaaaaaaacaacaagcaagcaacaaaagaagacaagtacatacagaacttagacctttttctacggaccgcaaaccagcagcttgtcgagccacttcagctatgtgcatcactgctcacatgcgagaatgggaacacaagactctggttgggtaaagaaaagatgaggaaacgttctttaagcatctcggccattggcaaacatgggtcgggtttgggtgatgcgattctcttgggtgccccatga

SEQ ID NO: 95971 - protein, 749 aa, Arabidopsis thaliana
  peptide (1)..(749): Ceres Seq. ID no. 12731395
  misc_feature (179)..(241): Pfam Name: Thymidine kinase from herpesvirus Pfam Description: Thymidine kinase from herpesvirus
  misc_feature (199)..(745): Homolog of NCBI NO: 11290092 NR Description: hypothetical protein T14D3.30 - Arabidopsis >gi|6911847|emb|CAB72147.1| putative protein [Arabidopsis
  misc_feature (199)..(745): Homolog of NCBI NO: 18407911 NR Description: putative protein; protein id: At3g45090.1, by cDNA: gi_15810518, supported by cDNA: gi_20465686 [Arabidopsis >gi|15810519|gb|AAL07147.1| unknown protein [Arabidopsis
  misc_feature (1)..(295): Homolog of NCBI NO: 11290092 NR Description: hypothetical protein T14D3.30 - Arabidopsis >gi|6911847|emb|CAB72147.1| putative protein [Arabidopsis
  misc_feature (1)..(295): Homolog of NCBI NO: 18407911 NR Description: putative protein; protein id: At3g45090.1, by cDNA: gi_15810518, supported by cDNA: gi_20465686 [Arabidopsis >gi|15810519|gb|AAL07147.1| unknown protein [Arabidopsis
  misc_feature (297)..(478): Homolog of NCBI NO: 28828411 NR Description: similar to Arabidopsis thaliana (Mouse-ear
  misc_feature (131)..(245): Homolog of NCBI NO: 28828411 NR Description: similar to Arabidopsis thaliana (Mouse-ear
  misc_feature (32)..(193): Homolog of NCBI NO: 28828411 NR Description: similar to Arabidopsis thaliana (Mouse-ear
  misc_feature (304)..(437): Homolog of NCBI NO: 20094304 NR Description: 2-Phosphoglycerate kinase [Methanopyrus kandleri
  misc_feature (165)..(245): Homolog of NCBI NO: 20094304 NR Description: 2-Phosphoglycerate kinase [Methanopyrus kandleri
  misc_feature (304)..(422): Homolog of NCBI NO: 15669675 NR Description: 2-phosphoglycerate kinase (2pgk) [Methanococcus
MTETTKVMYIVVVDGTDTAETVEEDGTGTWKDSFRYTRPVLQSTLQLMGCKARHAFKISRRVFELIRSEGSLILSPSLSPSHSKESEFQKTGDASACANVEKANKVNSLATDDVDKSKSKPFEVYKRRTTVVVSREIFVNVVCDALAEYKYVGHDQRADLILSCRIRERKESVTVLLCGTSGCGKSTLSALLALQYWILFSLQGSRLGITTVVSTDSIRHMMRSFVDEKQNPLLWASTYHAGEYLDPVAVAESKARRRRAKKMDSIEDEKAKASEGGKAKNTQQTDVGSTKNTPVLLSPKQMAVEGFKAQSEMVIDNLDRLITAWEERKESVIVEGVHLSLNFVMGLMKKHPSIVPFMVYIANEEKHLERFAVRAKYMTLDPEKNKYVKYIRNIRTIQDYLCKRADKHLVPKINNTNVDKSVAAIHATVFSCLRRREAGEHLYDATTNTVSVIDDEYRNQCTANSLSSKGMFQLIQRKGSSRHLMALLNTDGTFARTWPVTGKVDESGKPVFCNEMIEENGMEHPVYGYLQKAEPVNLQFGLFGISAWPSDGATSRAGSVDDCKADMAETSSRYYSSCCSSPRMSEGTSKELKEDQSVHGSDEEVEDDPPEPDTDFSDDDNKRDHDEVGSVDEQSTKSDEEYDDLAMEDKSYWTDEEEESRDTIAIMSEKNNKQATKEDKYIQNLDLFLRTANQQLVEPLQLCASLLTCENGNTRLWLGKEKMRKRSLSISAIGKHGSGLGDAILLGAP

SEQ ID NO: 95972 - protein, 742 aa, Arabidopsis thaliana
  peptide (1)..(742): Ceres Seq. ID no. 12731396
  misc_feature (172)..(234): Pfam Name: Thymidine kinase from herpesvirus Pfam Description: Thymidine kinase from herpesvirus
  misc_feature (192)..(738): Homolog of NCBI NO: 11290092 NR Description: hypothetical protein T14D3.30 - Arabidopsis >gi|6911847|emb|CAB72147.1| putative protein [Arabidopsis
  misc_feature (192)..(738): Homolog of NCBI NO: 18407911 NR Description: putative protein; protein id: At3g45090.1, by cDNA: gi_15810518, supported by cDNA: gi_20465686 [Arabidopsis >gi|15810519|gb|AAL07147.1| unknown protein [Arabidopsis
  misc_feature (1)..(288): Homolog of NCBI NO: 11290092 NR Description: hypothetical protein T14D3.30 - Arabidopsis >gi|6911847|emb|CAB72147.1| putative protein [Arabidopsis
  misc_feature (1)..(288): Homolog of NCBI NO: 18407911 NR Description: putative protein; protein id: At3g45090.1, by cDNA: gi_15810518, supported by cDNA: gi_20465686 [Arabidopsis >gi|15810519|gb|AAL07147.1| unknown protein [Arabidopsis
  misc_feature (290)..(471): Homolog of NCBI NO: 28828411 NR Description: similar to Arabidopsis thaliana (Mouse-ear
  misc_feature (124)..(238): Homolog of NCBI NO: 28828411 NR Description: similar to Arabidopsis thaliana (Mouse-ear
  misc_feature (25)..(186): Homolog of NCBI NO: 28828411 NR Description: similar to Arabidopsis thaliana (Mouse-ear
  misc_feature (297)..(430): Homolog of NCBI NO: 20094304 NR Description: 2-Phosphoglycerate kinase [Methanopyrus kandleri
  misc_feature (158)..(238): Homolog of NCBI NO: 20094304 NR Description: 2-Phosphoglycerate kinase [Methanopyrus kandleri
  misc_feature (297)..(415): Homolog of NCBI NO: 15669675 NR Description: 2-phosphoglycerate kinase (2pgk) [Methanococcus
MYIVVVDGTDTAETVEEDGTGTWKDSFRYTRPVLQSTLQLMGCKARHAFKISRRVFELIRSEGSLILSPSLSPSHSKESEFQKTGDASACANVEKANKVNSLATDDVDKSKSKPFEVYKRRTTVVVSREIFVNVVCDALAEYKYVGHDQRADLILSCRIRERKESVTVLLCGTSGCGKSTLSALLALQYWILFSLQGSRLGITTVVSTDSIRHMMRSFVDEKQNPLLWASTYHAGEYLDPVAVAESKARRRRAKKMDSIEDEKAKASEGGKAKNTQQTDVGSTKNTPVLLSPKQMAVEGFKAQSEMVIDNLDRLITAWEERKESVIVEGVHLSLNFVMGLMKKHPSIVPFMVYIANEEKHLERFAVRAKYMTLDPEKNKYVKYIRNIRTIQDYLCKRADKHLVPKINNTNVDKSVAAIHATVFSCLRRREAGEHLYDATTNTVSVIDDEYRNQCTANSLSSKGMFQLIQRKGSSRHLMALLNTDGTFARTWPVTGKVDESGKPVFCNEMIEENGMEHPVYGYLQKAEPVNLQFGLFGISAWPSDGATSRAGSVDDCKADMAETSSRYYSSCCSSPRMSEGTSKELKEDQSVHGSDEEVEDDPPEPDTDFSDDDNKRDHDEVGSVDEQSTKSDEEYDDLAMEDKSYWTDEEEESRDTIAIMSEKNNKQATKEDKYIQNLDLFLRTANQQLVEPLQLCASLLTCENGNTRLWLGKEKMRKRSLSISAIGKHGSGLGDAILLGAP

SEQ ID NO: 95973 - protein, 702 aa, Arabidopsis thaliana
  peptide (1)..(702): Ceres Seq. ID no. 12731397
  misc_feature (132)..(194): Pfam Name: Thymidine kinase from herpesvirus Pfam Description: Thymidine kinase from herpesvirus
  misc_feature (152)..(698): Homolog of NCBI NO: 11290092 NR Description: hypothetical protein T14D3.30 - Arabidopsis >gi|6911847|emb|CAB72147.1| putative protein [Arabidopsis
  misc_feature (152)..(698): Homolog of NCBI NO: 18407911 NR Description: putative protein; protein id: At3g45090.1, by cDNA: gi_15810518, supported by cDNA: gi_20465686 [Arabidopsis >gi|15810519|gb|AAL07147.1| unknown protein [Arabidopsis
  misc_feature (1)..(248): Homolog of NCBI NO: 11290092 NR Description: hypothetical protein T14D3.30 - Arabidopsis >gi|6911847|emb|CAB72147.1| putative protein [Arabidopsis
  misc_feature (1)..(248): Homolog of NCBI NO: 18407911 NR Description: putative protein; protein id: At3g45090.1, by cDNA: gi_15810518, supported by cDNA: gi_20465686 [Arabidopsis >gi|15810519|gb|AAL07147.1| unknown protein [Arabidopsis
  misc_feature (250)..(431): Homolog of NCBI NO: 28828411 NR Description: similar to Arabidopsis thaliana (Mouse-ear
  misc_feature (84)..(198): Homolog of NCBI NO: 28828411 NR Description: similar to Arabidopsis thaliana (Mouse-ear
  misc_feature (1)..(146): Homolog of NCBI NO: 28828411 NR Description: similar to Arabidopsis thaliana (Mouse-ear
  misc_feature (257)..(390): Homolog of NCBI NO: 20094304 NR Description: 2-Phosphoglycerate kinase [Methanopyrus kandleri
  misc_feature (118)..(198): Homolog of NCBI NO: 20094304 NR Description: 2-Phosphoglycerate kinase [Methanopyrus kandleri
  misc_feature (257)..(375): Homolog of NCBI NO: 15669675 NR Description: 2-phosphoglycerate kinase (2pgk) [Methanococcus
MGCKARHAFKISRRVFELIRSEGSLILSPSLSPSHSKESEFQKTGDASACANVEKANKVNSLATDDVDKSKSKPFEVYKRRTTVVVSREIFVNVVCDALAEYKYVGHDQRADLILSCRIRERKESVTVLLCGTSGCGKSTLSALLALQYWILFSLQGSRLGITTVVSTDSIRHMMRSFVDEKQNPLLWASTYHAGEYLDPVAVAESKARRRRAKKMDSIEDEKAKASEGGKAKNTQQTDVGSTKNTPVLLSPKQMAVEGFKAQSEMVIDNLDRLITAWEERKESVIVEGVHLSLNFVMGLMKKHPSIVPFMVYIANEEKHLERFAVRAKYMTLDPEKNKYVKYIRNIRTIQDYLCKRADKHLVPKINNTNVDKSVAAIHATVFSCLRRREAGEHLYDATTNTVSVIDDEYRNQCTANSLSSKGMFQLIQRKGSSRHLMALLNTDGTFARTWPVTGKVDESGKPVFCNEMIEENGMEHPVYGYLQKAEPVNLQFGLFGISAWPSDGATSRAGSVDDCKADMAETSSRYYSSCCSSPRMSEGTSKELKEDQSVHGSDEEVEDDPPEPDTDFSDDDNKRDHDEVGSVDEQSTKSDEEYDDLAMEDKSYWTDEEEESRDTIAIMSEKNNKQATKEDKYIQNLDLFLRTANQQLVEPLQLCASLLTCENGNTRLWLGKEKMRKRSLSISAIGKHGSGLGDAILLGAP

SEQ ID NO: 95974 - DNA, 615 bp, Arabidopsis thaliana
  misc_feature (1)..(615): Ceres Seq. ID no. 12731434
  misc_feature: MA Experiment ID: 20000171 Result: Down-regulated in Transcription
  misc_feature: MA Experiment 20000171 PARAMETER Experiment Name: At_42deg_Heat_P Parameter: Age (day) Value: 14
  misc_feature: MA Experiment 20000171 PARAMETER Experiment Name: At_42deg_Heat_P Parameter: Organism Value: A. thaliana
  misc_feature: MA Experiment 20000171 PARAMETER Experiment Name: At_42deg_Heat_P Parameter: Plant Line Value: WS
  misc_feature: MA Experiment 20000171 PARAMETER Experiment Name: At_42deg_Heat_P Parameter: Temperature (deg C) Value: 42 vs. 22
  misc_feature: MA Experiment 20000171 PARAMETER Experiment Name: At_42deg_Heat_P Parameter: Timepoint (hr) Value: 1
  misc_feature: MA Experiment 20000171 PARAMETER Experiment Name: At_42deg_Heat_P Parameter: Tissue Value: Aerial
  misc_feature: MA Experiment ID: 20000173 Result: Down-regulated in Transcription
  misc_feature: MA Experiment 20000173 PARAMETER Experiment Name: At_42deg_Heat_P Parameter: Age (day) Value: 14
  misc_feature: MA Experiment 20000173 PARAMETER Experiment Name: At_42deg_Heat_P Parameter: Organism Value: A. thaliana
  misc_feature: MA Experiment 20000173 PARAMETER Experiment Name: At_42deg_Heat_P Parameter: Plant Line Value: WS
  misc_feature: MA Experiment 20000173 PARAMETER Experiment Name: At_42deg_Heat_P Parameter: Temperature (deg C) Value: 42 vs. 22
  misc_feature: MA Experiment 20000173 PARAMETER Experiment Name: At_42deg_Heat_P Parameter: Timepoint (hr) Value: 6
  misc_feature: MA Experiment 20000173 PARAMETER Experiment Name: At_42deg_Heat_P Parameter: Tissue Value: Aerial
  misc_feature: MA Experiment ID: 20000179 Result: Down-regulated in Transcription
  misc_feature: MA Experiment 20000179 PARAMETER Experiment Name: At_Germinating_Seeds_P Parameter: Age (hr) Value: 6 vs. 0
  misc_feature: MA Experiment 20000179 PARAMETER Experiment Name: At_Germinating_Seeds_P Parameter: Tissue Value: Germinating Seeds
  misc_feature: MA Experiment ID: 20000182 Result: Up-regulated in Transcription
  misc_feature: MA Experiment 20000182 PARAMETER Experiment Name: At_2mM_SA_P Parameter: Age (day) Value: 14
  misc_feature: MA Experiment 20000182 PARAMETER Experiment Name: At_2mM_SA_P Parameter: Organism Value: A. thaliana
  misc_feature: MA Experiment 20000182 PARAMETER Experiment Name: At_2mM_SA_P Parameter: Plant Line Value: WS
  misc_feature: MA Experiment 20000182 PARAMETER Experiment Name: At_2mM_SA_P Parameter: Timepoint (hr) Value: 6
  misc_feature: MA Experiment 20000182 PARAMETER Experiment Name: At_2mM_SA_P Parameter: Tissue Value: Aerial
  misc_feature: MA Experiment 20000182 PARAMETER Experiment Name: At_2mM_SA_P Parameter: Treatment Value: 2mM SA vs. No Treatment
  misc_feature: MA Experiment ID: 20000184 Result: Down-regulated in Transcription
  misc_feature: MA Experiment 20000184 PARAMETER Experiment Name: At_Shoots__P Parameter: Age (day) Value: 7
  misc_feature: MA Experiment 20000184 PARAMETER Experiment Name: At_Shoots__P Parameter: Tissue Value: Shoots vs. Whole Plant
  misc_feature: MA Experiment ID: 20000185 Result: Up-regulated in Transcription
  misc_feature: MA Experiment 20000185 PARAMETER Experiment Name: At_Roots__P Parameter: Age (day) Value: 7 vs. 21
  misc_feature: MA Experiment 20000185 PARAMETER Experiment Name: At_Roots__P Parameter: Organism Value: A. thaliana
  misc_feature: MA Experiment 20000185 PARAMETER Experiment Name: At_Roots__P Parameter: Tissue Value: Roots vs. Whole Plant
  misc_feature: MA Experiment ID: 20000227 Result: Up-regulated in Transcription
  misc_feature: MA Experiment 20000227 PARAMETER Experiment Name: At_Root-Tips-vs-Tops_P Parameter: Tissue Value: Root Tips vs. Root Tops
  misc_feature: MA Experiment ID: 20000234 Result: Down-regulated in Transcription
  misc_feature: MA Experiment 20000234 PARAMETER Experiment Name: At_Siliques_P Parameter: Age (day) Value: 21
  misc_feature: MA Experiment 20000234 PARAMETER Experiment Name: At_Siliques_P Parameter: Organism Value: A. thaliana
  misc_feature: MA Experiment 20000234 PARAMETER Experiment Name: At_Siliques_P Parameter: Plant Line Value: WS
  misc_feature: MA Experiment 20000234 PARAMETER Experiment Name: At_Siliques_P Parameter: Tissue Value: Less Than 5mm Siliques vs. Whole Plant
  misc_feature: MA Experiment ID: 20000265 Result: Down-regulated in Transcription
  misc_feature: MA Experiment 20000265 PARAMETER Experiment Name: At_Open_Flower_P Parameter: Age (day) Value: 21
  misc_feature: MA Experiment 20000265 PARAMETER Experiment Name: At_Open_Flower_P Parameter: Plant Line Value: WS
  misc_feature: MA Experiment 20000265 PARAMETER Experiment Name: At_Open_Flower_P Parameter: Tissue Value: Closed Flower vs. Whole Plant
  misc_feature: MA Experiment ID: 20000286 Result: Down-regulated in Transcription
  misc_feature: MA Experiment 20000286 PARAMETER Experiment Name: At_Open_Flower_P Parameter: Age (day) Value: 21
  misc_feature: MA Experiment 20000286 PARAMETER Experiment Name: At_Open_Flower_P Parameter: Plant Line Value: WS
  misc_feature: MA Experiment 20000286 PARAMETER Experiment Name: At_Open_Flower_P Parameter: Tissue Value: Half Open vs. Whole Plant
  misc_feature: MA Experiment ID: 20000438 Result: Down-regulated in Transcription
  misc_feature: MA Experiment 20000438 PARAMETER Experiment Name: At_Shoots__P Parameter: Age (day) Value: 14
  misc_feature: MA Experiment 20000438 PARAMETER Experiment Name: At_Shoots__P Parameter: Tissue Value: Shoots vs. Whole Plant
  misc_feature: MA Experiment ID: 20000439 Result: Up-regulated in Transcription
  misc_feature: MA Experiment 20000439 PARAMETER Experiment Name: At_Roots__P Parameter: Age (day) Value: 14 vs. 21
  misc_feature: MA Experiment 20000439 PARAMETER Experiment Name: At_Roots__P Parameter: Organism Value: A. thaliana
  misc_feature: MA Experiment 20000439 PARAMETER Experiment Name: At_Roots__P Parameter: Tissue Value: Roots vs. Whole Plant
  misc_feature: MA Experiment ID: 20000460 Result: Down-regulated in Transcription
  misc_feature: MA Experiment 20000460 PARAMETER Experiment Name: At_10percent_PEG_P Parameter: Age (day) Value: 12
  misc_feature: MA Experiment 20000460 PARAMETER Experiment Name: At_10percent_PEG_P Parameter: Organism Value: A. thaliana
  misc_feature: MA Experiment 20000460 PARAMETER Experiment Name: At_10percent_PEG_P Parameter: Plant Line Value: WS
  misc_feature: MA Experiment 20000460 PARAMETER Experiment Name: At_10percent_PEG_P Parameter: Timepoint (day) Value: 12
  misc_feature: MA Experiment 20000460 PARAMETER Experiment Name: At_10percent_PEG_P Parameter: Tissue Value: Whole Plant
  misc_feature: MA Experiment 20000460 PARAMETER Experiment Name: At_10percent_PEG_P Parameter: Treatment Value: 10percent PEG vs. No Treatment
  misc_feature: MA Experiment ID: 20000527 Result: Down-regulated in Transcription
  misc_feature: MA Experiment 20000527 PARAMETER Experiment Name: At_10percent_PEG_P Parameter: Age (day) Value: 20
  misc_feature: MA Experiment 20000527 PARAMETER Experiment Name: At_10percent_PEG_P Parameter: Organism Value: A. thaliana
  misc_feature: MA Experiment 20000527 PARAMETER Experiment Name: At_10percent_PEG_P Parameter: Plant Line Value: WS
  misc_feature: MA Experiment 20000527 PARAMETER Experiment Name: At_10percent_PEG_P Parameter: Timepoint (day) Value: 20
  misc_feature: MA Experiment 20000527 PARAMETER Experiment Name: At_10percent_PEG_P Parameter: Tissue Value: Whole Plant
  misc_feature: MA Experiment 20000527 PARAMETER Experiment Name: At_10percent_PEG_P Parameter: Treatment Value: 10percent PEG vs. No Treatment
  misc_feature: MA Experiment ID: 20000794 Result: Down-regulated in Transcription
  misc_feature: MA Experiment 20000794 PARAMETER Experiment Name: At_Petals_P Parameter: Age (day) Value: 23-25 days
  misc_feature: MA Experiment 20000794 PARAMETER Experiment Name: At_Petals_P Parameter: Plant Line Value: WS
  misc_feature: MA Experiment 20000794 PARAMETER Experiment Name: At_Petals_P Parameter: Tissue Value: Petals vs. Whole plant
  misc_feature: MA Experiment ID: 20001554 Result: Down-regulated in Transcription
  misc_feature: MA Experiment 20001554 PARAMETER Experiment Name: At_Drought_Soil_Dry_P Parameter: Age (day) Value: 21
  misc_feature: MA Experiment 20001554 PARAMETER Experiment Name: At_Drought_Soil_Dry_P Parameter: Organism Value: A. thaliana
  misc_feature: MA Experiment 20001554 PARAMETER Experiment Name: At_Drought_Soil_Dry_P Parameter: Plant Line Value: WS
  misc_feature: MA Experiment 20001554 PARAMETER Experiment Name: At_Drought_Soil_Dry_P Parameter: Post Timepoint (hr) Value: None
  misc_feature: MA Experiment 20001554 PARAMETER Experiment Name: At_Drought_Soil_Dry_P Parameter: Post-Treatment Value: None
  misc_feature: MA Experiment 20001554 PARAMETER Experiment Name: At_Drought_Soil_Dry_P Parameter: Timepoint (day) Value: 7
  misc_feature: MA Experiment 20001554 PARAMETER Experiment Name: At_Drought_Soil_Dry_P Parameter: Treatment Value: Drought vs. No Drought
  misc_feature: MA Experiment ID: 20001555 Result: Down-regulated in Transcription
  misc_feature: MA Experiment 20001555 PARAMETER Experiment Name: At_Drought_Soil_Dry_P Parameter: Age (day) Value: 24
  misc_feature: MA Experiment 20001555 PARAMETER Experiment Name: At_Drought_Soil_Dry_P Parameter: Organism Value: A. thaliana
  misc_feature: MA Experiment 20001555 PARAMETER Experiment Name: At_Drought_Soil_Dry_P Parameter: Plant Line Value: WS
  misc_feature: MA Experiment 20001555 PARAMETER Experiment Name: At_Drought_Soil_Dry_P Parameter: Post Timepoint (hr) Value: None
  misc_feature: MA Experiment 20001555 PARAMETER Experiment Name: At_Drought_Soil_Dry_P Parameter: Post-Treatment Value: None
  misc_feature: MA Experiment 20001555 PARAMETER Experiment Name: At_Drought_Soil_Dry_P Parameter: Timepoint (day) Value: 10
  misc_feature: MA Experiment 20001555 PARAMETER Experiment Name: At_Drought_Soil_Dry_P Parameter: Treatment Value: Drought vs. No Drought
  misc_feature: MA Experiment ID: 20001556 Result: Down-regulated in Transcription
  misc_feature: MA Experiment 20001556 PARAMETER Experiment Name: At_Drought_Soil_Dry_P Parameter: Age (day) Value: 26
  misc_feature: MA Experiment 20001556 PARAMETER Experiment Name: At_Drought_Soil_Dry_P Parameter: Organism Value: A. thaliana
  misc_feature: MA Experiment 20001556 PARAMETER Experiment Name: At_Drought_Soil_Dry_P Parameter: Plant Line Value: WS
  misc_feature: MA Experiment 20001556 PARAMETER Experiment Name: At_Drought_Soil_Dry_P Parameter: Post Timepoint (hr) Value: None
  misc_feature: MA Experiment 20001556 PARAMETER Experiment Name: At_Drought_Soil_Dry_P Parameter: Post-Treatment Value: None
  misc_feature: MA Experiment 20001556 PARAMETER Experiment Name: At_Drought_Soil_Dry_P Parameter: Timepoint (day) Value: 12
  misc_feature: MA Experiment 20001556 PARAMETER Experiment Name: At_Drought_Soil_Dry_P Parameter: Treatment Value: Drought vs. No Drought
  misc_feature: MA Experiment ID: 20001557 Result: Down-regulated in Transcription
  misc_feature: MA Experiment 20001557 PARAMETER Experiment Name: At_Drought_Soil_Dry_P Parameter: Age (day) Value: 27
  misc_feature: MA Experiment 20001557 PARAMETER Experiment Name: At_Drought_Soil_Dry_P Parameter: Organism Value: A. thaliana
  misc_feature: MA Experiment 20001557 PARAMETER Experiment Name: At_Drought_Soil_Dry_P Parameter: Plant Line Value: WS
  misc_feature: MA Experiment 20001557 PARAMETER Experiment Name: At_Drought_Soil_Dry_P Parameter: Post Timepoint (hr) Value: 3
  misc_feature: MA Experiment 20001557 PARAMETER Experiment Name: At_Drought_Soil_Dry_P Parameter: Post-Treatment Value: Re-Water vs. No Drought
  misc_feature: MA Experiment 20001557 PARAMETER Experiment Name: At_Drought_Soil_Dry_P Parameter: Timepoint (day) Value: 13
  misc_feature: MA Experiment 20001557 PARAMETER Experiment Name: At_Drought_Soil_Dry_P Parameter: Treatment Value: Drought vs. No Drought
  misc_feature: MA Experiment ID: 20001558 Result: Down-regulated in Transcription
  misc_feature: MA Experiment 20001558 PARAMETER Experiment Name: At_Drought_Soil_Dry_P Parameter: Age (day) Value: 27
  misc_feature: MA Experiment 20001558 PARAMETER Experiment Name: At_Drought_Soil_Dry_P Parameter: Organism Value: A. thaliana
  misc_feature: MA Experiment 20001558 PARAMETER Experiment Name: At_Drought_Soil_Dry_P Parameter: Plant Line Value: WS
  misc_feature: MA Experiment 20001558 PARAMETER Experiment Name: At_Drought_Soil_Dry_P Parameter: Post Timepoint (hr) Value: 6
  misc_feature: MA Experiment 20001558 PARAMETER Experiment Name: At_Drought_Soil_Dry_P Parameter: Post-Treatment Value: Re-Water vs. No Drought
  misc_feature: MA Experiment 20001558 PARAMETER Experiment Name: At_Drought_Soil_Dry_P Parameter: Timepoint (day) Value: 13
  misc_feature: MA Experiment 20001558 PARAMETER Experiment Name: At_Drought_Soil_Dry_P Parameter: Treatment Value: Drought vs. No Drought
  misc_feature: MA Experiment ID: 20001560 Result: Down-regulated in Transcription
  misc_feature: MA Experiment 20001560 PARAMETER Experiment Name: At_Drought_Soil_Dry_P Parameter: Age (day) Value: 28
  misc_feature: MA Experiment 20001560 PARAMETER Experiment Name: At_Drought_Soil_Dry_P Parameter: Organism Value: A. thaliana
  misc_feature: MA Experiment 20001560 PARAMETER Experiment Name: At_Drought_Soil_Dry_P Parameter: Plant Line Value: WS
  misc_feature: MA Experiment 20001560 PARAMETER Experiment Name: At_Drought_Soil_Dry_P Parameter: Post Timepoint (hr) Value: None
  misc_feature: MA Experiment 20001560 PARAMETER Experiment Name: At_Drought_Soil_Dry_P Parameter: Post-Treatment Value: None
  misc_feature: MA Experiment 20001560 PARAMETER Experiment Name: At_Drought_Soil_Dry_P Parameter: Timepoint (day) Value: 14
  misc_feature: MA Experiment 20001560 PARAMETER Experiment Name: At_Drought_Soil_Dry_P Parameter: Treatment Value: Drought vs. No Drought
  misc_feature: MA Experiment ID: 20001904 Result: Down-regulated in Transcription
  misc_feature: MA Experiment 20001904 PARAMETER Experiment Name: At_Drought_Reproduction_P Parameter: Age (day) Value: 37
  misc_feature: MA Experiment 20001904 PARAMETER Experiment Name: At_Drought_Reproduction_P Parameter: Organism Value: A. thaliana
  misc_feature: MA Experiment 20001904 PARAMETER Experiment Name: At_Drought_Reproduction_P Parameter: Plant Line Value: WS
  misc_feature: MA Experiment 20001904 PARAMETER Experiment Name: At_Drought_Reproduction_P Parameter: Timepoint (day) Value: 7
  misc_feature: MA Experiment 20001904 PARAMETER Experiment Name: At_Drought_Reproduction_P Parameter: Tissue Value: Rosettes
  misc_feature: MA Experiment 20001904 PARAMETER Experiment Name: At_Drought_Reproduction_P Parameter: Treatment Value: Drought vs. No Drought
atggagtctctcttctccacgatgattgtcctgctcttggtttctttttcctgtctcatttctacagaagctctcaccagcaactatggaaacatcacagtcaaatgggatctcttgaactggacgcctgatggctacgttgcagtggttacagcctacaattaccagaagcaacgttcgattccaggatggaaaatgagctggagagggaccaagaaagaagtgatctggaacatgttgggtgcaaaaacgacagggcaaggaggttgttccatgttcaaaggaaatatcccgcagtcctgcgttcgtaagccaacagttgtcgatttgcttcccggaactcctttcaatcagcagatcgctaattgctgcaaaagcggtgtcttaaaacctggttcagaaagtgcattccagttatctgttggtagcgctggtaactcggttaagactgctcggatgccggcaaacttcatgttcacggcacctaaacaacagtacatatgtggaccgagtaagaacgttagaccaacgaggtttacaaccgccgacaaaaggagaataactgcagccctaatgacctggaacattacttgcgtcttccacaaagcaacatga

SEQ ID NO: 95975 - protein, 204 aa, Arabidopsis thaliana
  peptide (1)..(204): Ceres Seq. ID no. 12731435
  misc_feature (46)..(202): Pfam Name: Phytochelatin synthetase-like conserved region Pfam Description: Phytochelatin synthetase-like conserved region
  misc_feature (1)..(204): Homolog of NCBI NO: 15239487 NR Description: putative phytochelatin synthetase - like; protein At5g60950.1 [Arabidopsis thaliana] >gi|10177318|dbj|BAB10644.1| similarity to phytochelatin synthetase~gene_id:MSL3.7
  misc_feature (5)..(200): Homolog of NCBI NO: 21553837 NR Description: phytochelatin synthetase-like protein
  misc_feature (5)..(200): Homolog of NCBI NO: 18424412 NR Description: phytochelatin synthetase - like protein; protein At5g60920.1, supported by cDNA: 17250., supported by cDNA: [Arabidopsis thaliana] >gi|14193657|gb|AAK56072.1|AF319663_1
  misc_feature (10)..(200): Homolog of NCBI NO: 15232863 NR Description: unknown protein; protein id: At3g02210.1 thaliana] >gi|6041808|gb|AAF02128.1|AC009755_21 unknown protein
  misc_feature (1)..(200): Homolog of NCBI NO: 13477083 NR Description: phytochelatin synthetase-like protein
  misc_feature (8)..(200): Homolog of NCBI NO: 30090032 NR Description: phytochelatin synthetase [Triticum monococcum]
  misc_feature (1)..(200): Homolog of NCBI NO: 10092257 NR Description: unknown protein; 31818-33764 [Arabidopsis
  misc_feature (1)..(200): Homolog of NCBI NO: 18406342 NR Description: phytochelatin synthetase-like protein; protein
  misc_feature (1)..(200): Homolog of NCBI NO: 21618129 NR Description: phytochelatin synthetase-like protein
  misc_feature (9)..(200): Homolog of NCBI NO: 34394569 NR Description: putative phytochelatin synthetase [Oryza sativa
MESLFSTMIVLLLVSFSCLISTEALTSNYGNITVKWDLLNWTPDGYVAVVTAYNYQKQRSIPGWKMSWRGTKKEVIWNMLGAKTTGQGGCSMFKGNIPQSCVRKPTVVDLLPGTPFNQQIANCCKSGVLKPGSESAFQLSVGSAGNSVKTARMPANFMFTAPKQQYICGPSKNVRPTRFTTADKRRITAALMTWNITCVFHKAT

SEQ ID NO: 95976 - protein, 197 aa, Arabidopsis thaliana
  peptide (1)..(197): Ceres Seq. ID no. 12731436
  misc_feature (39)..(195): Pfam Name: Phytochelatin synthetase-like conserved region Pfam Description: Phytochelatin synthetase-like conserved region
  misc_feature (1)..(197): Homolog of NCBI NO: 15239487 NR Description: putative phytochelatin synthetase - like; protein At5g60950.1 [Arabidopsis thaliana] >gi|10177318|dbj|BAB10644.1| similarity to phytochelatin synthetase~gene_id:MSL3.7
  misc_feature (1)..(193): Homolog of NCBI NO: 21553837 NR Description: phytochelatin synthetase-like protein
  misc_feature (1)..(193): Homolog of NCBI NO: 18424412 NR Description: phytochelatin synthetase - like protein; protein At5g60920.1, supported by cDNA: 17250., supported by cDNA: [Arabidopsis thaliana] >gi|14193657|gb|AAK56072.1|AF319663_1
  misc_feature (3)..(193): Homolog of NCBI NO: 15232863 NR Description: unknown protein; protein id: At3g02210.1 thaliana] >gi|6041808|gb|AAF02128.1|AC009755_21 unknown protein
  misc_feature (1)..(193): Homolog of NCBI NO: 13477083 NR Description: phytochelatin synthetase-like protein
  misc_feature (1)..(193): Homolog of NCBI NO: 30090032 NR Description: phytochelatin synthetase [Triticum monococcum]
  misc_feature (1)..(193): Homolog of NCBI NO: 10092257 NR Description: unknown protein; 31818-33764 [Arabidopsis
  misc_feature (1)..(193): Homolog of NCBI NO: 21618129 NR Description: phytochelatin synthetase-like protein
  misc_feature (1)..(193): Homolog of NCBI NO: 18406342 NR Description: phytochelatin synthetase-like protein; protein
  misc_feature (2)..(193): Homolog of NCBI NO: 34394569 NR Description: putative phytochelatin synthetase [Oryza sativa
MIVLLLVSFSCLISTEALTSNYGNITVKWDLLNWTPDGYVAVVTAYNYQKQRSIPGWKMSWRGTKKEVIWNMLGAKTTGQGGCSMFKGNIPQSCVRKPTVVDLLPGTPFNQQIANCCKSGVLKPGSESAFQLSVGSAGNSVKTARMPANFMFTAPKQQYICGPSKNVRPTRFTTADKRRITAALMTWNITCVFHKAT

SEQ ID NO: 95977 - protein, 139 aa, Arabidopsis thaliana
  peptide (1)..(139): Ceres Seq. ID no. 12731437
  misc_feature (1)..(137): Pfam Name: Phytochelatin synthetase-like conserved region Pfam Description: Phytochelatin synthetase-like conserved region
  misc_feature (1)..(139): Homolog of NCBI NO: 15239487 NR Description: putative phytochelatin synthetase - like; protein At5g60950.1 [Arabidopsis thaliana] >gi|10177318|dbj|BAB10644.1| similarity to phytochelatin synthetase~gene_id:MSL3.7
  misc_feature (1)..(135): Homolog of NCBI NO: 21553837 NR Description: phytochelatin synthetase-like protein
  misc_feature (1)..(135): Homolog of NCBI NO: 18424412 NR Description: phytochelatin synthetase - like protein; protein At5g60920.1, supported by cDNA: 17250., supported by cDNA: [Arabidopsis thaliana] >gi|14193657|gb|AAK56072.1|AF319663_1
  misc_feature (1)..(135): Homolog of NCBI NO: 15232863 NR Description: unknown protein; protein id: At3g02210.1 thaliana] >gi|6041808|gb|AAF02128.1|AC009755_21 unknown protein
  misc_feature (1)..(135): Homolog of NCBI NO: 13477083 NR Description: phytochelatin synthetase-like protein
  misc_feature (1)..(135): Homolog of NCBI NO: 30090032 NR Description: phytochelatin synthetase [Triticum monococcum]
  misc_feature (1)..(135): Homolog of NCBI NO: 10092257 NR Description: unknown protein; 31818-33764 [Arabidopsis
  misc_feature (1)..(135): Homolog of NCBI NO: 18406342 NR Description: phytochelatin synthetase-like protein; protein
  misc_feature (1)..(135): Homolog of NCBI NO: 21618129 NR Description: phytochelatin synthetase-like protein
  misc_feature (1)..(135): Homolog of NCBI NO: 34394569 NR Description: putative phytochelatin synthetase [Oryza sativa
MSWRGTKKEVIWNMLGAKTTGQGGCSMFKGNIPQSCVRKPTVVDLLPGTPFNQQIANCCKSGVLKPGSESAFQLSVGSAGNSVKTARMPANFMFTAPKQQYICGPSKNVRPTRFTTADKRRITAALMTWNITCVFHKAT

SEQ ID NO: 95978 - DNA, 1083 bp, Arabidopsis thaliana
  misc_feature (1)..(1083): Ceres Seq. ID no. 12731438
  misc_feature: MA Experiment ID: 20000438 Result: Up-regulated in Transcription
  misc_feature: MA Experiment 20000438 PARAMETER Experiment Name: At_Shoots__P Parameter: Age (day) Value: 14
  misc_feature: MA Experiment 20000438 PARAMETER Experiment Name: At_Shoots__P Parameter: Tissue Value: Shoots vs. Whole Plant
atgagatcaggagaatgtgatgaagaggagattcaagcaaagcaagaaagagatcaaaatcaaaatcatcaagtaaacttaaaccacatgttgcaacaacaacagccgagttcggtatcatcttcaaggcaatggacttcagcttttaggaatccaagaatcgttcgagtctcaagaacattcggtggcaaagacagacacagcaaagtatgtacagtccgtggtcttcgagaccggaggataaggttgtccgtacctacagctattcaactctacgaccttcaagatcgattagggctgagtcagccaagcaaagtcattgattggttactcgaagcagcaaaagatgacgtagacaagctacctcctctacaattcccacatggatttaaccagatgtatccaaatctcatcttcggaaactccgggtttggagaatctccatcttcaactacatcaacaacgtttccaggaaccaatctcgggttcttggaaaattgggatcttggtggttcttcaagaacaagagcaagattaaccgatacaactacgacccaaagagaaagttttgatcttgataaaggaaaatggatcaaaaacgacgagaatagtaatcaagatcatcaagggtttaacaccaatcatcaacaacaatttcctctgaccaatccgtacaacaacacttcagcttattacaaccttggacatcttcaacaatcgttagaccaatctggtaataacgttactgtcgcaatatctaatgttgctgctaataataacaataatctcaatttgcatcctccttcctcgtctgccggagatggatctcagctttttttcggtcctactcctccggcaatgagctctctattcccgacatacccttcgtttcttggagcttctcatcatcatcatgtcgtcgatggagccggtcatcttcagctctttagctcgaattcaaataccgcatcgcagcaacacatgatgccgggtaatacgagtttgattagaccatttcatcatttgatgagctcgaatcatgatacggatcatcatagtagcgataatgaatcagattcttga

SEQ ID NO: 95979 - protein, 360 aa, Arabidopsis thaliana
  peptide (1)..(360): Ceres Seq. ID no. 12731439
  misc_feature (47)..(257): Pfam Name: TCP family transcription factor Pfam Description: TCP family transcription factor
  misc_feature (1)..(360): Homolog of NCBI NO: 15239489 NR Description: DNA binding protein - like; protein id: [Arabidopsis thaliana] >gi|10177320|dbj|BAB10646.1|
  misc_feature (32)..(233): Homolog of NCBI NO: 15241512 NR Description: putative helix-loop-helix DNA binding protein;
  misc_feature (4)..(181): Homolog of NCBI NO: 18396089 NR Description: expressed protein; protein id: At3g02150.1, by cDNA: 15552. [Arabidopsis thaliana]
  misc_feature (4)..(181): Homolog of NCBI NO: 30678498 NR Description: TCP family transcription factor TFPD [Arabidopsis >gi|6041802|gb|AAF02122.1|AC009755_15 unknown protein thaliana] >gi|6513919|gb|AAF14823.1|AC011664_5 unknown protein
  misc_feature (31)..(127): Homolog of NCBI NO: 34909780 NR Description: P0512C01.32 [Oryza sativa (japonica
  misc_feature (21)..(324): Homolog of NCBI NO: 18397402 NR Description: expressed protein; protein id: At1g30210.1, by cDNA: gi_14334669, supported by cDNA: gi_16323136 [Arabidopsis
  misc_feature (53)..(240): Homolog of NCBI NO: 25369264 NR Description: probable basic helix-loop-helix DNA binding
  misc_feature (53)..(240): Homolog of NCBI NO: 7486304 NR Description: hypothetical protein F28J12.50 - Arabidopsis
  misc_feature (53)..(240): Homolog of NCBI NO: 18415079 NR Description: teosinte branched1 - like protein; protein id: supported by cDNA: gi_14194128, supported by cDNA: gi_14194170 thaliana] >gi|14194129|gb|AAK56259.1|AF367270_1
  misc_feature (4)..(124): Homolog of NCBI NO: 33146716 NR Description: putative transcription factor PCF6 [Oryza sativa
MRSGECDEEEIQAKQERDQNQNHQVNLNHMLQQQQPSSVSSSRQWTSAFRNPRIVRVSRTFGGKDRHSKVCTVRGLRDRRIRLSVPTAIQLYDLQDRLGLSQPSKVIDWLLEAAKDDVDKLPPLQFPHGFNQMYPNLIFGNSGFGESPSSTTSTTFPGTNLGFLENWDLGGSSRTRARLTDTTTTQRESFDLDKGKWIKNDENSNQDHQGFNTNHQQQFPLTNPYNNTSAYYNLGHLQQSLDQSGNNVTVAISNVAANNNNNLNLHPPSSSAGDGSQLFFGPTPPAMSSLFPTYPSFLGASHHHHVVDGAGHLQLFSSNSNTASQQHMMPGNTSLIRPFHHLMSSNHDTDHHSSDNESDS

SEQ ID NO: 95980 - protein, 331 aa, Arabidopsis thaliana
  peptide (1)..(331): Ceres Seq. ID no. 12731440
  misc_feature (18)..(228): Pfam Name: TCP family transcription factor Pfam Description: TCP family transcription factor
  misc_feature (1)..(331): Homolog of NCBI NO: 15239489 NR Description: DNA binding protein - like; protein id: [Arabidopsis thaliana] >gi|10177320|dbj|BAB10646.1|
  misc_feature (3)..(204): Homolog of NCBI NO: 15241512 NR Description: putative helix-loop-helix DNA binding protein;
  misc_feature (1)..(152): Homolog of NCBI NO: 18396089 NR Description: expressed protein; protein id: At3g02150.1, by cDNA: 15552. [Arabidopsis thaliana]
  misc_feature (1)..(152): Homolog of NCBI NO: 30678498 NR Description: TCP family transcription factor TFPD [Arabidopsis >gi|6041802|gb|AAF02122.1|AC009755_15 unknown protein thaliana] >gi|6513919|gb|AAF14823.1|AC011664_5 unknown protein
  misc_feature (2)..(98): Homolog of NCBI NO: 34909780 NR Description: P0512C01.32 [Oryza sativa (japonica
  misc_feature (1)..(295): Homolog of NCBI NO: 18397402 NR Description: expressed protein; protein id: At1g30210.1, by cDNA: gi_14334669, supported by cDNA: gi_16323136 [Arabidopsis
  misc_feature (24)..(211): Homolog of NCBI NO: 25369264 NR Description: probable basic helix-loop-helix DNA binding
  misc_feature (24)..(211): Homolog of NCBI NO: 7486304 NR Description: hypothetical protein F28J12.50 - Arabidopsis
  misc_feature (24)..(211): Homolog of NCBI NO: 18415079 NR Description: teosinte branched1 - like protein; protein id: supported by cDNA: gi_14194128, supported by cDNA: gi_14194170 thaliana] >gi|14194129|gb|AAK56259.1|AF367270_1
  misc_feature (1)..(95): Homolog of NCBI NO: 33146716 NR Description: putative transcription factor PCF6 [Oryza sativa
MLQQQQPSSVSSSRQWTSAFRNPRIVRVSRTFGGKDRHSKVCTVRGLRDRRIRLSVPTAIQLYDLQDRLGLSQPSKVIDWLLEAAKDDVDKLPPLQFPHGFNQMYPNLIFGNSGFGESPSSTTSTTFPGTNLGFLENWDLGGSSRTRARLTDTTTTQRESFDLDKGKWIKNDENSNQDHQGFNTNHQQQFPLTNPYNNTSAYYNLGHLQQSLDQSGNNVTVAISNVAANNNNNLNLHPPSSSAGDGSQLFFGPTPPAMSSLFPTYPSFLGASHHHHVVDGAGHLQLFSSNSNTASQQHMMPGNTSLIRPFHHLMSSNHDTDHHSSDNESDS

SEQ ID NO: 95981 - protein, 228 aa, Arabidopsis thaliana
  peptide (1)..(228): Ceres Seq. ID no. 12731441
  misc_feature (1)..(125): Pfam Name: TCP family transcription factor Pfam Description: TCP family transcription factor
  misc_feature (1)..(228): Homolog of NCBI NO: 15239489 NR Description: DNA binding protein - like; protein id: [Arabidopsis thaliana] >gi|10177320|dbj|BAB10646.1|
  misc_feature (1)..(101): Homolog of NCBI NO: 15241512 NR Description: putative helix-loop-helix DNA binding protein;
  misc_feature (1)..(49): Homolog of NCBI NO: 18396089 NR Description: expressed protein; protein id: At3g02150.1, by cDNA: 15552. [Arabidopsis thaliana]
  misc_feature (1)..(49): Homolog of NCBI NO: 30678498 NR Description: TCP family transcription factor TFPD [Arabidopsis >gi|6041802|gb|AAF02122.1|AC009755_15 unknown protein thaliana] >gi|6513919|gb|AAF14823.1|AC011664_5 unknown protein
  misc_feature (1)..(192): Homolog of NCBI NO: 18397402 NR Description: expressed protein; protein id: At1g30210.1, by cDNA: gi_14334669, supported by cDNA: gi_16323136 [Arabidopsis
  misc_feature (1)..(108): Homolog of NCBI NO: 25369264 NR Description: probable basic helix-loop-helix DNA binding
  misc_feature (1)..(108): Homolog of NCBI NO: 7486304 NR Description: hypothetical protein F28J12.50 - Arabidopsis
  misc_feature (1)..(108): Homolog of NCBI NO: 18415079 NR Description: teosinte branched1 - like protein; protein id: supported by cDNA: gi_14194128, supported by cDNA: gi_14194170 thaliana] >gi|14194129|gb|AAK56259.1|AF367270_1
  misc_feature (1)..(25): Homolog of NCBI NO: 20975253 NR Description: transcription factor PCF5 [Oryza sativa (japonica
  misc_feature (30)..(151): Homolog of NCBI NO: 15241512 NR Description: putative helix-loop-helix DNA binding protein;
MYPNLIFGNSGFGESPSSTTSTTFPGTNLGFLENWDLGGSSRTRARLTDTTTTQRESFDLDKGKWIKNDENSNQDHQGFNTNHQQQFPLTNPYNNTSAYYNLGHLQQSLDQSGNNVTVAISNVAANNNNNLNLHPPSSSAGDGSQLFFGPTPPAMSSLFPTYPSFLGASHHHHVVDGAGHLQLFSSNSNTASQQHMMPGNTSLIRPFHHLMSSNHDTDHHSSDNESDS

SEQ ID NO: 95982 - DNA, 2792 bp, Arabidopsis thaliana
  misc_feature (1)..(2792): Ceres Seq. ID no. 12731446
  misc_feature: MA Experiment ID: 20000171 Result: Down-regulated in Transcription
  misc_feature: MA Experiment 20000171 PARAMETER Experiment Name: At_42deg_Heat_P Parameter: Age (day) Value: 14
  misc_feature: MA Experiment 20000171 PARAMETER Experiment Name: At_42deg_Heat_P Parameter: Organism Value: A. thaliana
  misc_feature: MA Experiment 20000171 PARAMETER Experiment Name: At_42deg_Heat_P Parameter: Plant Line Value: WS
  misc_feature: MA Experiment 20000171 PARAMETER Experiment Name: At_42deg_Heat_P Parameter: Temperature (deg C) Value: 42 vs. 22
  misc_feature: MA Experiment 20000171 PARAMETER Experiment Name: At_42deg_Heat_P Parameter: Timepoint (hr) Value: 1
  misc_feature: MA Experiment 20000171 PARAMETER Experiment Name: At_42deg_Heat_P Parameter: Tissue Value: Aerial
  misc_feature: MA Experiment ID: 20000173 Result: Down-regulated in Transcription
  misc_feature: MA Experiment 20000173 PARAMETER Experiment Name: At_42deg_Heat_P Parameter: Age (day) Value: 14
  misc_feature: MA Experiment 20000173 PARAMETER Experiment Name: At_42deg_Heat_P Parameter: Organism Value: A. thaliana
  misc_feature: MA Experiment 20000173 PARAMETER Experiment Name: At_42deg_Heat_P Parameter: Plant Line Value: WS
  misc_feature: MA Experiment 20000173 PARAMETER Experiment Name: At_42deg_Heat_P Parameter: Temperature (deg C) Value: 42 vs. 22
  misc_feature: MA Experiment 20000173 PARAMETER Experiment Name: At_42deg_Heat_P Parameter: Timepoint (hr) Value: 6
  misc_feature: MA Experiment 20000173 PARAMETER Experiment Name: At_42deg_Heat_P Parameter: Tissue Value: Aerial
  misc_feature: MA Experiment ID: 20000182 Result: Up-regulated in Transcription
  misc_feature: MA Experiment 20000182 PARAMETER Experiment Name: At_2mM_SA_P Parameter: Age (day) Value: 14
  misc_feature: MA Experiment 20000182 PARAMETER Experiment Name: At_2mM_SA_P Parameter: Organism Value: A. thaliana
  misc_feature: MA Experiment 20000182 PARAMETER Experiment Name: At_2mM_SA_P Parameter: Plant Line Value: WS
  misc_feature: MA Experiment 20000182 PARAMETER Experiment Name: At_2mM_SA_P Parameter: Timepoint (hr) Value: 6
  misc_feature: MA Experiment 20000182 PARAMETER Experiment Name: At_2mM_SA_P Parameter: Tissue Value: Aerial
  misc_feature: MA Experiment 20000182 PARAMETER Experiment Name: At_2mM_SA_P Parameter: Treatment Value: 2mM SA vs. No Treatment
  misc_feature: MA Experiment ID: 20000184 Result: Down-regulated in Transcription
  misc_feature: MA Experiment 20000184 PARAMETER Experiment Name: At_Shoots__P Parameter: Age (day) Value: 7
  misc_feature: MA Experiment 20000184 PARAMETER Experiment Name: At_Shoots__P Parameter: Tissue Value: Shoots vs. Whole Plant
  misc_feature: MA Experiment ID: 20000527 Result: Down-regulated in Transcription
  misc_feature: MA Experiment 20000527 PARAMETER Experiment Name: At_10percent_PEG_P Parameter: Age (day) Value: 20
  misc_feature: MA Experiment 20000527 PARAMETER Experiment Name: At_10percent_PEG_P Parameter: Organism Value: A. thaliana
  misc_feature: MA Experiment 20000527 PARAMETER Experiment Name: At_10percent_PEG_P Parameter: Plant Line Value: WS
  misc_feature: MA Experiment 20000527 PARAMETER Experiment Name: At_10percent_PEG_P Parameter: Timepoint (day) Value: 20
  misc_feature: MA Experiment 20000527 PARAMETER Experiment Name: At_10percent_PEG_P Parameter: Tissue Value: Whole Plant
  misc_feature: MA Experiment 20000527 PARAMETER Experiment Name: At_10percent_PEG_P Parameter: Treatment Value: 10percent PEG vs. No Treatment
  misc_feature: MA Experiment ID: 20001248 Result: Down-regulated in Transcription
  misc_feature: MA Experiment 20001248 PARAMETER Experiment Name: At_Far-red-induction_P Parameter: Age (day) Value: 7
  misc_feature: MA Experiment 20001248 PARAMETER Experiment Name: At_Far-red-induction_P Parameter: Light Value: Far-red vs. White
  misc_feature: MA Experiment 20001248 PARAMETER Experiment Name: At_Far-red-induction_P Parameter: Organism Value: A. thaliana
  misc_feature: MA Experiment 20001248 PARAMETER Experiment Name: At_Far-red-induction_P Parameter: Plant Line Value: Columbia
  misc_feature: MA Experiment 20001248 PARAMETER Experiment Name: At_Far-red-induction_P Parameter: Timepoint (hr) Value: 4
  misc_feature: MA Experiment 20001248 PARAMETER Experiment Name: At_Far-red-induction_P Parameter: Tissue Value: Whole Plant
  misc_feature: MA Experiment ID: 20001560 Result: Down-regulated in Transcription
  misc_feature: MA Experiment 20001560 PARAMETER Experiment Name: At_Drought_Soil_Dry_P Parameter: Age (day) Value: 28
  misc_feature: MA Experiment 20001560 PARAMETER Experiment Name: At_Drought_Soil_Dry_P Parameter: Organism Value: A. thaliana
  misc_feature: MA Experiment 20001560 PARAMETER Experiment Name: At_Drought_Soil_Dry_P Parameter: Plant Line Value: WS
  misc_feature: MA Experiment 20001560 PARAMETER Experiment Name: At_Drought_Soil_Dry_P Parameter: Post Timepoint (hr) Value: None
  misc_feature: MA Experiment 20001560 PARAMETER Experiment Name: At_Drought_Soil_Dry_P Parameter: Post-Treatment Value: None
  misc_feature: MA Experiment 20001560 PARAMETER Experiment Name: At_Drought_Soil_Dry_P Parameter: Timepoint (day) Value: 14
  misc_feature: MA Experiment 20001560 PARAMETER Experiment Name: At_Drought_Soil_Dry_P Parameter: Treatment Value: Drought vs. No Drought
tctttcccttcttcttccccaataatctcgctgaaactctcttgctcttgcttctaaaaatctgttctttgagactttgatcacacagttatcaaaatcataatctcttctttcctggtttttttttttttcttcttcttcttcccgtttcacggtacgtttactctgttcgatcaccgagtgtatgataaaatgtttctgtgaaatcaaataacatatcactttctaataaacatcaaaatttctccttttttacagaaacaagaagtttttttgggaaagccgttgacttgactttttctttggggtgttgtgtgggagcttatagtatggtaccataagtgggagcttatagtttggggtgttgtgtgggagcttatagtatgaggaaaaatgttagatttgaagaatgcttcactgattttttaccataagtatgtcaactggattaagcttaagtagtaatggtttttactatgttcatgtggggatttctcttcctctctgtttacttcattccgagatgacttgagattttttcaaagtatagttcttggagttaagcttacctagtaatcactttatataacatcccttcgtttacatttgtgctttcacctggaaacactttagacttttctctcttctgccgtgtgtatttagttgtctagtcaaatttaagttgagtttaggctctagtctttggttttggttatggcagagtttgattccaaggttcctgtttccggaatgaacaatcatgtctttgaggcatgtcaccatgttgttaaggcactgagggcatctgataacaacctggatgccaatttgagaaagctcctaagtgacctagagatgcatttgtcaacatttgggattgctgataccaaagttgaagatgcaggattctctgagatcaagaagagattcaaagaagctgtgaagagaatccgcagttgggagacaaaccagtcgacgatgtttgaagctggtctgtctgaagctgatcagttctttcaagccctgtatgacgttcaaacagttcttgtgggtttcaaagctttgcccatgaaaactaaccagatggagaaagatgtttacaaccaagctacggttgctcttgacatcgcgatgttgaggcttgagaaagagctctgtgatgttctgcatcagcacaaacggcatgtacagcctgattacttggctgttagttcccgtagaaaagatattgtgtacgacgagtcctttgtctccctagatgatgaagttattgtcgaagcttcttcacatgaagatgatgaacagatatcggacttttataattctgatttggttgatcccatcgtacttcctcacatcaaagctattgcaaacgccatgtttgcttgcgagtatgatcaaccattctgtgaagctttcatcggcgttcaaagagaagctctggaggagtatatggttactctcgaaatggaaagattcagctgcgttgatgttctcagaatggactgggaggatttgaatggtgcaatgagaaaatggacaaaggttgttaagatcattactcaggtctatctcgccagtgaaaaacagctatgtgatcagattttgggagactttgagtcaatttctacagcttgcttcattgaaatctcaaaagatgcaattctatcactcctcaactttggagaagctgtggtgctgagatcttgcaagccagaaatgcttgagcgcttccttagtatgtatgaggtttcagcagagattctcgtggatgtcgataacctcttccccgatgaaacaggctcgtctttaagaattgcatttcacaacctgtcaaaaaaactagctgatcatacaaccacaaccttcttaaagttcaaagacgcaatagcctcagatgaatccacacgcccctttcatggaggcgggattcatcacctgaccaggtatgtaatgaactacttgaagcttctcccggagtataccgactcactaaactcactgcttcagaacatacacgttgacgactccatccccgagaaaacaggagaagatgtcctcccttcgacattctctccaatggctagacacctcaggtcaatcgtcacaactctagaatccagccttgagcgaaaagctcagctgtacgcagacgaagcactgaaatccattttcctgatgaacaacttccgttacatggtccagaaggtaaagggatcagagctgagacgcttgtttggagacgaatggatcaggaagcacattgcaagctaccaatgcaatgtcactaactacgagagatccacatggagctccatactcgctttgctcagagacaacaacgactctgtaagaaccctgagagaaagatgcagacttttcagccttgcatttgatgatgtttacaagaaccaaacccgttggtcagtccctgattcagagctccgcgatgatcttcacatctcgacctctgtcaaggttgttcagtcttacagaggatttcttggaagaaatgcagttcgcataggcgaaaaacacatccgatacacttgtgaagacattgagaatatgctccttgatctctttgaatgtttgccatctccaagatcactgcgcagctctcgtaagagatgatgatgatgatgacttgagcctaatggactccatctttgttcttttgatcttttgttatttactcacttatgcaatgttttgtgattgcttacatgcaaataaagttgtagaatttttatactccattgtggggatgtaatagtaattggctatcttgt

SEQ ID NO: 95983 - protein, 639 aa, Arabidopsis thaliana
  peptide (1)..(639): Ceres Seq. ID no. 12731447
  misc_feature (60)..(625): Pfam Name: Exo70 exocyst complex subunit Pfam Description: Exo70 exocyst complex subunit
  misc_feature (61)..(625): Homolog of NCBI NO: 34909792 NR Description: P0403C05.2 [Oryza sativa (japonica
  misc_feature (1)..(542): Homolog of NCBI NO: 15228701 NR Description: hypothetical protein; protein id: At3g29400.1 thaliana] >gi|11994523|dbj|BAB02587.1|
  misc_feature (14)..(599): Homolog of NCBI NO: 38346639 NR Description: OSJNBa0072D21.9 [Oryza sativa (japonica
  misc_feature (87)..(625): Homolog of NCBI NO: 9758920 NR Description: gb|AAD25781.1~gene_id:MXI22.10~strong similarity
  misc_feature (87)..(625): Homolog of NCBI NO: 30695880 NR Description: exocyst subunit EXO70 family [Arabidopsis
  misc_feature (12)..(625): Homolog of NCBI NO: 19386798 NR Description: putative leucine zipper protein [Oryza sativa
  misc_feature (41)..(625): Homolog of NCBI NO: 100226 NR Description: tomato leucine zipper-containing protein - tomato protein of unknown function [Lycopersicon esculentum]
  misc_feature (131)..(599): Homolog of NCBI NO: 30682979 NR Description: exocyst subunit EXO70 family [Arabidopsis >gi|9294634|dbj|BAB02973.1| gb|AAD25781.1~gene_id:MAG2.5~strong
  misc_feature (199)..(599): Homolog of NCBI NO: 23270388 NR Description: unknown protein [Arabidopsis thaliana]
  misc_feature (96)..(625): Homolog of NCBI NO: 22326587 NR Description: putative protein; protein id: At5g03540.1, by cDNA: gi_18176063 [Arabidopsis thaliana]
MAEFDSKVPVSGMNNHVFEACHHVVKALRASDNNLDANLRKLLSDLEMHLSTFGIADTKVEDAGFSEIKKRFKEAVKRIRSWETNQSTMFEAGLSEADQFFQALYDVQTVLVGFKALPMKTNQMEKDVYNQATVALDIAMLRLEKELCDVLHQHKRHVQPDYLAVSSRRKDIVYDESFVSLDDEVIVEASSHEDDEQISDFYNSDLVDPIVLPHIKAIANAMFACEYDQPFCEAFIGVQREALEEYMVTLEMERFSCVDVLRMDWEDLNGAMRKWTKVVKIITQVYLASEKQLCDQILGDFESISTACFIEISKDAILSLLNFGEAVVLRSCKPEMLERFLSMYEVSAEILVDVDNLFPDETGSSLRIAFHNLSKKLADHTTTTFLKFKDAIASDESTRPFHGGGIHHLTRYVMNYLKLLPEYTDSLNSLLQNIHVDDSIPEKTGEDVLPSTFSPMARHLRSIVTTLESSLERKAQLYADEALKSIFLMNNFRYMVQKVKGSELRRLFGDEWIRKHIASYQCNVTNYERSTWSSILALLRDNNDSVRTLRERCRLFSLAFDDVYKNQTRWSVPDSELRDDLHISTSVKVVQSYRGFLGRNAVRIGEKHIRYTCEDIENMLLDLFECLPSPRSLRSSRKR

SEQ ID NO: 95984 - protein, 627 aa, Arabidopsis thaliana
  peptide (1)..(627): Ceres Seq. ID no. 12731448
  misc_feature (48)..(613): Pfam Name: Exo70 exocyst complex subunit Pfam Description: Exo70 exocyst complex subunit
  misc_feature (49)..(613): Homolog of NCBI NO: 34909792 NR Description: P0403C05.2 [Oryza sativa (japonica
  misc_feature (1)..(530): Homolog of NCBI NO: 15228701 NR Description: hypothetical protein; protein id: At3g29400.1 thaliana] >gi|11994523|dbj|BAB02587.1|
  misc_feature (2)..(587): Homolog of NCBI NO: 38346639 NR Description: OSJNBa0072D21.9 [Oryza sativa (japonica
  misc_feature (75)..(613): Homolog of NCBI NO: 9758920 NR Description: gb|AAD25781.1~gene_id:MXI22.10~strong similarity
  misc_feature (75)..(613): Homolog of NCBI NO: 30695880 NR Description: exocyst subunit EXO70 family [Arabidopsis
  misc_feature (1)..(613): Homolog of NCBI NO: 19386798 NR Description: putative leucine zipper protein [Oryza sativa
  misc_feature (29)..(613): Homolog of NCBI NO: 100226 NR Description: tomato leucine zipper-containing protein - tomato protein of unknown function [Lycopersicon esculentum]
  misc_feature (119)..(587): Homolog of NCBI NO: 30682979 NR Description: exocyst subunit EXO70 family [Arabidopsis >gi|9294634|dbj|BAB02973.1| gb|AAD25781.1~gene_id:MAG2.5~strong
  misc_feature (187)..(587): Homolog of NCBI NO: 23270388 NR Description: unknown protein [Arabidopsis thaliana]
  misc_feature (84)..(613): Homolog of NCBI NO: 22326587 NR Description: putative protein; protein id: At5g03540.1, by cDNA: gi_18176063 [Arabidopsis thaliana]
MNNHVFEACHHVVKALRASDNNLDANLRKLLSDLEMHLSTFGIADTKVEDAGFSEIKKRFKEAVKRIRSWETNQSTMFEAGLSEADQFFQALYDVQTVLVGFKALPMKTNQMEKDVYNQATVALDIAMLRLEKELCDVLHQHKRHVQPDYLAVSSRRKDIVYDESFVSLDDEVIVEASSHEDDEQISDFYNSDLVDPIVLPHIKAIANAMFACEYDQPFCEAFIGVQREALEEYMVTLEMERFSCVDVLRMDWEDLNGAMRKWTKVVKIITQVYLASEKQLCDQILGDFESISTACFIEISKDAILSLLNFGEAVVLRSCKPEMLERFLSMYEVSAEILVDVDNLFPDETGSSLRIAFHNLSKKLADHTTTTFLKFKDAIASDESTRPFHGGGIHHLTRYVMNYLKLLPEYTDSLNSLLQNIHVDDSIPEKTGEDVLPSTFSPMARHLRSIVTTLESSLERKAQLYADEALKSIFLMNNFRYMVQKVKGSELRRLFGDEWIRKHIASYQCNVTNYERSTWSSILALLRDNNDSVRTLRERCRLFSLAFDDVYKNQTRWSVPDSELRDDLHISTSVKVVQSYRGFLGRNAVRIGEKHIRYTCEDIENMLLDLFECLPSPRSLRSSRKR

SEQ ID NO: 95985 - protein, 592 aa, Arabidopsis thaliana
  peptide (1)..(592): Ceres Seq. ID no. 12731449
  misc_feature (13)..(578): Pfam Name: Exo70 exocyst complex subunit Pfam Description: Exo70 exocyst complex subunit
  misc_feature (14)..(578): Homolog of NCBI NO: 34909792 NR Description: P0403C05.2 [Oryza sativa (japonica
  misc_feature (1)..(495): Homolog of NCBI NO: 15228701 NR Description: hypothetical protein; protein id: At3g29400.1 thaliana] >gi|11994523|dbj|BAB02587.1|
  misc_feature (1)..(552): Homolog of NCBI NO: 38346639 NR Description: OSJNBa0072D21.9 [Oryza sativa (japonica
  misc_feature (40)..(578): Homolog of NCBI NO: 9758920 NR Description: gb|AAD25781.1~gene_id:MXI22.10~strong similarity
  misc_feature (40)..(578): Homolog of NCBI NO: 30695880 NR Description: exocyst subunit EXO70 family [Arabidopsis
  misc_feature (1)..(578): Homolog of NCBI NO: 19386798 NR Description: putative leucine zipper protein [Oryza sativa
  misc_feature (1)..(578): Homolog of NCBI NO: 100226 NR Description: tomato leucine zipper-containing protein - tomato protein of unknown function [Lycopersicon esculentum]
  misc_feature (84)..(552): Homolog of NCBI NO: 30682979 NR Description: exocyst subunit EXO70 family [Arabidopsis >gi|9294634|dbj|BAB02973.1| gb|AAD25781.1~gene_id:MAG2.5~strong
  misc_feature (152)..(552): Homolog of NCBI NO: 23270388 NR Description: unknown protein [Arabidopsis thaliana]
  misc_feature (49)..(578): Homolog of NCBI NO: 22326587 NR Description: putative protein; protein id: At5g03540.1, by cDNA: gi_18176063 [Arabidopsis thaliana]
MHLSTFGIADTKVEDAGFSEIKKRFKEAVKRIRSWETNQSTMFEAGLSEADQFFQALYDVQTVLVGFKALPMKTNQMEKDVYNQATVALDIAMLRLEKELCDVLHQHKRHVQPDYLAVSSRRKDIVYDESFVSLDDEVIVEASSHEDDEQISDFYNSDLVDPIVLPHIKAIANAMFACEYDQPFCEAFIGVQREALEEYMVTLEMERFSCVDVLRMDWEDLNGAMRKWTKVVKIITQVYLASEKQLCDQILGDFESISTACFIEISKDAILSLLNFGEAVVLRSCKPEMLERFLSMYEVSAEILVDVDNLFPDETGSSLRIAFHNLSKKLADHTTTTFLKFKDAIASDESTRPFHGGGIHHLTRYVMNYLKLLPEYTDSLNSLLQNIHVDDSIPEKTGEDVLPSTFSPMARHLRSIVTTLESSLERKAQLYADEALKSIFLMNNFRYMVQKVKGSELRRLFGDEWIRKHIASYQCNVTNYERSTWSSILALLRDNNDSVRTLRERCRLFSLAFDDVYKNQTRWSVPDSELRDDLHISTSVKVVQSYRGFLGRNAVRIGEKHIRYTCEDIENMLLDLFECLPSPRSLRSSRKR

SEQ ID NO: 95986 - DNA, 2175 bp, Arabidopsis thaliana
  misc_feature (1)..(2175): Ceres Seq. ID no. 12731454
  misc_feature: MA Experiment ID: 20001451 Result: Up-regulated in Transcription
  misc_feature: MA Experiment 20001451 PARAMETER Experiment Name: At_Far-red-induction_P Parameter: Age (day) Value: 7
  misc_feature: MA Experiment 20001451 PARAMETER Experiment Name: At_Far-red-induction_P Parameter: Light Value: Far-red vs. White
  misc_feature: MA Experiment 20001451 PARAMETER Experiment Name: At_Far-red-induction_P Parameter: Organism Value: A. thaliana
  misc_feature: MA Experiment 20001451 PARAMETER Experiment Name: At_Far-red-induction_P Parameter: Plant Line Value: Columbia
  misc_feature: MA Experiment 20001451 PARAMETER Experiment Name: At_Far-red-induction_P Parameter: Timepoint (hr) Value: 24
  misc_feature: MA Experiment 20001451 PARAMETER Experiment Name: At_Far-red-induction_P Parameter: Tissue Value: Whole Plant
atgcttttgaagtttgaagcttcttcagagttgagactagttgacccttcagtttctctcactgttcttcgaaagataagactgtcacatctcccggatatgacaatgaccagcgaatcttccggcaagaaatgcggagagggtgacggcaaagtcgccggtaaaagccagcgaaaggtgggtcttgtttatgacgagaccatgtgcaaacacgacacacctaacggtaaggttgacgtagagtgtcccgatcgtatcagagttatctgggagaagcttcagctcgccggagtcactcaaagatgtgtggttcttggtggtagtaaagctgaagataagcatctcaaattggttcacacaaagaaacatgttaatttagtgaagagtattagcacaaaaaagaaagattctcggagaaacaagattgcttcacagttggattcgatttatctgaatggaggttcatctgaagctgcatatcttgcagctggatctgttgtaaaggtggcagagaaagttgcagaaggagagttagattgtggctttgctattgtcaggcccccaggacaccatgccgagtcagatgaagccatgggtttttgtttattcaacaatgttgccgttgctgctagttttttactaaacgaaagacctgatctagatgtcaagaaaattctgattgtcgattgggatatccatcacggaaatggtacacagaagatgttctggaaagattctcgcgtactaatattctctgttcataggcatgatcacggaagtttctatccatttggcgatgatggagactttaacatggttggcgaaggtccaggtgaagggtttaacattaacgttccatgggagcaaggaggatgtggagatgcagactatcttgccgtatggaaccacatcttgatccctgtgaccaaggaattcaaaccagatattattttgctttcagctggatttgatgcagctattggtgatccgcttgggggttgttgtgttaccccatatggatattcagttatgttgaagaagctgatggagtttgcacatggaaagatagtgctggcattagagggaggatacaatcttgagtcattgggaaagtcttcactcgcatgtgtccaagttttgcttgaagacaaacaaattcatggttcatctgaaacatacccattagaatctacacggcgtgtcatacaagcggtacgcgagagactatgcacatattggccttcacttgacgcgtcaatggcgtctaatgagaatttaaagaacccaagtgcagaaagaaactccgctgacgccctccttcgtgaagtggaagagttaaagtctctaatggctgcccgagatggagaactggaggcaaggagaaaagagttaaaggccaaaaataaggagctagaagcgaacgagaaggagctagaagcgggactaatgttgattcgcgctcgggaggatgtaatctgtggtcttcatgcaaaaatagagagtttgcagcaggagcgagatgaggcggtagcgaaagctgaacgcatagataaggaactccaagaggatagggcaagaagccaggagttcaaagaagacacagagttttgcttgagtacgttaaggagggagaaggagcttgccatcatggccaaaaataaggacctagaagcgaaagagaaggagctagaagcgcggctaatgttggttcacgctcgggaggataaaattcatgccaaaatagagaggttgcagcaggagcgagatgaggccgtagcaaaagctgaacgcatagataaggaactccaagaggataggtcaagaagccgagttgggaatggatcttttgccttttctcaggagttctatgaagacatggacttagacgagctcgaacctctgtctccggagttcaatgaagacatggactcggaagagcttgaaccgtttcaggtcatcaagaaaaacatggagcgttcccacaagaagttcataaaagatatggagtgtatcaagtttatcgccagtgagagagccagggtactttaggttgggagcttgaggccgtagcagaagactaccacaagtttcgcgagatggttgataagctcgggaagagcaacatatacccttcttagaaagtacaatggtgtttcattgtaaccacagaacctt

SEQ ID NO: 95987 - protein, 682 aa, Arabidopsis thaliana
  peptide (1)..(682): Ceres Seq. ID no. 12731455
  misc_feature (359)..(658): Pfam Name: Myosin tail Pfam Description: Myosin tail
  misc_feature (34)..(430): Homolog of NCBI NO: 22327994 NR Description: histone deacetylase - like; protein id: supported by cDNA: gi_20259319 [Arabidopsis thaliana] putative histone deacetylase [Arabidopsis thaliana]
  misc_feature (34)..(405): Homolog of NCBI NO: 9759454 NR Description: contains similarity to histone
  misc_feature (60)..(521): Homolog of NCBI NO: 32968028 NR Description: HDA1 [Zea mays]
  misc_feature (59)..(405): Homolog of NCBI NO: 34394912 NR Description: putative histone deacetylase [Oryza sativa
  misc_feature (57)..(523): Homolog of NCBI NO: 34933421 NR Description: histone deacetylase 6 [Rattus norvegicus]
  misc_feature (59)..(416): Homolog of NCBI NO: 33115103 NR Description: putative histone deacetylase [Cochliobolus
  misc_feature (57)..(433): Homolog of NCBI NO: 34533888 NR Description: unnamed protein product [Homo sapiens]
  misc_feature (57)..(433): Homolog of NCBI NO: 15489272 NR Description: histone deacetylase 6 [Homo sapiens]
  misc_feature (57)..(457): Homolog of NCBI NO: 27882614 NR Description: Similar to histone deacetylase 6 [Xenopus laevis]
  misc_feature (59)..(433): Homolog of NCBI NO: 7108921 NR Description: GR AF-1 specific histone deacetylase [Homo
MLLKFEASSELRLVDPSVSLTVLRKIRLSHLPDMTMTSESSGKKCGEGDGKVAGKSQRKVGLVYDETMCKHDTPNGKVDVECPDRIRVIWEKLQLAGVTQRCVVLGGSKAEDKHLKLVHTKKHVNLVKSISTKKKDSRRNKIASQLDSIYLNGGSSEAAYLAAGSVVKVAEKVAEGELDCGFAIVRPPGHHAESDEAMGFCLFNNVAVAASFLLNERPDLDVKKILIVDWDIHHGNGTQKMFWKDSRVLIFSVHRHDHGSFYPFGDDGDFNMVGEGPGEGFNINVPWEQGGCGDADYLAVWNHILIPVTKEFKPDIILLSAGFDAAIGDPLGGCCVTPYGYSVMLKKLMEFAHGKIVLALEGGYNLESLGKSSLACVQVLLEDKQIHGSSETYPLESTRRVIQAVRERLCTYWPSLDASMASNENLKNPSAERNSADALLREVEELKSLMAARDGELEARRKELKAKNKELEANEKELEAGLMLIRAREDVICGLHAKIESLQQERDEAVAKAERIDKELQEDRARSQEFKEDTEFCLSTLRREKELAIMAKNKDLEAKEKELEARLMLVHAREDKIHAKIERLQQERDEAVAKAERIDKELQEDRSRSRVGNGSFAFSQEFYEDMDLDELEPLSPEFNEDMDSEELEPFQVIKKNMERSHKKFIKDMECIKFIASERARVL

SEQ ID NO: 95988 - protein, 649 aa, Arabidopsis thaliana
  peptide (1)..(649): Ceres Seq. ID no. 12731456
  misc_feature (326)..(625): Pfam Name: Myosin tail Pfam Description: Myosin tail
  misc_feature (1)..(397): Homolog of NCBI NO: 22327994 NR Description: histone deacetylase - like; protein id: supported by cDNA: gi_20259319 [Arabidopsis thaliana] putative histone deacetylase [Arabidopsis thaliana]
  misc_feature (1)..(372): Homolog of NCBI NO: 9759454 NR Description: contains similarity to histone
  misc_feature (27)..(488): Homolog of NCBI NO: 32968028 NR Description: HDA1 [Zea mays]
  misc_feature (26)..(372): Homolog of NCBI NO: 34394912 NR Description: putative histone deacetylase [Oryza sativa
  misc_feature (24)..(490): Homolog of NCBI NO: 34933421 NR Description: histone deacetylase 6 [Rattus norvegicus]
  misc_feature (26)..(383): Homolog of NCBI NO: 33115103 NR Description: putative histone deacetylase [Cochliobolus
  misc_feature (24)..(400): Homolog of NCBI NO: 34533888 NR Description: unnamed protein product [Homo sapiens]
  misc_feature (24)..(400): Homolog of NCBI NO: 15489272 NR Description: histone deacetylase 6 [Homo sapiens]
  misc_feature (24)..(424): Homolog of NCBI NO: 27882614 NR Description: Similar to histone deacetylase 6 [Xenopus laevis]
  misc_feature (26)..(400): Homolog of NCBI NO: 7108921 NR Description: GR AF-1 specific histone deacetylase [Homo
MTMTSESSGKKCGEGDGKVAGKSQRKVGLVYDETMCKHDTPNGKVDVECPDRIRVIWEKLQLAGVTQRCVVLGGSKAEDKHLKLVHTKKHVNLVKSISTKKKDSRRNKIASQLDSIYLNGGSSEAAYLAAGSVVKVAEKVAEGELDCGFAIVRPPGHHAESDEAMGFCLFNNVAVAASFLLNERPDLDVKKILIVDWDIHHGNGTQKMFWKDSRVLIFSVHRHDHGSFYPFGDDGDFNMVGEGPGEGFNINVPWEQGGCGDADYLAVWNHILIPVTKEFKPDIILLSAGFDAAIGDPLGGCCVTPYGYSVMLKKLMEFAHGKIVLALEGGYNLESLGKSSLACVQVLLEDKQIHGSSETYPLESTRRVIQAVRERLCTYWPSLDASMASNENLKNPSAERNSADALLREVEELKSLMAARDGELEARRKELKAKNKELEANEKELEAGLMLIRAREDVICGLHAKIESLQQERDEAVAKAERIDKELQEDRARSQEFKEDTEFCLSTLRREKELAIMAKNKDLEAKEKELEARLMLVHAREDKIHAKIERLQQERDEAVAKAERIDKELQEDRSRSRVGNGSFAFSQEFYEDMDLDELEPLSPEFNEDMDSEELEPFQVIKKNMERSHKKFIKDMECIKFIASERARVL

SEQ ID NO: 95989 - protein, 647 aa, Arabidopsis thaliana
  peptide (1)..(647): Ceres Seq. ID no. 12731457
  misc_feature (324)..(623): Pfam Name: Myosin tail Pfam Description: Myosin tail
  misc_feature (1)..(395): Homolog of NCBI NO: 22327994 NR Description: histone deacetylase - like; protein id: supported by cDNA: gi_20259319 [Arabidopsis thaliana] putative histone deacetylase [Arabidopsis thaliana]
  misc_feature (1)..(370): Homolog of NCBI NO: 9759454 NR Description: contains similarity to histone
  misc_feature (25)..(486): Homolog of NCBI NO: 32968028 NR Description: HDA1 [Zea mays]
  misc_feature (24)..(370): Homolog of NCBI NO: 34394912 NR Description: putative histone deacetylase [Oryza sativa
  misc_feature (22)..(488): Homolog of NCBI NO: 34933421 NR Description: histone deacetylase 6 [Rattus norvegicus]
  misc_feature (24)..(381): Homolog of NCBI NO: 33115103 NR Description: putative histone deacetylase [Cochliobolus
  misc_feature (22)..(398): Homolog of NCBI NO: 34533888 NR Description: unnamed protein product [Homo sapiens]
  misc_feature (22)..(398): Homolog of NCBI NO: 15489272 NR Description: histone deacetylase 6 [Homo sapiens]
  misc_feature (22)..(422): Homolog of NCBI NO: 27882614 NR Description: Similar to histone deacetylase 6 [Xenopus laevis]
  misc_feature (24)..(398): Homolog of NCBI NO: 7108921 NR Description: GR AF-1 specific histone deacetylase [Homo
MTSESSGKKCGEGDGKVAGKSQRKVGLVYDETMCKHDTPNGKVDVECPDRIRVIWEKLQLAGVTQRCVVLGGSKAEDKHLKLVHTKKHVNLVKSISTKKKDSRRNKIASQLDSIYLNGGSSEAAYLAAGSVVKVAEKVAEGELDCGFAIVRPPGHHAESDEAMGFCLFNNVAVAASFLLNERPDLDVKKILIVDWDIHHGNGTQKMFWKDSRVLIFSVHRHDHGSFYPFGDDGDFNMVGEGPGEGFNINVPWEQGGCGDADYLAVWNHILIPVTKEFKPDIILLSAGFDAAIGDPLGGCCVTPYGYSVMLKKLMEFAHGKIVLALEGGYNLESLGKSSLACVQVLLEDKQIHGSSETYPLESTRRVIQAVRERLCTYWPSLDASMASNENLKNPSAERNSADALLREVEELKSLMAARDGELEARRKELKAKNKELEANEKELEAGLMLIRAREDVICGLHAKIESLQQERDEAVAKAERIDKELQEDRARSQEFKEDTEFCLSTLRREKELAIMAKNKDLEAKEKELEARLMLVHAREDKIHAKIERLQQERDEAVAKAERIDKELQEDRSRSRVGNGSFAFSQEFYEDMDLDELEPLSPEFNEDMDSEELEPFQVIKKNMERSHKKFIKDMECIKFIASERARVL

SEQ ID NO: 95990 - DNA, 1562 bp, Arabidopsis thaliana
  misc_feature (1)..(1562): Ceres Seq. ID no. 12731458
  misc_feature: MA Experiment ID: 20000166 Result: Down-regulated in Transcription
  misc_feature: MA Experiment 20000166 PARAMETER Experiment Name: At_100uM_ABA_P Parameter: Age (day) Value: 14
  misc_feature: MA Experiment 20000166 PARAMETER Experiment Name: At_100uM_ABA_P Parameter: Organism Value: A. thaliana
  misc_feature: MA Experiment 20000166 PARAMETER Experiment Name: At_100uM_ABA_P Parameter: Plant Line Value: WS
  misc_feature: MA Experiment 20000166 PARAMETER Experiment Name: At_100uM_ABA_P Parameter: Timepoint (hr) Value: 1
  misc_feature: MA Experiment 20000166 PARAMETER Experiment Name: At_100uM_ABA_P Parameter: Tissue Value: Aerial
  misc_feature: MA Experiment 20000166 PARAMETER Experiment Name: At_100uM_ABA_P Parameter: Treatment Value: 100uM ABA vs. No Treatment
  misc_feature: MA Experiment ID: 20000169 Result: Down-regulated in Transcription
  misc_feature: MA Experiment 20000169 PARAMETER Experiment Name: At_100uM_ABA_P Parameter: Age (day) Value: 14
  misc_feature: MA Experiment 20000169 PARAMETER Experiment Name: At_100uM_ABA_P Parameter: Organism Value: A. thaliana
  misc_feature: MA Experiment 20000169 PARAMETER Experiment Name: At_100uM_ABA_P Parameter: Plant Line Value: WS
  misc_feature: MA Experiment 20000169 PARAMETER Experiment Name: At_100uM_ABA_P Parameter: Timepoint (hr) Value: 6
  misc_feature: MA Experiment 20000169 PARAMETER Experiment Name: At_100uM_ABA_P Parameter: Tissue Value: Aerial
  misc_feature: MA Experiment 20000169 PARAMETER Experiment Name: At_100uM_ABA_P Parameter: Treatment Value: 100uM ABA vs. No Treatment
  misc_feature: MA Experiment ID: 20000184 Result: Down-regulated in Transcription
  misc_feature: MA Experiment 20000184 PARAMETER Experiment Name: At_Shoots__P Parameter: Age (day) Value: 7
  misc_feature: MA Experiment 20000184 PARAMETER Experiment Name: At_Shoots__P Parameter: Tissue Value: Shoots vs. Whole Plant
  misc_feature: MA Experiment ID: 20000452 Result: Down-regulated in Transcription
  misc_feature: MA Experiment 20000452 PARAMETER Experiment Name: At_CS6879_Shoots-Roots_P Parameter: Age (day) Value: 14
  misc_feature: MA Experiment 20000452 PARAMETER Experiment Name: At_CS6879_Shoots-Roots_P Parameter: Organism Value: A. thaliana
  misc_feature: MA Experiment 20000452 PARAMETER Experiment Name: At_CS6879_Shoots-Roots_P Parameter: Plant Line Value: CS6879 vs. WS
  misc_feature: MA Experiment 20000452 PARAMETER Experiment Name: At_CS6879_Shoots-Roots_P Parameter: Tissue Value: Shoots
  misc_feature: MA Experiment ID: 20000460 Result: Down-regulated in Transcription
  misc_feature: MA Experiment 20000460 PARAMETER Experiment Name: At_10percent_PEG_P Parameter: Age (day) Value: 12
  misc_feature: MA Experiment 20000460 PARAMETER Experiment Name: At_10percent_PEG_P Parameter: Organism Value: A. thaliana
  misc_feature: MA Experiment 20000460 PARAMETER Experiment Name: At_10percent_PEG_P Parameter: Plant Line Value: WS
  misc_feature: MA Experiment 20000460 PARAMETER Experiment Name: At_10percent_PEG_P Parameter: Timepoint (day) Value: 12
  misc_feature: MA Experiment 20000460 PARAMETER Experiment Name: At_10percent_PEG_P Parameter: Tissue Value: Whole Plant
  misc_feature: MA Experiment 20000460 PARAMETER Experiment Name: At_10percent_PEG_P Parameter: Treatment Value: 10percent PEG vs. No Treatment
  misc_feature: MA Experiment ID: 20000527 Result: Down-regulated in Transcription
  misc_feature: MA Experiment 20000527 PARAMETER Experiment Name: At_10percent_PEG_P Parameter: Age (day) Value: 20
  misc_feature: MA Experiment 20000527 PARAMETER Experiment Name: At_10percent_PEG_P Parameter: Organism Value: A. thaliana
  misc_feature: MA Experiment 20000527 PARAMETER Experiment Name: At_10percent_PEG_P Parameter: Plant Line Value: WS
  misc_feature: MA Experiment 20000527 PARAMETER Experiment Name: At_10percent_PEG_P Parameter: Timepoint (day) Value: 20
  misc_feature: MA Experiment 20000527 PARAMETER Experiment Name: At_10percent_PEG_P Parameter: Tissue Value: Whole Plant
  misc_feature: MA Experiment 20000527 PARAMETER Experiment Name: At_10percent_PEG_P Parameter: Treatment Value: 10percent PEG vs. No Treatment
  misc_feature: MA Experiment ID: 20001451 Result: Down-regulated in Transcription
  misc_feature: MA Experiment 20001451 PARAMETER Experiment Name: At_Far-red-induction_P Parameter: Age (day) Value: 7
  misc_feature: MA Experiment 20001451 PARAMETER Experiment Name: At_Far-red-induction_P Parameter: Light Value: Far-red vs. White
  misc_feature: MA Experiment 20001451 PARAMETER Experiment Name: At_Far-red-induction_P Parameter: Organism Value: A. thaliana
  misc_feature: MA Experiment 20001451 PARAMETER Experiment Name: At_Far-red-induction_P Parameter: Plant Line Value: Columbia
  misc_feature: MA Experiment 20001451 PARAMETER Experiment Name: At_Far-red-induction_P Parameter: Timepoint (hr) Value: 24
  misc_feature: MA Experiment 20001451 PARAMETER Experiment Name: At_Far-red-induction_P Parameter: Tissue Value: Whole Plant
gaataaactcatacgtacaaaggaatattatctaaaagacgagagtacaagtgagaaatggcgttaaaggtgatcaagatctcccgagtcagccctgcaaccgcctccgtcgacccgctcattgtcccactctcgttctttgatttacagtggcttaaactcaaccctaccgagcaagtcttcttttacaaactcaccgaatcatcatcatctcgcgacgttttctactcctccatcctccccaagctcgagcgatctctttcactcatcctcactcactttcgcctattcacgggtcaccttaagtgggattcacaagatccaaagccgcatttagttgttctctcaggagacacactctctctcacagtggctgagactgatgcggatttctcacgtatctctggcagagggcttcgtccagagctagagttacgccctctaatacccgagctaccgatttattctgactcgggggctgttgtatctctgcaagtcactttgttcccgaaacaaggcttctgcattggaaccacagcccaccatgtcgtcttggacggcaaaacggctgaaaaatttaacaaagcatgggctcacacttgtaaacatggcaccataccgaaaattctaccaacggttttagatcgttctgtcgtcaatgttccagccggacttgaacaaaagatgctcgaacttctgccgtatcttacggaggacgacaaagagaacggaagaaccctaaagctacctccagtcaaagagattaacgctaaagacaacgtcctccgaatcaccatcgagataagtcctgaaaacattgagaaactcaaggagagagccaagaaagagtcaacacgcgctgagcttcacttgtcaacgttcgtagtcacgttcgcccatgtgtggacatgcatggtgaaggcacgtagtggtgacccaaaccgaccggttcgtttcatgtacgctgctgattttaggaaccggttagaaccaccagtccctgtgacatacttcgggacttgtgtcttagccatggatttctataaatacaaagctaaggagtttatgggagaagatggatttgtcaacaccgtcgagattctcagtgattcggtcaaacgtttggcttcacaaggggtagagtcaacttggaaagtgtatgaggaaggaacaaagacaatgaaatggggtacacagttgttggtcgtaaacgggtcgaaccagattgggatgtacgaaacggacttcgggtggggaagacccattcacactgagacaatgtctatctacaagaacgatgagttctctatgtccaagaggagagatggtatcggtggcgtcgagattggcatctctttgaagaaacttgagatggatacttttctgtctttattttacaaatggattggaaactgaaaacgtacggtcttaatcgatcccagcttttgcttatttgtatttttatttctagttcaataattgccctatatgtactacgcaaatttgtattgattctgtcttttgaattctattttttggggtacaataatcatccatatttg

SEQ ID NO: 95991 - protein, 452 aa, Arabidopsis thaliana
  peptide (1)..(452): Ceres Seq. ID no. 12731459
  misc_feature (1)..(449): Pfam Name: Transferase family Pfam Description: Transferase family
  misc_feature (1)..(452): Homolog of NCBI NO: 15240152 NR Description: anthocyanin 5-aromatic acyltransferase - like protein id: At5g61160.1, supported by cDNA: gi_14335039
  misc_feature (1)..(446): Homolog of NCBI NO: 15230049 NR Description: anthocyanin 5-aromatic acyltransferase, putative; id: At3g29680.1 [Arabidopsis thaliana]
  misc_feature (1)..(446): Homolog of NCBI NO: 15230034 NR Description: hypothetical protein; protein id: At3g29635.1
  misc_feature (1)..(446): Homolog of NCBI NO: 15230048 NR Description: anthocyanin 5-aromatic acyltransferase, putative; id: At3g29670.1 [Arabidopsis thaliana]
  misc_feature (1)..(452): Homolog of NCBI NO: 15450469 NR Description: AT5g39050/MXF12_60 [Arabidopsis thaliana]
  misc_feature (2)..(450): Homolog of NCBI NO: 15241632 NR Description: acyltransferase -like protein; protein id:
  misc_feature (1)..(452): Homolog of NCBI NO: 10177550 NR Description: anthocyanin acyltransferase-like protein
  misc_feature (2)..(446): Homolog of NCBI NO: 15230013 NR Description: Anthocyanin 5-aromatic acyltransferase, putative; id: At3g29590.1 [Arabidopsis thaliana]
  misc_feature (2)..(447): Homolog of NCBI NO: 21593292 NR Description: acyltransferase-like protein [Arabidopsis
  misc_feature (2)..(447): Homolog of NCBI NO: 15241631 NR Description: acyltransferase -like protein; protein id: supported by cDNA: 37806. [Arabidopsis thaliana]
MALKVIKISRVSPATASVDPLIVPLSFFDLQWLKLNPTEQVFFYKLTESSSSRDVFYSSILPKLERSLSLILTHFRLFTGHLKWDSQDPKPHLVVLSGDTLSLTVAETDADFSRISGRGLRPELELRPLIPELPIYSDSGAVVSLQVTLFPKQGFCIGTTAHHVVLDGKTAEKFNKAWAHTCKHGTIPKILPTVLDRSVVNVPAGLEQKMLELLPYLTEDDKENGRTLKLPPVKEINAKDNVLRITIEISPENIEKLKERAKKESTRAELHLSTFVVTFAHVWTCMVKARSGDPNRPVRFMYAADFRNRLEPPVPVTYFGTCVLAMDFYKYKAKEFMGEDGFVNTVEILSDSVKRLASQGVESTWKVYEEGTKTMKWGTQLLVVNGSNQIGMYETDFGWGRPIHTETMSIYKNDEFSMSKRRDGIGGVEIGISLKKLEMDTFLSLFYKWIGN

SEQ ID NO: 95992 - protein, 243 aa, Arabidopsis thaliana
  peptide (1)..(243): Ceres Seq. ID no. 12731460
  misc_feature (1)..(240): Pfam Name: Transferase family Pfam Description: Transferase family
  misc_feature (1)..(243): Homolog of NCBI NO: 15240152 NR Description: anthocyanin 5-aromatic acyltransferase - like protein id: At5g61160.1, supported by cDNA: gi_14335039
  misc_feature (1)..(237): Homolog of NCBI NO: 15230049 NR Description: anthocyanin 5-aromatic acyltransferase, putative; id: At3g29680.1 [Arabidopsis thaliana]
  misc_feature (1)..(237): Homolog of NCBI NO: 15230034 NR Description: hypothetical protein; protein id: At3g29635.1
  misc_feature (1)..(237): Homolog of NCBI NO: 15230048 NR Description: anthocyanin 5-aromatic acyltransferase, putative; id: At3g29670.1 [Arabidopsis thaliana]
  misc_feature (1)..(243): Homolog of NCBI NO: 15450469 NR Description: AT5g39050/MXF12_60 [Arabidopsis thaliana]
  misc_feature (1)..(241): Homolog of NCBI NO: 15241632 NR Description: acyltransferase -like protein; protein id:
  misc_feature (1)..(243): Homolog of NCBI NO: 10177550 NR Description: anthocyanin acyltransferase-like protein
  misc_feature (1)..(237): Homolog of NCBI NO: 15230013 NR Description: Anthocyanin 5-aromatic acyltransferase, putative; id: At3g29590.1 [Arabidopsis thaliana]
  misc_feature (1)..(238): Homolog of NCBI NO: 21593292 NR Description: acyltransferase-like protein [Arabidopsis
  misc_feature (1)..(238): Homolog of NCBI NO: 15241631 NR Description: acyltransferase -like protein; protein id: supported by cDNA: 37806. [Arabidopsis thaliana]
MLELLPYLTEDDKENGRTLKLPPVKEINAKDNVLRITIEISPENIEKLKERAKKESTRAELHLSTFVVTFAHVWTCMVKARSGDPNRPVRFMYAADFRNRLEPPVPVTYFGTCVLAMDFYKYKAKEFMGEDGFVNTVEILSDSVKRLASQGVESTWKVYEEGTKTMKWGTQLLVVNGSNQIGMYETDFGWGRPIHTETMSIYKNDEFSMSKRRDGIGGVEIGISLKKLEMDTFLSLFYKWIGN

SEQ ID NO: 95993 - DNA, 1354 bp, Arabidopsis thaliana
  misc_feature (1)..(1354): Ceres Seq. ID no. 12731467
  misc_feature: MA Experiment ID: 108434 Result: Down-regulated in Transcription
  misc_feature: MA Experiment 108434 PARAMETER Experiment Name: At_Root_Tips_cDNA_P Parameter: Tissue Value: Root Tips
  misc_feature: MA Experiment ID: 108469 Result: Up-regulated in Transcription
  misc_feature: MA Experiment ID: 108585 Result: Up-regulated in Transcription
  misc_feature: MA Experiment 108585 PARAMETER Experiment Name: At_5mM_NaNP_cDNA_P Parameter: Timepoint (hr) Value: 6
  misc_feature: MA Experiment 108585 PARAMETER Experiment Name: At_5mM_NaNP_cDNA_P Parameter: Tissue Value: Aerial
  misc_feature: MA Experiment 108585 PARAMETER Experiment Name: At_5mM_NaNP_cDNA_P Parameter: Treatment Value: null
  misc_feature: MA Experiment ID: 108668 Result: Up-regulated in Transcription
  misc_feature: MA Experiment 108668 PARAMETER Experiment Name: At_2mM_SA_cDNA_P Parameter: Plant Line Value: WS
  misc_feature: MA Experiment 108668 PARAMETER Experiment Name: At_2mM_SA_cDNA_P Parameter: Timepoint (hr) Value: 6
  misc_feature: MA Experiment 108668 PARAMETER Experiment Name: At_2mM_SA_cDNA_P Parameter: Treatment Value: 2mM SA vs. No Treatment
  misc_feature: MA Experiment ID: 20000182 Result: Up-regulated in Transcription
  misc_feature: MA Experiment 20000182 PARAMETER Experiment Name: At_2mM_SA_P Parameter: Age (day) Value: 14
  misc_feature: MA Experiment 20000182 PARAMETER Experiment Name: At_2mM_SA_P Parameter: Organism Value: A. thaliana
  misc_feature: MA Experiment 20000182 PARAMETER Experiment Name: At_2mM_SA_P Parameter: Plant Line Value: WS
  misc_feature: MA Experiment 20000182 PARAMETER Experiment Name: At_2mM_SA_P Parameter: Timepoint (hr) Value: 6
  misc_feature: MA Experiment 20000182 PARAMETER Experiment Name: At_2mM_SA_P Parameter: Tissue Value: Aerial
  misc_feature: MA Experiment 20000182 PARAMETER Experiment Name: At_2mM_SA_P Parameter: Treatment Value: 2mM SA vs. No Treatment
  misc_feature: MA Experiment ID: 20000184 Result: Down-regulated in Transcription
  misc_feature: MA Experiment 20000184 PARAMETER Experiment Name: At_Shoots__P Parameter: Age (day) Value: 7
  misc_feature: MA Experiment 20000184 PARAMETER Experiment Name: At_Shoots__P Parameter: Tissue Value: Shoots vs. Whole Plant
  misc_feature: MA Experiment ID: 20000234 Result: Down-regulated in Transcription
  misc_feature: MA Experiment 20000234 PARAMETER Experiment Name: At_Siliques_P Parameter: Age (day) Value: 21
  misc_feature: MA Experiment 20000234 PARAMETER Experiment Name: At_Siliques_P Parameter: Organism Value: A. thaliana
  misc_feature: MA Experiment 20000234 PARAMETER Experiment Name: At_Siliques_P Parameter: Plant Line Value: WS
  misc_feature: MA Experiment 20000234 PARAMETER Experiment Name: At_Siliques_P Parameter: Tissue Value: Less Than 5mm Siliques vs. Whole Plant
  misc_feature: MA Experiment ID: 20000264 Result: Down-regulated in Transcription
  misc_feature: MA Experiment 20000264 PARAMETER Experiment Name: At_Open_Flower_P Parameter: Age (day) Value: 21
  misc_feature: MA Experiment 20000264 PARAMETER Experiment Name: At_Open_Flower_P Parameter: Plant Line Value: WS
  misc_feature: MA Experiment 20000264 PARAMETER Experiment Name: At_Open_Flower_P Parameter: Tissue Value: Open Flower vs. Whole Plant
  misc_feature: MA Experiment ID: 20000265 Result: Down-regulated in Transcription
  misc_feature: MA Experiment 20000265 PARAMETER Experiment Name: At_Open_Flower_P Parameter: Age (day) Value: 21
  misc_feature: MA Experiment 20000265 PARAMETER Experiment Name: At_Open_Flower_P Parameter: Plant Line Value: WS
  misc_feature: MA Experiment 20000265 PARAMETER Experiment Name: At_Open_Flower_P Parameter: Tissue Value: Closed Flower vs. Whole Plant
  misc_feature: MA Experiment ID: 20000286 Result: Down-regulated in Transcription
  misc_feature: MA Experiment 20000286 PARAMETER Experiment Name: At_Open_Flower_P Parameter: Age (day) Value: 21
  misc_feature: MA Experiment 20000286 PARAMETER Experiment Name: At_Open_Flower_P Parameter: Plant Line Value: WS
  misc_feature: MA Experiment 20000286 PARAMETER Experiment Name: At_Open_Flower_P Parameter: Tissue Value: Half Open vs. Whole Plant
  misc_feature: MA Experiment ID: 20000438 Result: Down-regulated in Transcription
  misc_feature: MA Experiment 20000438 PARAMETER Experiment Name: At_Shoots__P Parameter: Age (day) Value: 14
  misc_feature: MA Experiment 20000438 PARAMETER Experiment Name: At_Shoots__P Parameter: Tissue Value: Shoots vs. Whole Plant
  misc_feature: MA Experiment ID: 20001247 Result: Up-regulated in Transcription
  misc_feature: MA Experiment 20001247 PARAMETER Experiment Name: At_Far-red-induction_P Parameter: Age (day) Value: 7
  misc_feature: MA Experiment 20001247 PARAMETER Experiment Name: At_Far-red-induction_P Parameter: Light Value: Far-red vs. White
  misc_feature: MA Experiment 20001247 PARAMETER Experiment Name: At_Far-red-induction_P Parameter: Organism Value: A. thaliana
  misc_feature: MA Experiment 20001247 PARAMETER Experiment Name: At_Far-red-induction_P Parameter: Plant Line Value: Columbia
  misc_feature: MA Experiment 20001247 PARAMETER Experiment Name: At_Far-red-induction_P Parameter: Timepoint (hr) Value: 1
  misc_feature: MA Experiment 20001247 PARAMETER Experiment Name: At_Far-red-induction_P Parameter: Tissue Value: Whole Plant
  misc_feature: MA Experiment ID: 20001555 Result: Down-regulated in Transcription
  misc_feature: MA Experiment 20001555 PARAMETER Experiment Name: At_Drought_Soil_Dry_P Parameter: Age (day) Value: 24
  misc_feature: MA Experiment 20001555 PARAMETER Experiment Name: At_Drought_Soil_Dry_P Parameter: Organism Value: A. thaliana
  misc_feature: MA Experiment 20001555 PARAMETER Experiment Name: At_Drought_Soil_Dry_P Parameter: Plant Line Value: WS
  misc_feature: MA Experiment 20001555 PARAMETER Experiment Name: At_Drought_Soil_Dry_P Parameter: Post Timepoint (hr) Value: None
  misc_feature: MA Experiment 20001555 PARAMETER Experiment Name: At_Drought_Soil_Dry_P Parameter: Post-Treatment Value: None
  misc_feature: MA Experiment 20001555 PARAMETER Experiment Name: At_Drought_Soil_Dry_P Parameter: Timepoint (day) Value: 10
  misc_feature: MA Experiment 20001555 PARAMETER Experiment Name: At_Drought_Soil_Dry_P Parameter: Treatment Value: Drought vs. No Drought
  misc_feature: MA Experiment ID: 20001556 Result: Down-regulated in Transcription
  misc_feature: MA Experiment 20001556 PARAMETER Experiment Name: At_Drought_Soil_Dry_P Parameter: Age (day) Value: 26
  misc_feature: MA Experiment 20001556 PARAMETER Experiment Name: At_Drought_Soil_Dry_P Parameter: Organism Value: A. thaliana
  misc_feature: MA Experiment 20001556 PARAMETER Experiment Name: At_Drought_Soil_Dry_P Parameter: Plant Line Value: WS
  misc_feature: MA Experiment 20001556 PARAMETER Experiment Name: At_Drought_Soil_Dry_P Parameter: Post Timepoint (hr) Value: None
  misc_feature: MA Experiment 20001556 PARAMETER Experiment Name: At_Drought_Soil_Dry_P Parameter: Post-Treatment Value: None
  misc_feature: MA Experiment 20001556 PARAMETER Experiment Name: At_Drought_Soil_Dry_P Parameter: Timepoint (day) Value: 12
  misc_feature: MA Experiment 20001556 PARAMETER Experiment Name: At_Drought_Soil_Dry_P Parameter: Treatment Value: Drought vs. No Drought
  misc_feature: MA Experiment ID: 20001560 Result: Down-regulated in Transcription
  misc_feature: MA Experiment 20001560 PARAMETER Experiment Name: At_Drought_Soil_Dry_P Parameter: Age (day) Value: 28
  misc_feature: MA Experiment 20001560 PARAMETER Experiment Name: At_Drought_Soil_Dry_P Parameter: Organism Value: A. thaliana
  misc_feature: MA Experiment 20001560 PARAMETER Experiment Name: At_Drought_Soil_Dry_P Parameter: Plant Line Value: WS
  misc_feature: MA Experiment 20001560 PARAMETER Experiment Name: At_Drought_Soil_Dry_P Parameter: Post Timepoint (hr) Value: None
  misc_feature: MA Experiment 20001560 PARAMETER Experiment Name: At_Drought_Soil_Dry_P Parameter: Post-Treatment Value: None
  misc_feature: MA Experiment 20001560 PARAMETER Experiment Name: At_Drought_Soil_Dry_P Parameter: Timepoint (day) Value: 14
  misc_feature: MA Experiment 20001560 PARAMETER Experiment Name: At_Drought_Soil_Dry_P Parameter: Treatment Value: Drought vs. No Drought
gttgtactctcaaattcttgggtcgttctgagtcgtctccgcgttaaatcttttccctttttgatcctttcttcctttcttcttcttcttcgcattgatttggtcctccttcctcttctattctattcattaagaacctaatcttcatcttctccatcttcttcttcacggactccacttcgctcatccaggaaggtttattagtagtaaccaatccaagtgttccttttgtttgaagcaacaagctttgtgatattatcctgagagacaatgtttggtttaaggaaatcaccggcaaatcttcccaagcataactcagtcgacctcaagtcttccaagccaaatcctttcgattcagatgatgaatctgacaacaaacatacccttaacccttctaagaggactacctctgaaccctctttggctgatatgacaaacccttttggtggtgagagagttcagaaaggagatagtagttcatccaaacagtcattgttttcgaactccaaataccagtacaagaacaatttccgtgattctggtggtattgaaaaccagtcggttcaggagcttgaaggttatgctgtgtacaaggctgaagagactacgaaatctgtacaaggttgtttgaaggtagcagaagatataaggtctgatgctaccagaactttggtcatgttacacgatcagggcgagcaaatcactaggacgcaccataaagccgttgaaatcgaccatgatctcagtcgtggtgagaaacttcttggaagccttggaggcatgttttcaaagacttggaaaccaaagaagactcgtcctataaatggtcccgtcgtaaccagagatgactcaccaacgagaagagttaaccacttagagaaaagggaaaaactgggactgaactcagcacccagaggacaatcaagaacccgagaaccactccccgaatcagctgatgcttatcagagagtggagatggaaaaagctaagcaagacgatgggctttcagacttgagtgatatactcggcgagctaaagaacatggctgttgacatgggaagcgaaatcgagaagcagaacaaaggacttgaccatcttcatgatgatgttgacgaactcaacttcagagtgcaacaatcaaaccaacgtggtcgccgtttgcttggaaagtagatgaacagagggtttatatgttcattacactcattcctcgtttgttttattctctatgaagttgttctttaaaactggaaagattcttatcatgttaaatacattattgctatctgtgtttgtatttgatcttgtgacaaaaaaccaaaaaacttattgatcaaacagaagcaactttggt

SEQ ID NO: 95994 - protein, 300 aa, Arabidopsis thaliana; identical to SEQ ID NO: 29602
  peptide (1)..(300): Ceres Seq. ID no. 12731468
  misc_feature (240)..(300): Pfam Name: SNARE domain Pfam Description: SNARE domain
  misc_feature (1)..(300): Homolog of NCBI NO: 15240163 NR Description: syntaxin SNAP33; protein id: At5g61210.1, by cDNA: 14562., supported by cDNA: gi_16323046 [Arabidopsis >gi|27805727|sp|Q9S7P9|SN33_ARATH SNAP25 homologous protein
  misc_feature (1)..(300): Homolog of NCBI NO: 21553460 NR Description: snap25a [Arabidopsis thaliana]
  misc_feature (53)..(300): Homolog of NCBI NO: 15222976 NR Description: synaptosomal associated protein (SNAP25A), protein id: At1g13890.1 [Arabidopsis thaliana]
  misc_feature (8)..(300): Homolog of NCBI NO: 32308074 NR Description: SNAP-34 [Hordeum vulgare subsp. vulgare]
  misc_feature (82)..(300): Homolog of NCBI NO: 15241436 NR Description: SNAP25 - like protein; protein id: At5g07880.1 thaliana] >gi|27805728|sp|Q9SD96|SN29_ARATH SNAP25 homologous
  misc_feature (89)..(299): Homolog of NCBI NO: 18765733 NR Description: synaptosomal-associated protein 25 isoform
  misc_feature (89)..(299): Homolog of NCBI NO: 6755588 NR Description: synaptosomal-associated protein;
  misc_feature (91)..(298): Homolog of NCBI NO: 27263173 NR Description: synaptosome-associated protein of 25 kDa
  misc_feature (89)..(299): Homolog of NCBI NO: 37589801 NR Description: Unknown (protein for MGC:73101) [Danio rerio]
  misc_feature (89)..(299): Homolog of NCBI NO: 548945 NR Description: Synaptosomal-associated protein 25B (SNAP-25B)

SEQ ID NO: 95995 - protein, 247 aa, Arabidopsis thaliana; identical to SEQ ID NO: 29603
  peptide (1)..(247): Ceres Seq. ID no. 12731469
  misc_feature (187)..(247): Pfam Name: SNARE domain Pfam Description: SNARE domain
  misc_feature (1)..(247): Homolog of NCBI NO: 15240163 NR Description: syntaxin SNAP33; protein id: At5g61210.1, by cDNA: 14562., supported by cDNA: gi_16323046 [Arabidopsis >gi|27805727|sp|Q9S7P9|SN33_ARATH SNAP25 homologous protein
  misc_feature (1)..(247): Homolog of NCBI NO: 21553460 NR Description: snap25a [Arabidopsis thaliana]
  misc_feature (1)..(247): Homolog of NCBI NO: 15222976 NR Description: synaptosomal associated protein (SNAP25A), protein id: At1g13890.1 [Arabidopsis thaliana]
  misc_feature (1)..(247): Homolog of NCBI NO: 32308074 NR Description: SNAP-34 [Hordeum vulgare subsp. vulgare]
  misc_feature (29)..(247): Homolog of NCBI NO: 15241436 NR Description: SNAP25 - like protein; protein id: At5g07880.1 thaliana] >gi|27805728|sp|Q9SD96|SN29_ARATH SNAP25 homologous
  misc_feature (36)..(246): Homolog of NCBI NO: 18765733 NR Description: synaptosomal-associated protein 25 isoform
  misc_feature (36)..(246): Homolog of NCBI NO: 6755588 NR Description: synaptosomal-associated protein;
  misc_feature (38)..(245): Homolog of NCBI NO: 27263173 NR Description: synaptosome-associated protein of 25 kDa
  misc_feature (36)..(246): Homolog of NCBI NO: 37589801 NR Description: Unknown (protein for MGC:73101) [Danio rerio]
  misc_feature (36)..(246): Homolog of NCBI NO: 548945 NR Description: Synaptosomal-associated protein 25B (SNAP-25B)

SEQ ID NO: 95996 - protein, 165 aa, Arabidopsis thaliana; identical to SEQ ID NO: 29604
  peptide (1)..(165): Ceres Seq. ID no. 12731470
  misc_feature (105)..(165): Pfam Name: SNARE domain Pfam Description: SNARE domain
  misc_feature (1)..(165): Homolog of NCBI NO: 15240163 NR Description: syntaxin SNAP33; protein id: At5g61210.1, by cDNA: 14562., supported by cDNA: gi_16323046 [Arabidopsis >gi|27805727|sp|Q9S7P9|SN33_ARATH SNAP25 homologous protein
  misc_feature (1)..(165): Homolog of NCBI NO: 21553460 NR Description: snap25a [Arabidopsis thaliana]
  misc_feature (1)..(165): Homolog of NCBI NO: 15222976 NR Description: synaptosomal associated protein (SNAP25A), protein id: At1g13890.1 [Arabidopsis thaliana]
  misc_feature (1)..(165): Homolog of NCBI NO: 32308074 NR Description: SNAP-34 [Hordeum vulgare subsp. vulgare]
  misc_feature (1)..(165): Homolog of NCBI NO: 15241436 NR Description: SNAP25 - like protein; protein id: At5g07880.1 thaliana] >gi|27805728|sp|Q9SD96|SN29_ARATH SNAP25 homologous
  misc_feature (1)..(164): Homolog of NCBI NO: 18765733 NR Description: synaptosomal-associated protein 25 isoform
  misc_feature (1)..(164): Homolog of NCBI NO: 6755588 NR Description: synaptosomal-associated protein;
  misc_feature (1)..(163): Homolog of NCBI NO: 27263173 NR Description: synaptosome-associated protein of 25 kDa
  misc_feature (1)..(164): Homolog of NCBI NO: 37589801 NR Description: Unknown (protein for MGC:73101) [Danio rerio]
  misc_feature (1)..(164): Homolog of NCBI NO: 548945 NR Description: Synaptosomal-associated protein 25B (SNAP-25B)

SEQ ID NO: 95997 - DNA, 1841 bp, Arabidopsis thaliana
  misc_feature (1)..(1841): Ceres Seq. ID no. 12731471
  misc_feature: MA Experiment ID: 20000182 Result: Up-regulated in Transcription
  misc_feature: MA Experiment 20000182 PARAMETER Experiment Name: At_2mM_SA_P Parameter: Age (day) Value: 14
  misc_feature: MA Experiment 20000182 PARAMETER Experiment Name: At_2mM_SA_P Parameter: Organism Value: A. thaliana
  misc_feature: MA Experiment 20000182 PARAMETER Experiment Name: At_2mM_SA_P Parameter: Plant Line Value: WS
  misc_feature: MA Experiment 20000182 PARAMETER Experiment Name: At_2mM_SA_P Parameter: Timepoint (hr) Value: 6
  misc_feature: MA Experiment 20000182 PARAMETER Experiment Name: At_2mM_SA_P Parameter: Tissue Value: Aerial
  misc_feature: MA Experiment 20000182 PARAMETER Experiment Name: At_2mM_SA_P Parameter: Treatment Value: 2mM SA vs. No Treatment
  misc_feature: MA Experiment ID: 20000185 Result: Up-regulated in Transcription
  misc_feature: MA Experiment 20000185 PARAMETER Experiment Name: At_Roots__P Parameter: Age (day) Value: 7 vs. 21
  misc_feature: MA Experiment 20000185 PARAMETER Experiment Name: At_Roots__P Parameter: Organism Value: A. thaliana
  misc_feature: MA Experiment 20000185 PARAMETER Experiment Name: At_Roots__P Parameter: Tissue Value: Roots vs. Whole Plant
  misc_feature: MA Experiment ID: 20000227 Result: Down-regulated in Transcription
  misc_feature: MA Experiment 20000227 PARAMETER Experiment Name: At_Root-Tips-vs-Tops_P Parameter: Tissue Value: Root Tips vs. Root Tops
  misc_feature: MA Experiment ID: 20000265 Result: Down-regulated in Transcription
  misc_feature: MA Experiment 20000265 PARAMETER Experiment Name: At_Open_Flower_P Parameter: Age (day) Value: 21
  misc_feature: MA Experiment 20000265 PARAMETER Experiment Name: At_Open_Flower_P Parameter: Plant Line Value: WS
  misc_feature: MA Experiment 20000265 PARAMETER Experiment Name: At_Open_Flower_P Parameter: Tissue Value: Closed Flower vs. Whole Plant
  misc_feature: MA Experiment ID: 20000439 Result: Up-regulated in Transcription
  misc_feature: MA Experiment 20000439 PARAMETER Experiment Name: At_Roots__P Parameter: Age (day) Value: 14 vs. 21
  misc_feature: MA Experiment 20000439 PARAMETER Experiment Name: At_Roots__P Parameter: Organism Value: A. thaliana
  misc_feature: MA Experiment 20000439 PARAMETER Experiment Name: At_Roots__P Parameter: Tissue Value: Roots vs. Whole Plant
  misc_feature: MA Experiment ID: 20001556 Result: Down-regulated in Transcription
  misc_feature: MA Experiment 20001556 PARAMETER Experiment Name: At_Drought_Soil_Dry_P Parameter: Age (day) Value: 26
  misc_feature: MA Experiment 20001556 PARAMETER Experiment Name: At_Drought_Soil_Dry_P Parameter: Organism Value: A. thaliana
  misc_feature: MA Experiment 20001556 PARAMETER Experiment Name: At_Drought_Soil_Dry_P Parameter: Plant Line Value: WS
  misc_feature: MA Experiment 20001556 PARAMETER Experiment Name: At_Drought_Soil_Dry_P Parameter: Post Timepoint (hr) Value: None
  misc_feature: MA Experiment 20001556 PARAMETER Experiment Name: At_Drought_Soil_Dry_P Parameter: Post-Treatment Value: None
  misc_feature: MA Experiment 20001556 PARAMETER Experiment Name: At_Drought_Soil_Dry_P Parameter: Timepoint (day) Value: 12
  misc_feature: MA Experiment 20001556 PARAMETER Experiment Name: At_Drought_Soil_Dry_P Parameter: Treatment Value: Drought vs. No Drought
  misc_feature: MA Experiment ID: 20001558 Result: Down-regulated in Transcription
  misc_feature: MA Experiment 20001558 PARAMETER Experiment Name: At_Drought_Soil_Dry_P Parameter: Age (day) Value: 27
  misc_feature: MA Experiment 20001558 PARAMETER Experiment Name: At_Drought_Soil_Dry_P Parameter: Organism Value: A. thaliana
  misc_feature: MA Experiment 20001558 PARAMETER Experiment Name: At_Drought_Soil_Dry_P Parameter: Plant Line Value: WS
  misc_feature: MA Experiment 20001558 PARAMETER Experiment Name: At_Drought_Soil_Dry_P Parameter: Post Timepoint (hr) Value: 6
  misc_feature: MA Experiment 20001558 PARAMETER Experiment Name: At_Drought_Soil_Dry_P Parameter: Post-Treatment Value: Re-Water vs. No Drought
  misc_feature: MA Experiment 20001558 PARAMETER Experiment Name: At_Drought_Soil_Dry_P Parameter: Timepoint (day) Value: 13
  misc_feature: MA Experiment 20001558 PARAMETER Experiment Name: At_Drought_Soil_Dry_P Parameter: Treatment Value: Drought vs. No Drought
  misc_feature: MA Experiment ID: 20001560 Result: Down-regulated in Transcription
  misc_feature: MA Experiment 20001560 PARAMETER Experiment Name: At_Drought_Soil_Dry_P Parameter: Age (day) Value: 28
  misc_feature: MA Experiment 20001560 PARAMETER Experiment Name: At_Drought_Soil_Dry_P Parameter: Organism Value: A. thaliana
  misc_feature: MA Experiment 20001560 PARAMETER Experiment Name: At_Drought_Soil_Dry_P Parameter: Plant Line Value: WS
  misc_feature: MA Experiment 20001560 PARAMETER Experiment Name: At_Drought_Soil_Dry_P Parameter: Post Timepoint (hr) Value: None
  misc_feature: MA Experiment 20001560 PARAMETER Experiment Name: At_Drought_Soil_Dry_P Parameter: Post-Treatment Value: None
  misc_feature: MA Experiment 20001560 PARAMETER Experiment Name: At_Drought_Soil_Dry_P Parameter: Timepoint (day) Value: 14
  misc_feature: MA Experiment 20001560 PARAMETER Experiment Name: At_Drought_Soil_Dry_P Parameter: Treatment Value: Drought vs. No Drought
  misc_feature: MA Experiment ID: 20001905 Result: Down-regulated in Transcription
  misc_feature: MA Experiment 20001905 PARAMETER Experiment Name: At_Drought_Reproduction_P Parameter: Age (day) Value: 40
  misc_feature: MA Experiment 20001905 PARAMETER Experiment Name: At_Drought_Reproduction_P Parameter: Organism Value: A. thaliana
  misc_feature: MA Experiment 20001905 PARAMETER Experiment Name: At_Drought_Reproduction_P Parameter: Plant Line Value: WS
  misc_feature: MA Experiment 20001905 PARAMETER Experiment Name: At_Drought_Reproduction_P Parameter: Timepoint (day) Value: 10
  misc_feature: MA Experiment 20001905 PARAMETER Experiment Name: At_Drought_Reproduction_P Parameter: Tissue Value: Rosettes
  misc_feature: MA Experiment 20001905 PARAMETER Experiment Name: At_Drought_Reproduction_P Parameter: Treatment Value: Drought vs. No Drought
aagttttcttaataagtttttcctctgtaatcatcatttgcttgttaagataagcagatcaaccaatcgaaagaaaccaaaatgggcttcaacgttgttgtgttcttgagttgtctgcttctacttcctcctgttacttttggtagcaacatggaacgaaccaccttggttatagacggctcacgtcgaatcgctgagaccgatgagaactttatctgcgcaacgcttgattggtggccacctgaaaaatgcaactatgatcaatgtccttggggttacgcatctctcatcaatttgaacttagcttctcctcttcttgctaaagctattcaagcttttaggacgttgaggataagaataggtggttccttgcaagatcaagtgatctacgacgttggagacttgaagactccttgcactcagttcaagaaaactgacgacggattgttcggattctctgaaggatgtttgtatatgaaacgttgggacgaagttaaccatttcttcaacgcaacgggagctattgtgactttcggtttgaacgcgctgcacgggagaaataaactcaacggaactgcgtggggaggtgattgggatcataccaacactcaggatttcatgaactacacagtctcaaagggttatgctatagactcgtgggagtttggtaatgagcttagtggaagcgggatttgggcaagcgtgagtgtagagctttatgggaaagacttgattgtactgaaaaatgtaatcaagaacgtttacaagaattctagaaccaagcctttggttgtagctccaggtggattctttgaagaacaatggtactcggagcttcttcggctctctgggcctggtgttcttgatgtcctgactcatcatatatacaatcttggtccagggaatgatcctaagctagtgaataagatactagatccaaattacttgagcggaatttcggaattattcgcgaatgtgaaccaaacaattcaagaacatggaccttgggctgctgcttgggttggagaagctggtggagcctttaacagtggtggccgtcaggtttccgagacattcattaacagtttctggtacttagatcagctcggtatttcgtcgaagcataacaccaaagtatactgcagacaagctttggtcggaggtttctacggtctgcttgaaaaggaaacgtttgttccaaatccagattactacagcgcgcttctttggcatcgtttgatgggtaaaggcattctcggcgttcagacgactgcctcggagtatctacgagcttacgttcattgctccaaaagaagagcgggtataacgattcttctgatcaatctgagtaagcacacgacgtttacagtcgcagtcagcaatggcgtgaaggtggttttgcaagcagaatcgatgaagaggaaatcgttcttggaaacaatcaagagcaaggtttcttgggttggaaacaaagcttcggacggatatttgaacagagaagagtatcacttgagtcccaaagacggtgacttgcgtagcaagataatgctcttgaatggtaaacctttggtaccgacagccaccggagatatcccaaagcttgagccggtccgtcatggtgtgaaatctccggtttatatcaatccgctgtcgatctctttcattgtgttgcctacctttgatgctcctgcttgttcttgaagaggatggtaactggtgaaaatcaaacattgaagaactactgtaaatttcttggcaattgtatatatgatcgatgtaacacatactattgtatactggaagtggtttattccaatctaaatatatataatcatttgatt

SEQ ID NO: 95998 - protein, 539 aa, Arabidopsis thaliana
  peptide (1)..(539): Ceres Seq. ID no. 12731472
  misc_feature (24)..(343): Pfam Name: Glycosyl hydrolase family 79, N-terminal domain Pfam Description: Glycosyl hydrolase family 79, N-terminal domain
  misc_feature (1)..(539): Homolog of NCBI NO: 22327999 NR Description: glycosyl hydrolase family 79 (endo-beta- protein id: At5g61250.1, supported by cDNA: gi_20466539 thaliana] >gi|20466540|gb|AAM20587.1| putative protein
  misc_feature (24)..(539): Homolog of NCBI NO: 9757846 NR Description: contains similarity to heparanase~gene_id:MFB13.2
  misc_feature (1)..(539): Homolog of NCBI NO: 10176717 NR Description: contains similarity to heparanase~gene_id:MXM12.7
  misc_feature (24)..(539): Homolog of NCBI NO: 15240869 NR Description: glycosyl hydrolase family 79 (endo-beta-
  misc_feature (9)..(538): Homolog of NCBI NO: 38174813 NR Description: putative heparanase [Hordeum vulgare subsp.
  misc_feature (19)..(435): Homolog of NCBI NO: 34393590 NR Description: putative beta-glucuronidase precursor [Oryza
  misc_feature (472)..(539): Homolog of NCBI NO: 34393590 NR Description: putative beta-glucuronidase precursor [Oryza
  misc_feature (73)..(539): Homolog of NCBI NO: 24413987 NR Description: contains ESTs
  misc_feature (8)..(81): Homolog of NCBI NO: 24413987 NR Description: contains ESTs
  misc_feature (5)..(539): Homolog of NCBI NO: 30692670 NR Description: expressed protein [Arabidopsis thaliana]
MGFNVVVFLSCLLLLPPVTFGSNMERTTLVIDGSRRIAETDENFICATLDWWPPEKCNYDQCPWGYASLINLNLASPLLAKAIQAFRTLRIRIGGSLQDQVIYDVGDLKTPCTQFKKTDDGLFGFSEGCLYMKRWDEVNHFFNATGAIVTFGLNALHGRNKLNGTAWGGDWDHTNTQDFMNYTVSKGYAIDSWEFGNELSGSGIWASVSVELYGKDLIVLKNVIKNVYKNSRTKPLVVAPGGFFEEQWYSELLRLSGPGVLDVLTHHIYNLGPGNDPKLVNKILDPNYLSGISELFANVNQTIQEHGPWAAAWVGEAGGAFNSGGRQVSETFINSFWYLDQLGISSKHNTKVYCRQALVGGFYGLLEKETFVPNPDYYSALLWHRLMGKGILGVQTTASEYLRAYVHCSKRRAGITILLINLSKHTTFTVAVSNGVKVVLQAESMKRKSFLETIKSKVSWVGNKASDGYLNREEYHLSPKDGDLRSKIMLLNGKPLVPTATGDIPKLEPVRHGVKSPVYINPLSISFIVLPTFDAPACS

SEQ ID NO: 95999 - protein, 516 aa, Arabidopsis thaliana
  peptide (1)..(516): Ceres Seq. ID no. 12731473
  misc_feature (1)..(320): Pfam Name: Glycosyl hydrolase family 79, N-terminal domain Pfam Description: Glycosyl hydrolase family 79, N-terminal domain
  misc_feature (1)..(516): Homolog of NCBI NO: 22327999 NR Description: glycosyl hydrolase family 79 (endo-beta- protein id: At5g61250.1, supported by cDNA: gi_20466539 thaliana] >gi|20466540|gb|AAM20587.1| putative protein
  misc_feature (1)..(516): Homolog of NCBI NO: 9757846 NR Description: contains similarity to heparanase~gene_id:MFB13.2
  misc_feature (1)..(516): Homolog of NCBI NO: 10176717 NR Description: contains similarity to heparanase~gene_id:MXM12.7
  misc_feature (1)..(516): Homolog of NCBI NO: 15240869 NR Description: glycosyl hydrolase family 79 (endo-beta-
  misc_feature (1)..(515): Homolog of NCBI NO: 38174813 NR Description: putative heparanase [Hordeum vulgare subsp.
  misc_feature (1)..(412): Homolog of NCBI NO: 34393590 NR Description: putative beta-glucuronidase precursor [Oryza
  misc_feature (449)..(516): Homolog of NCBI NO: 34393590 NR Description: putative beta-glucuronidase precursor [Oryza
  misc_feature (50)..(516): Homolog of NCBI NO: 24413987 NR Description: contains ESTs
  misc_feature (1)..(58): Homolog of NCBI NO: 24413987 NR Description: contains ESTs
  misc_feature (1)..(516): Homolog of NCBI NO: 30692670 NR Description: expressed protein [Arabidopsis thaliana]
MERTTLVIDGSRRIAETDENFICATLDWWPPEKCNYDQCPWGYASLINLNLASPLLAKAIQAFRTLRIRIGGSLQDQVIYDVGDLKTPCTQFKKTDDGLFGFSEGCLYMKRWDEVNHFFNATGAIVTFGLNALHGRNKLNGTAWGGDWDHTNTQDFMNYTVSKGYAIDSWEFGNELSGSGIWASVSVELYGKDLIVLKNVIKNVYKNSRTKPLVVAPGGFFEEQWYSELLRLSGPGVLDVLTHHIYNLGPGNDPKLVNKILDPNYLSGISELFANVNQTIQEHGPWAAAWVGEAGGAFNSGGRQVSETFINSFWYLDQLGISSKHNTKVYCRQALVGGFYGLLEKETFVPNPDYYSALLWHRLMGKGILGVQTTASEYLRAYVHCSKRRAGITILLINLSKHTTFTVAVSNGVKVVLQAESMKRKSFLETIKSKVSWVGNKASDGYLNREEYHLSPKDGDLRSKIMLLNGKPLVPTATGDIPKLEPVRHGVKSPVYINPLSISFIVLPTFDAPACS

SEQ ID NO: 96000 - protein, 408 aa, Arabidopsis thaliana
  peptide (1)..(408): Ceres Seq. ID no. 12731474
  misc_feature (1)..(212): Pfam Name: Glycosyl hydrolase family 79, N-terminal domain Pfam Description: Glycosyl hydrolase family 79, N-terminal domain
  misc_feature (1)..(408): Homolog of NCBI NO: 22327999 NR Description: glycosyl hydrolase family 79 (endo-beta- protein id: At5g61250.1, supported by cDNA: gi_20466539 thaliana] >gi|20466540|gb|AAM20587.1| putative protein
  misc_feature (1)..(408): Homolog of NCBI NO: 9757846 NR Description: contains similarity to heparanase~gene_id:MFB13.2
  misc_feature (1)..(408): Homolog of NCBI NO: 10176717 NR Description: contains similarity to heparanase~gene_id:MXM12.7
  misc_feature (1)..(408): Homolog of NCBI NO: 15240869 NR Description: glycosyl hydrolase family 79 (endo-beta-
  misc_feature (1)..(407): Homolog of NCBI NO: 38174813 NR Description: putative heparanase [Hordeum vulgare subsp.
  misc_feature (1)..(304): Homolog of NCBI NO: 34393590 NR Description: putative beta-glucuronidase precursor [Oryza
  misc_feature (341)..(408): Homolog of NCBI NO: 34393590 NR Description: putative beta-glucuronidase precursor [Oryza
  misc_feature (1)..(408): Homolog of NCBI NO: 24413987 NR Description: contains ESTs
  misc_feature (1)..(408): Homolog of NCBI NO: 30692670 NR Description: expressed protein [Arabidopsis thaliana]
  misc_feature (1)..(408): Homolog of NCBI NO: 10177640 NR Description: contains similarity to heparanase~gene_id:MGG23.2
MKRWDEVNHFFNATGAIVTFGLNALHGRNKLNGTAWGGDWDHTNTQDFMNYTVSKGYAIDSWEFGNELSGSGIWASVSVELYGKDLIVLKNVIKNVYKNSRTKPLVVAPGGFFEEQWYSELLRLSGPGVLDVLTHHIYNLGPGNDPKLVNKILDPNYLSGISELFANVNQTIQEHGPWAAAWVGEAGGAFNSGGRQVSETFINSFWYLDQLGISSKHNTKVYCRQALVGGFYGLLEKETFVPNPDYYSALLWHRLMGKGILGVQTTASEYLRAYVHCSKRRAGITILLINLSKHTTFTVAVSNGVKVVLQAESMKRKSFLETIKSKVSWVGNKASDGYLNREEYHLSPKDGDLRSKIMLLNGKPLVPTATGDIPKLEPVRHGVKSPVYINPLSISFIVLPTFDAPACS

SEQ ID NO: 96001 - DNA, 2529 bp, Arabidopsis thaliana
  misc_feature (1)..(2529): Ceres Seq. ID no. 12731487
  misc_feature: MA Experiment ID: 20000171 Result: Down-regulated in Transcription
  misc_feature: MA Experiment 20000171 PARAMETER Experiment Name: At_42deg_Heat_P Parameter: Age (day) Value: 14
  misc_feature: MA Experiment 20000171 PARAMETER Experiment Name: At_42deg_Heat_P Parameter: Organism Value: A. thaliana
  misc_feature: MA Experiment 20000171 PARAMETER Experiment Name: At_42deg_Heat_P Parameter: Plant Line Value: WS
  misc_feature: MA Experiment 20000171 PARAMETER Experiment Name: At_42deg_Heat_P Parameter: Temperature (deg C) Value: 42 vs. 22
  misc_feature: MA Experiment 20000171 PARAMETER Experiment Name: At_42deg_Heat_P Parameter: Timepoint (hr) Value: 1
  misc_feature: MA Experiment 20000171 PARAMETER Experiment Name: At_42deg_Heat_P Parameter: Tissue Value: Aerial
  misc_feature: MA Experiment ID: 20000182 Result: Down-regulated in Transcription
  misc_feature: MA Experiment 20000182 PARAMETER Experiment Name: At_2mM_SA_P Parameter: Age (day) Value: 14
  misc_feature: MA Experiment 20000182 PARAMETER Experiment Name: At_2mM_SA_P Parameter: Organism Value: A. thaliana
  misc_feature: MA Experiment 20000182 PARAMETER Experiment Name: At_2mM_SA_P Parameter: Plant Line Value: WS
  misc_feature: MA Experiment 20000182 PARAMETER Experiment Name: At_2mM_SA_P Parameter: Timepoint (hr) Value: 6
  misc_feature: MA Experiment 20000182 PARAMETER Experiment Name: At_2mM_SA_P Parameter: Tissue Value: Aerial
  misc_feature: MA Experiment 20000182 PARAMETER Experiment Name: At_2mM_SA_P Parameter: Treatment Value: 2mM SA vs. No Treatment
  misc_feature: MA Experiment ID: 20001247 Result: Down-regulated in Transcription
  misc_feature: MA Experiment 20001247 PARAMETER Experiment Name: At_Far-red-induction_P Parameter: Age (day) Value: 7
  misc_feature: MA Experiment 20001247 PARAMETER Experiment Name: At_Far-red-induction_P Parameter: Light Value: Far-red vs. White
  misc_feature: MA Experiment 20001247 PARAMETER Experiment Name: At_Far-red-induction_P Parameter: Organism Value: A. thaliana
  misc_feature: MA Experiment 20001247 PARAMETER Experiment Name: At_Far-red-induction_P Parameter: Plant Line Value: Columbia
  misc_feature: MA Experiment 20001247 PARAMETER Experiment Name: At_Far-red-induction_P Parameter: Timepoint (hr) Value: 1
  misc_feature: MA Experiment 20001247 PARAMETER Experiment Name: At_Far-red-induction_P Parameter: Tissue Value: Whole Plant
  misc_feature: MA Experiment ID: 20001248 Result: Down-regulated in Transcription
  misc_feature: MA Experiment 20001248 PARAMETER Experiment Name: At_Far-red-induction_P Parameter: Age (day) Value: 7
  misc_feature: MA Experiment 20001248 PARAMETER Experiment Name: At_Far-red-induction_P Parameter: Light Value: Far-red vs. White
  misc_feature: MA Experiment 20001248 PARAMETER Experiment Name: At_Far-red-induction_P Parameter: Organism Value: A. thaliana
  misc_feature: MA Experiment 20001248 PARAMETER Experiment Name: At_Far-red-induction_P Parameter: Plant Line Value: Columbia
  misc_feature: MA Experiment 20001248 PARAMETER Experiment Name: At_Far-red-induction_P Parameter: Timepoint (hr) Value: 4
  misc_feature: MA Experiment 20001248 PARAMETER Experiment Name: At_Far-red-induction_P Parameter: Tissue Value: Whole Plant
  misc_feature: MA Experiment ID: 20001450 Result: Down-regulated in Transcription
  misc_feature: MA Experiment 20001450 PARAMETER Experiment Name: At_Far-red-induction_P Parameter: Age (day) Value: 7
  misc_feature: MA Experiment 20001450 PARAMETER Experiment Name: At_Far-red-induction_P Parameter: Light Value: Far-red vs. White
  misc_feature: MA Experiment 20001450 PARAMETER Experiment Name: At_Far-red-induction_P Parameter: Organism Value: A. thaliana
  misc_feature: MA Experiment 20001450 PARAMETER Experiment Name: At_Far-red-induction_P Parameter: Plant Line Value: Columbia
  misc_feature: MA Experiment 20001450 PARAMETER Experiment Name: At_Far-red-induction_P Parameter: Timepoint (hr) Value: 8
  misc_feature: MA Experiment 20001450 PARAMETER Experiment Name: At_Far-red-induction_P Parameter: Tissue Value: Whole Plant
atgggaggagattttcgtcatttctcctcccacgtttctctcctcctcctcttccttctcatcgtcaaatccagttcttcattcactccagctgataactacctcatcgattgtggctcctccgacgaaacaaaactctccgacggtcgtaatttcaaatccgatcaacaatccgtcgcgtttcttcaaacagatgaagacatcaaaacctccgtcgactcaattccgatcaccgactctaatgccagtacccttcccttatacttaaccgctagaatcttcgccggaaaatcaacttactccttctacatttcacgacctggtcgtcactggatccgtctccatttttatcctctcaatcatcctctctacaatctaacaaactccgtcttctccgtcaccaccgacaccaccgtcctcttacacgatttctccgccggagatacttcttctatcgtcttcaaagaatatctaatctacgccgcagagaaactctctctttatttcaaaccacataaaggctccaccgcttttatcaacgccgttgaaatcgtctctgttccggacgagcttgttccggactctgcttcctctgttcctcaagctcctgatttcaaaggcttaagtagcttctctcttgagatccttcatcggataaatatcggaggagatttgatttctccgaagatagatcctctctcacgcacttggctctctgataaaccttacaatacgttccctgaaggttcgagaaatgtcactgttgatcctagtacgattacttatccagacggtggagctacggcgttgatcgctcctaatccggtttacgccaccgcggaggaaatggccgatgcacaaacctcgcaacctaatttcaatctctcatggagaatgagtgttgattttggtcatgattacttcattaggttacatttttgtgacattgtaagcaaatcgcttaacgaccttatcttcaatgttttcatcaacaagctctctgcaatctctgcacttgacctctcctcactaaccagcgctttaggtacagcgtattacgcggatttcgtgcttaatgcgtctacgatcaccaatggttcgatcttggttcaggttggtccgactccgaatcttcagtcgggtaaaccgaatgcgatacttaacggtttagagatcatgaagctgaacaatgctgctgggagtttagatggactttttggagttgatgggaaatacaaaggaccgatcggtggtatgtcatctaagaagcttgctattgcgggtattgggtttgtgatggcgctaaccgctttcttaggggttgtcgtgttgcttgttagatggcagagacgtcctaaagactggcaaaaacagaatagtttctcgtcatggttgcttcctttacacgcaagtcactcgagttacatctcgagcaaaggcgggtcaacgtcgaggcggatgagtattttcgggtcaaagaagagtaagagcaatggattctctagcttcttctcaaaccagggattaggtcggtactttccctttaccgaactacagaccgcgacacaaaattttgacgagaatgctgtgtgtggagtcggaggattcggaaaagtctacataggagaaattgatggtgggacgcaggtcgcgatcaaaagagggagtcagagttcggagcaaggaatcaacgagtttcaaacagagattcagatgttgtccaaactcagacatagacatttggtttctctaatcggattttgcgatgaaaacaaagagatgattctcgtctacgaatacatgtcaaacggtcctctgcgtgaccatctctacggctccaaagaaaatgaccctaaccctattcctaccttgtcctggaagcaacgtctagagatctgcattggatcagcgcgtggactccactatctccacacgggtgcagcgcaggggatcatccaccgcgacgtcaagaccaccaacatcctcttggacgagaacctagtcgctaaagtttctgattttggactttcaaaagatgcgcctatggatgaagggcatgtaagtaccgcggtaaagggtagtttcgggtatttagaccccgaatacttccgcagacaacaactcactgataaatccgatgtttactcattcggtgtggtgttattcgaggttctttgcgcgaggccagtgataaacccacagttacctagagaacaagttaacttagcagaatatgctatgaatttgcatagaaaaggtatgttggagaaaatcatcgacccgaaaatcgtgggaacgattagtaaaggatcgttaaggaaattcgtggaggctgcagaaaaatgtttggcagagtacggtgttgatcgaccgggaatgggagatgtgttgtggaatcttgaatatgctttgcagcttcaagaagcatcggctcaagttgatttatcggaggataagactacaatgaatattgaaatggaccttattcccggcgaggaaatgcaatctccgtcgcattcaataccgtga

SEQ ID NO: 96002 - protein, 842 aa, Arabidopsis thaliana
  peptide (1)..(842): Ceres Seq. ID no. 12731488
  misc_feature (22)..(501): Homolog of NCBI NO: 15234944 NR Description: putative receptor-like protein kinase; protein At4g39110.1 [Arabidopsis thaliana] >gi|7488247|pir||T08559
  misc_feature (488)..(842): Homolog of NCBI NO: 15234944 NR Description: putative receptor-like protein kinase; protein At4g39110.1 [Arabidopsis thaliana] >gi|7488247|pir||T08559
  misc_feature (25)..(501): Homolog of NCBI NO: 15226565 NR Description: putative protein kinase; protein id: At2g21480.1
  misc_feature (488)..(812): Homolog of NCBI NO: 15226565 NR Description: putative protein kinase; protein id: At2g21480.1
  misc_feature (21)..(842): Homolog of NCBI NO: 14488367 NR Description: putative protein kinase [Oryza sativa (japonica
  misc_feature (26)..(505): Homolog of NCBI NO: 25553554 NR Description: OSJNBa0038F22.1 [Oryza sativa (japonica
  misc_feature (471)..(810): Homolog of NCBI NO: 25553554 NR Description: OSJNBa0038F22.1 [Oryza sativa (japonica
  misc_feature (78)..(841): Homolog of NCBI NO: 15239630 NR Description: receptor-protein kinase-like protein; protein id:
  misc_feature (1)..(510): Homolog of NCBI NO: 15238498 NR Description: receptor-like protein kinase precursor - like;
  misc_feature (495)..(828): Homolog of NCBI NO: 15238498 NR Description: receptor-like protein kinase precursor - like;
MGGDFRHFSSHVSLLLLFLLIVKSSSSFTPADNYLIDCGSSDETKLSDGRNFKSDQQSVAFLQTDEDIKTSVDSIPITDSNASTLPLYLTARIFAGKSTYSFYISRPGRHWIRLHFYPLNHPLYNLTNSVFSVTTDTTVLLHDFSAGDTSSIVFKEYLIYAAEKLSLYFKPHKGSTAFINAVEIVSVPDELVPDSASSVPQAPDFKGLSSFSLEILHRINIGGDLISPKIDPLSRTWLSDKPYNTFPEGSRNVTVDPSTITYPDGGATALIAPNPVYATAEEMADAQTSQPNFNLSWRMSVDFGHDYFIRLHFCDIVSKSLNDLIFNVFINKLSAISALDLSSLTSALGTAYYADFVLNASTITNGSILVQVGPTPNLQSGKPNAILNGLEIMKLNNAAGSLDGLFGVDGKYKGPIGGMSSKKLAIAGIGFVMALTAFLGVVVLLVRWQRRPKDWQKQNSFSSWLLPLHASHSSYISSKGGSTSRRMSIFGSKKSKSNGFSSFFSNQGLGRYFPFTELQTATQNFDENAVCGVGGFGKVYIGEIDGGTQVAIKRGSQSSEQGINEFQTEIQMLSKLRHRHLVSLIGFCDENKEMILVYEYMSNGPLRDHLYGSKENDPNPIPTLSWKQRLEICIGSARGLHYLHTGAAQGIIHRDVKTTNILLDENLVAKVSDFGLSKDAPMDEGHVSTAVKGSFGYLDPEYFRRQQLTDKSDVYSFGVVLFEVLCARPVINPQLPREQVNLAEYAMNLHRKGMLEKIIDPKIVGTISKGSLRKFVEAAEKCLAEYGVDRPGMGDVLWNLEYALQLQEASAQVDLSEDKTTMNIEMDLIPGEEMQSPSHSIP

SEQ ID NO: 96003 - protein, 560 aa, Arabidopsis thaliana
  peptide (1)..(560): Ceres Seq. ID no. 12731489
  misc_feature (1)..(219): Homolog of NCBI NO: 15234944 NR Description: putative receptor-like protein kinase; protein At4g39110.1 [Arabidopsis thaliana] >gi|7488247|pir||T08559
  misc_feature (206)..(560): Homolog of NCBI NO: 15234944 NR Description: putative receptor-like protein kinase; protein At4g39110.1 [Arabidopsis thaliana] >gi|7488247|pir||T08559
  misc_feature (1)..(219): Homolog of NCBI NO: 15226565 NR Description: putative protein kinase; protein id: At2g21480.1
  misc_feature (206)..(530): Homolog of NCBI NO: 15226565 NR Description: putative protein kinase; protein id: At2g21480.1
  misc_feature (1)..(560): Homolog of NCBI NO: 14488367 NR Description: putative protein kinase [Oryza sativa (japonica
  misc_feature (1)..(223): Homolog of NCBI NO: 25553554 NR Description: OSJNBa0038F22.1 [Oryza sativa (japonica
  misc_feature (189)..(528): Homolog of NCBI NO: 25553554 NR Description: OSJNBa0038F22.1 [Oryza sativa (japonica
  misc_feature (1)..(559): Homolog of NCBI NO: 15239630 NR Description: receptor-protein kinase-like protein; protein id:
  misc_feature (1)..(228): Homolog of NCBI NO: 15238498 NR Description: receptor-like protein kinase precursor - like;
  misc_feature (213)..(546): Homolog of NCBI NO: 15238498 NR Description: receptor-like protein kinase precursor - like;
MADAQTSQPNFNLSWRMSVDFGHDYFIRLHFCDIVSKSLNDLIFNVFINKLSAISALDLSSLTSALGTAYYADFVLNASTITNGSILVQVGPTPNLQSGKPNAILNGLEIMKLNNAAGSLDGLFGVDGKYKGPIGGMSSKKLAIAGIGFVMALTAFLGVVVLLVRWQRRPKDWQKQNSFSSWLLPLHASHSSYISSKGGSTSRRMSIFGSKKSKSNGFSSFFSNQGLGRYFPFTELQTATQNFDENAVCGVGGFGKVYIGEIDGGTQVAIKRGSQSSEQGINEFQTEIQMLSKLRHRHLVSLIGFCDENKEMILVYEYMSNGPLRDHLYGSKENDPNPIPTLSWKQRLEICIGSARGLHYLHTGAAQGIIHRDVKTTNILLDENLVAKVSDFGLSKDAPMDEGHVSTAVKGSFGYLDPEYFRRQQLTDKSDVYSFGVVLFEVLCARPVINPQLPREQVNLAEYAMNLHRKGMLEKIIDPKIVGTISKGSLRKFVEAAEKCLAEYGVDRPGMGDVLWNLEYALQLQEASAQVDLSEDKTTMNIEMDLIPGEEMQSPSHSIP

SEQ ID NO: 96004 - protein, 544 aa, Arabidopsis thaliana
  peptide (1)..(544): Ceres Seq. ID no. 12731490
  misc_feature (1)..(203): Homolog of NCBI NO: 15234944 NR Description: putative receptor-like protein kinase; protein At4g39110.1 [Arabidopsis thaliana] >gi|7488247|pir||T08559
  misc_feature (190)..(544): Homolog of NCBI NO: 15234944 NR Description: putative receptor-like protein kinase; protein At4g39110.1 [Arabidopsis thaliana] >gi|7488247|pir||T08559
  misc_feature (1)..(203): Homolog of NCBI NO: 15226565 NR Description: putative protein kinase; protein id: At2g21480.1
  misc_feature (190)..(514): Homolog of NCBI NO: 15226565 NR Description: putative protein kinase; protein id: At2g21480.1
  misc_feature (1)..(544): Homolog of NCBI NO: 14488367 NR Description: putative protein kinase [Oryza sativa (japonica
  misc_feature (1)..(207): Homolog of NCBI NO: 25553554 NR Description: OSJNBa0038F22.1 [Oryza sativa (japonica
  misc_feature (173)..(512): Homolog of NCBI NO: 25553554 NR Description: OSJNBa0038F22.1 [Oryza sativa (japonica
  misc_feature (1)..(543): Homolog of NCBI NO: 15239630 NR Description: receptor-protein kinase-like protein; protein id:
  misc_feature (1)..(212): Homolog of NCBI NO: 15238498 NR Description: receptor-like protein kinase precursor - like;
  misc_feature (197)..(530): Homolog of NCBI NO: 15238498 NR Description: receptor-like protein kinase precursor - like;
MSVDFGHDYFIRLHFCDIVSKSLNDLIFNVFINKLSAISALDLSSLTSALGTAYYADFVLNASTITNGSILVQVGPTPNLQSGKPNAILNGLEIMKLNNAAGSLDGLFGVDGKYKGPIGGMSSKKLAIAGIGFVMALTAFLGVVVLLVRWQRRPKDWQKQNSFSSWLLPLHASHSSYISSKGGSTSRRMSIFGSKKSKSNGFSSFFSNQGLGRYFPFTELQTATQNFDENAVCGVGGFGKVYIGEIDGGTQVAIKRGSQSSEQGINEFQTEIQMLSKLRHRHLVSLIGFCDENKEMILVYEYMSNGPLRDHLYGSKENDPNPIPTLSWKQRLEICIGSARGLHYLHTGAAQGIIHRDVKTTNILLDENLVAKVSDFGLSKDAPMDEGHVSTAVKGSFGYLDPEYFRRQQLTDKSDVYSFGVVLFEVLCARPVINPQLPREQVNLAEYAMNLHRKGMLEKIIDPKIVGTISKGSLRKFVEAAEKCLAEYGVDRPGMGDVLWNLEYALQLQEASAQVDLSEDKTTMNIEMDLIPGEEMQSPSHSIP

SEQ ID NO: 96005 - DNA, 1488 bp, Arabidopsis thaliana
  misc_feature (1)..(1488): Ceres Seq. ID no. 12731491
  misc_feature: MA Experiment ID: 20000307 Result: Down-regulated in Transcription
  misc_feature: MA Experiment 20000307 PARAMETER Experiment Name: At_Germinating_Seeds_Sub_P Parameter: Age (hr) Value: 24 vs. 0
  misc_feature: MA Experiment 20000307 PARAMETER Experiment Name: At_Germinating_Seeds_Sub_P Parameter: Organism Value: A. thaliana
  misc_feature: MA Experiment 20000307 PARAMETER Experiment Name: At_Germinating_Seeds_Sub_P Parameter: Plant Line Value: WS
  misc_feature: MA Experiment 20000307 PARAMETER Experiment Name: At_Germinating_Seeds_Sub_P Parameter: Tissue Value: Germinating Seeds
  misc_feature: MA Experiment ID: 20000328 Result: Up-regulated in Transcription
  misc_feature: MA Experiment 20000328 PARAMETER Experiment Name: At_42deg_Heat_Sub_P Parameter: Age (day) Value: 14
  misc_feature: MA Experiment 20000328 PARAMETER Experiment Name: At_42deg_Heat_Sub_P Parameter: Organism Value: A. thaliana
  misc_feature: MA Experiment 20000328 PARAMETER Experiment Name: At_42deg_Heat_Sub_P Parameter: Plant Line Value: WS
  misc_feature: MA Experiment 20000328 PARAMETER Experiment Name: At_42deg_Heat_Sub_P Parameter: Temperature (deg C) Value: 42 vs. 22
  misc_feature: MA Experiment 20000328 PARAMETER Experiment Name: At_42deg_Heat_Sub_P Parameter: Timepoint (hr) Value: 6
  misc_feature: MA Experiment 20000328 PARAMETER Experiment Name: At_42deg_Heat_Sub_P Parameter: Tissue Value: Aerial
  misc_feature: MA Experiment ID: 20000347 Result: Up-regulated in Transcription
  misc_feature: MA Experiment 20000347 PARAMETER Experiment Name: At_2mM_SA_Sub_P Parameter: Age (day) Value: 14
  misc_feature: MA Experiment 20000347 PARAMETER Experiment Name: At_2mM_SA_Sub_P Parameter: Organism Value: A. thaliana
  misc_feature: MA Experiment 20000347 PARAMETER Experiment Name: At_2mM_SA_Sub_P Parameter: Plant Line Value: WS
  misc_feature: MA Experiment 20000347 PARAMETER Experiment Name: At_2mM_SA_Sub_P Parameter: Timepoint (hr) Value: 6
  misc_feature: MA Experiment 20000347 PARAMETER Experiment Name: At_2mM_SA_Sub_P Parameter: Tissue Value: Aerial
  misc_feature: MA Experiment 20000347 PARAMETER Experiment Name: At_2mM_SA_Sub_P Parameter: Treatment Value: 2mM SA vs. No Treatment
atggttggtctaactccagctgaggatcgttcagagattgcctttttcgacgtcgagacgacaattccgttccgagttggtcaggggtacgcgattctggagtttggatcgattctggtttgccccaagaagcttgtggagctgaaaaactactctgttctggttcgtcctgctaatctcaacctcatcacgcctcggtccgtgaagtgcaacggcatcaaacgcgaagacgtcgaatcagctcttacctttgcagatatcgccgacaccgtctacgatattctccatggaaggatatgggcaggtcataacatattgaagttcgattgtccaaggataagagaagcatttgctgagattggacgagatccaccagagccaaagggcaccattgactccttggctttgcttactcaaaggtttgggagaagagctggtgatatgaagatggcgactttggctacatactttggacttggaaaccagacgcataggagtctggacgatgtaaggatgaacttcgaggttctcaagtattgtgccactgttttgttcttggagctaattcagaaacatgccatttttcaacaggagtcaagtcttccagatgaacttatagagaactcggttactactactactcctgaaactagttcaagaaggcgtaggactataaaaaaatctcctctgcaatctcccactgatcagcagacaggagagaacatgacaactatacctattttatcatttgtttcatccgcagaagctcaaacggatccatttgatatgagcactttgaggaacgaaatagcccctgaagttcttcaatcagatgttcccatggaagaagaacaaaatcagcagtctgagactgttgcctctgaaggtaccggtgaccaggaaggattcatggagctagataaaatatctgtttcaagtatcagagcaactcatgtcccgctatatgacgggagccaaacaatgaagctgcaactcttccttggggacagaccccttcagctccattgtcctcgtctgaaagtacggtttggaatcaatgggaaatttatggataaagctggaagacggaggttgaactttgtaattgatctgtatccaagtctctgcaacgtacttcaagaatgcgacagtgctgcacagacaatatctgttgattcaggcagtggttctgactggaaccctctagtcattccaatgaaaggatttctgaactgtcccactgcaaggatacatatacccacagagttaaatggagatatagatcggtacgcagctgagatacaccagaaagagttctctggagctactgctactcagaaactcatttctagcaaccccaaggctgaagagattgagtctttgttgaatccgagaactgttcttgacgctttcttgtctctggagccatatgattatcagcagagagccggaatccgtctagttgctagaaagcttgttatacattag

SEQ ID NO: 96006 - protein, 495 aa, Arabidopsis thaliana
  peptide (1)..(495): Ceres Seq. ID no. 12731492
  misc_feature (1)..(495): Homolog of NCBI NO: 9757860 NR Description: exonuclease-like protein [Arabidopsis thaliana]
  misc_feature (1)..(495): Homolog of NCBI NO: 30697522 NR Description: exonuclease protein family [Arabidopsis thaliana]
  misc_feature (186)..(494): Homolog of NCBI NO: 15240840 NR Description: exonuclease-like protein; protein id: At5g07710.1
  misc_feature (8)..(223): Homolog of NCBI NO: 15240840 NR Description: exonuclease-like protein; protein id: At5g07710.1
  misc_feature (8)..(494): Homolog of NCBI NO: 15221225 NR Description: putative exonuclease; protein id: At1g74390.1, by cDNA: gi_20466501 [Arabidopsis thaliana]
  misc_feature (306)..(495): Homolog of NCBI NO: 37534220 NR Description: putative exonuclease [Oryza sativa (japonica group)] >gi|15451562|gb|AAK98686.1| Putative exonuclease [Oryza >gi|31432000|gb|AAP53699.1| putative exonuclease [Oryza sativa
  misc_feature (8)..(187): Homolog of NCBI NO: 37534220 NR Description: putative exonuclease [Oryza sativa (japonica group)] >gi|15451562|gb|AAK98686.1| Putative exonuclease [Oryza >gi|31432000|gb|AAP53699.1| putative exonuclease [Oryza sativa
  misc_feature (3)..(258): Homolog of NCBI NO: 37534222 NR Description: putative exonuclease [Oryza sativa (japonica group)] >gi|15451563|gb|AAK98687.1| Putative exonuclease [Oryza >gi|31432001|gb|AAP53700.1| putative exonuclease [Oryza sativa
  misc_feature (11)..(225): Homolog of NCBI NO: 15236050 NR Description: hypothetical protein; protein id: At4g39810.1
  misc_feature (10)..(246): Homolog of NCBI NO: 9945064 NR Description: similar to Arabidopsis chromosome BAC genomics
MVGLTPAEDRSEIAFFDVETTIPFRVGQGYAILEFGSILVCPKKLVELKNYSVLVRPANLNLITPRSVKCNGIKREDVESALTFADIADTVYDILHGRIWAGHNILKFDCPRIREAFAEIGRDPPEPKGTIDSLALLTQRFGRRAGDMKMATLATYFGLGNQTHRSLDDVRMNFEVLKYCATVLFLELIQKHAIFQQESSLPDELIENSVTTTTPETSSRRRRTIKKSPLQSPTDQQTGENMTTIPILSFVSSAEAQTDPFDMSTLRNEIAPEVLQSDVPMEEEQNQQSETVASEGTGDQEGFMELDKISVSSIRATHVPLYDGSQTMKLQLFLGDRPLQLHCPRLKVRFGINGKFMDKAGRRRLNFVIDLYPSLCNVLQECDSAAQTISVDSGSGSDWNPLVIPMKGFLNCPTARIHIPTELNGDIDRYAAEIHQKEFSGATATQKLISSNPKAEEIESLLNPRTVLDAFLSLEPYDYQQRAGIRLVARKLVIH

SEQ ID NO: 96007 - protein, 348 aa, Arabidopsis thaliana
  peptide (1)..(348): Ceres Seq. ID no. 12731493
  misc_feature (1)..(348): Homolog of NCBI NO: 9757860 NR Description: exonuclease-like protein [Arabidopsis thaliana]
  misc_feature (1)..(348): Homolog of NCBI NO: 30697522 NR Description: exonuclease protein family [Arabidopsis thaliana]
  misc_feature (39)..(347): Homolog of NCBI NO: 15240840 NR Description: exonuclease-like protein; protein id: At5g07710.1
  misc_feature (1)..(76): Homolog of NCBI NO: 15240840 NR Description: exonuclease-like protein; protein id: At5g07710.1
  misc_feature (1)..(347): Homolog of NCBI NO: 15221225 NR Description: putative exonuclease; protein id: At1g74390.1, by cDNA: gi_20466501 [Arabidopsis thaliana]
  misc_feature (159)..(348): Homolog of NCBI NO: 37534220 NR Description: putative exonuclease [Oryza sativa (japonica group)] >gi|15451562|gb|AAK98686.1| Putative exonuclease [Oryza >gi|31432000|gb|AAP53699.1| putative exonuclease [Oryza sativa
  misc_feature (1)..(40): Homolog of NCBI NO: 37534220 NR Description: putative exonuclease [Oryza sativa (japonica group)] >gi|15451562|gb|AAK98686.1| Putative exonuclease [Oryza >gi|31432000|gb|AAP53699.1| putative exonuclease [Oryza sativa
  misc_feature (1)..(111): Homolog of NCBI NO: 37534222 NR Description: putative exonuclease [Oryza sativa (japonica group)] >gi|15451563|gb|AAK98687.1| Putative exonuclease [Oryza >gi|31432001|gb|AAP53700.1| putative exonuclease [Oryza sativa
  misc_feature (1)..(78): Homolog of NCBI NO: 15236050 NR Description: hypothetical protein; protein id: At4g39810.1
  misc_feature (1)..(99): Homolog of NCBI NO: 9945064 NR Description: similar to Arabidopsis chromosome BAC genomics
MKMATLATYFGLGNQTHRSLDDVRMNFEVLKYCATVLFLELIQKHAIFQQESSLPDELIENSVTTTTPETSSRRRRTIKKSPLQSPTDQQTGENMTTIPILSFVSSAEAQTDPFDMSTLRNEIAPEVLQSDVPMEEEQNQQSETVASEGTGDQEGFMELDKISVSSIRATHVPLYDGSQTMKLQLFLGDRPLQLHCPRLKVRFGINGKFMDKAGRRRLNFVIDLYPSLCNVLQECDSAAQTISVDSGSGSDWNPLVIPMKGFLNCPTARIHIPTELNGDIDRYAAEIHQKEFSGATATQKLISSNPKAEEIESLLNPRTVLDAFLSLEPYDYQQRAGIRLVARKLVIH

SEQ ID NO: 96008 - protein, 346 aa, Arabidopsis thaliana
  peptide (1)..(346): Ceres Seq. ID no. 12731494
  misc_feature (1)..(346): Homolog of NCBI NO: 9757860 NR Description: exonuclease-like protein [Arabidopsis thaliana]
  misc_feature (1)..(346): Homolog of NCBI NO: 30697522 NR Description: exonuclease protein family [Arabidopsis thaliana]
  misc_feature (37)..(345): Homolog of NCBI NO: 15240840 NR Description: exonuclease-like protein; protein id: At5g07710.1
  misc_feature (1)..(74): Homolog of NCBI NO: 15240840 NR Description: exonuclease-like protein; protein id: At5g07710.1
  misc_feature (1)..(345): Homolog of NCBI NO: 15221225 NR Description: putative exonuclease; protein id: At1g74390.1, by cDNA: gi_20466501 [Arabidopsis thaliana]
  misc_feature (157)..(346): Homolog of NCBI NO: 37534220 NR Description: putative exonuclease [Oryza sativa (japonica group)] >gi|15451562|gb|AAK98686.1| Putative exonuclease [Oryza >gi|31432000|gb|AAP53699.1| putative exonuclease [Oryza sativa
  misc_feature (1)..(38): Homolog of NCBI NO: 37534220 NR Description: putative exonuclease [Oryza sativa (japonica group)] >gi|15451562|gb|AAK98686.1| Putative exonuclease [Oryza >gi|31432000|gb|AAP53699.1| putative exonuclease [Oryza sativa
  misc_feature (1)..(109): Homolog of NCBI NO: 37534222 NR Description: putative exonuclease [Oryza sativa (japonica group)] >gi|15451563|gb|AAK98687.1| Putative exonuclease [Oryza >gi|31432001|gb|AAP53700.1| putative exonuclease [Oryza sativa
  misc_feature (1)..(76): Homolog of NCBI NO: 15236050 NR Description: hypothetical protein; protein id: At4g39810.1
  misc_feature (1)..(97): Homolog of NCBI NO: 9945064 NR Description: similar to Arabidopsis chromosome BAC genomics
MATLATYFGLGNQTHRSLDDVRMNFEVLKYCATVLFLELIQKHAIFQQESSLPDELIENSVTTTTPETSSRRRRTIKKSPLQSPTDQQTGENMTTIPILSFVSSAEAQTDPFDMSTLRNEIAPEVLQSDVPMEEEQNQQSETVASEGTGDQEGFMELDKISVSSIRATHVPLYDGSQTMKLQLFLGDRPLQLHCPRLKVRFGINGKFMDKAGRRRLNFVIDLYPSLCNVLQECDSAAQTISVDSGSGSDWNPLVIPMKGFLNCPTARIHIPTELNGDIDRYAAEIHQKEFSGATATQKLISSNPKAEEIESLLNPRTVLDAFLSLEPYDYQQRAGIRLVARKLVIH

SEQ ID NO: 96009 - DNA, 3126 bp, Arabidopsis thaliana
  misc_feature (1)..(3126): Ceres Seq. ID no. 12731511
  misc_feature: MA Experiment ID: 20000180 Result: Up-regulated in Transcription
  misc_feature: MA Experiment 20000180 PARAMETER Experiment Name: At_Germinating_Seeds_P Parameter: Age (hr) Value: 24 vs. 0
  misc_feature: MA Experiment 20000180 PARAMETER Experiment Name: At_Germinating_Seeds_P Parameter: Tissue Value: Germinating Seeds
  misc_feature: MA Experiment ID: 20000227 Result: Down-regulated in Transcription
  misc_feature: MA Experiment 20000227 PARAMETER Experiment Name: At_Root-Tips-vs-Tops_P Parameter: Tissue Value: Root Tips vs. Root Tops
  misc_feature: MA Experiment ID: 20000235 Result: Up-regulated in Transcription
  misc_feature: MA Experiment 20000235 PARAMETER Experiment Name: At_Siliques_P Parameter: Age (day) Value: 21
  misc_feature: MA Experiment 20000235 PARAMETER Experiment Name: At_Siliques_P Parameter: Organism Value: A. thaliana
  misc_feature: MA Experiment 20000235 PARAMETER Experiment Name: At_Siliques_P Parameter: Plant Line Value: WS
  misc_feature: MA Experiment 20000235 PARAMETER Experiment Name: At_Siliques_P Parameter: Tissue Value: 5-10mm Siliques vs. Whole Plant
  misc_feature: MA Experiment ID: 20000495 Result: Up-regulated in Transcription
  misc_feature: MA Experiment 20000495 PARAMETER Experiment Name: At_Guard_Cells_P Parameter: Harvest Date Value: 8/2/2002
  misc_feature: MA Experiment 20000495 PARAMETER Experiment Name: At_Guard_Cells_P Parameter: Organism Value: A. thaliana
  misc_feature: MA Experiment 20000495 PARAMETER Experiment Name: At_Guard_Cells_P Parameter: Tissue Value: Guard Cells vs. Leaves
  misc_feature: MA Experiment ID: 20001451 Result: Down-regulated in Transcription
  misc_feature: MA Experiment 20001451 PARAMETER Experiment Name: At_Far-red-induction_P Parameter: Age (day) Value: 7
  misc_feature: MA Experiment 20001451 PARAMETER Experiment Name: At_Far-red-induction_P Parameter: Light Value: Far-red vs. White
  misc_feature: MA Experiment 20001451 PARAMETER Experiment Name: At_Far-red-induction_P Parameter: Organism Value: A. thaliana
  misc_feature: MA Experiment 20001451 PARAMETER Experiment Name: At_Far-red-induction_P Parameter: Plant Line Value: Columbia
  misc_feature: MA Experiment 20001451 PARAMETER Experiment Name: At_Far-red-induction_P Parameter: Timepoint (hr) Value: 24
  misc_feature: MA Experiment 20001451 PARAMETER Experiment Name: At_Far-red-induction_P Parameter: Tissue Value: Whole Plant
  misc_feature: MA Experiment ID: 20001556 Result: Down-regulated in Transcription
  misc_feature: MA Experiment 20001556 PARAMETER Experiment Name: At_Drought_Soil_Dry_P Parameter: Age (day) Value: 26
  misc_feature: MA Experiment 20001556 PARAMETER Experiment Name: At_Drought_Soil_Dry_P Parameter: Organism Value: A. thaliana
  misc_feature: MA Experiment 20001556 PARAMETER Experiment Name: At_Drought_Soil_Dry_P Parameter: Plant Line Value: WS
  misc_feature: MA Experiment 20001556 PARAMETER Experiment Name: At_Drought_Soil_Dry_P Parameter: Post Timepoint (hr) Value: None
  misc_feature: MA Experiment 20001556 PARAMETER Experiment Name: At_Drought_Soil_Dry_P Parameter: Post-Treatment Value: None
  misc_feature: MA Experiment 20001556 PARAMETER Experiment Name: At_Drought_Soil_Dry_P Parameter: Timepoint (day) Value: 12
  misc_feature: MA Experiment 20001556 PARAMETER Experiment Name: At_Drought_Soil_Dry_P Parameter: Treatment Value: Drought vs. No Drought
  misc_feature: MA Experiment ID: 20001905 Result: Down-regulated in Transcription
  misc_feature: MA Experiment 20001905 PARAMETER Experiment Name: At_Drought_Reproduction_P Parameter: Age (day) Value: 40
  misc_feature: MA Experiment 20001905 PARAMETER Experiment Name: At_Drought_Reproduction_P Parameter: Organism Value: A. thaliana
  misc_feature: MA Experiment 20001905 PARAMETER Experiment Name: At_Drought_Reproduction_P Parameter: Plant Line Value: WS
  misc_feature: MA Experiment 20001905 PARAMETER Experiment Name: At_Drought_Reproduction_P Parameter: Timepoint (day) Value: 10
  misc_feature: MA Experiment 20001905 PARAMETER Experiment Name: At_Drought_Reproduction_P Parameter: Tissue Value: Rosettes
  misc_feature: MA Experiment 20001905 PARAMETER Experiment Name: At_Drought_Reproduction_P Parameter: Treatment Value: Drought vs. No Drought
  misc_feature: MA Experiment ID: 20001906 Result: Down-regulated in Transcription
  misc_feature: MA Experiment 20001906 PARAMETER Experiment Name: At_Drought_Reproduction_P Parameter: Age (day) Value: 35
  misc_feature: MA Experiment 20001906 PARAMETER Experiment Name: At_Drought_Reproduction_P Parameter: Organism Value: A. thaliana
  misc_feature: MA Experiment 20001906 PARAMETER Experiment Name: At_Drought_Reproduction_P Parameter: Plant Line Value: WS
  misc_feature: MA Experiment 20001906 PARAMETER Experiment Name: At_Drought_Reproduction_P Parameter: Timepoint (day) Value: 5
  misc_feature: MA Experiment 20001906 PARAMETER Experiment Name: At_Drought_Reproduction_P Parameter: Tissue Value: Siliques
  misc_feature: MA Experiment 20001906 PARAMETER Experiment Name: At_Drought_Reproduction_P Parameter: Treatment Value: Drought vs. No Drought
  misc_feature: MA Experiment ID: 20001908 Result: Down-regulated in Transcription
  misc_feature: MA Experiment 20001908 PARAMETER Experiment Name: At_Drought_Reproduction_P Parameter: Age (day) Value: 40
  misc_feature: MA Experiment 20001908 PARAMETER Experiment Name: At_Drought_Reproduction_P Parameter: Organism Value: A. thaliana
  misc_feature: MA Experiment 20001908 PARAMETER Experiment Name: At_Drought_Reproduction_P Parameter: Plant Line Value: WS
  misc_feature: MA Experiment 20001908 PARAMETER Experiment Name: At_Drought_Reproduction_P Parameter: Timepoint (day) Value: 10
  misc_feature: MA Experiment 20001908 PARAMETER Experiment Name: At_Drought_Reproduction_P Parameter: Tissue Value: Siliques
  misc_feature: MA Experiment 20001908 PARAMETER Experiment Name: At_Drought_Reproduction_P Parameter: Treatment Value: Drought vs. No Drought
  misc_feature: MA Experiment ID: 20001911 Result: Down-regulated in Transcription
  misc_feature: MA Experiment 20001911 PARAMETER Experiment Name: At_Drought_Reproduction_P Parameter: Age (day) Value: 40
  misc_feature: MA Experiment 20001911 PARAMETER Experiment Name: At_Drought_Reproduction_P Parameter: Organism Value: A. thaliana
  misc_feature: MA Experiment 20001911 PARAMETER Experiment Name: At_Drought_Reproduction_P Parameter: Plant Line Value: WS
  misc_feature: MA Experiment 20001911 PARAMETER Experiment Name: At_Drought_Reproduction_P Parameter: Timepoint (day) Value: 10
  misc_feature: MA Experiment 20001911 PARAMETER Experiment Name: At_Drought_Reproduction_P Parameter: Tissue Value: Flowers
  misc_feature: MA Experiment 20001911 PARAMETER Experiment Name: At_Drought_Reproduction_P Parameter: Treatment Value: Drought vs. No Drought
atgaaaaagaagaacatttctccttctcttgttcttcatccccttctccttcttctacttcctttctttgctttcaattccttagctctcaagttttcacctcaactcttgtctctcctttcccttaaaacatctctctctggccctccctctgcctttcaagactggaaagtccccgttaacggtcaaaacgacgccgtttggtgttcttggtccggtgtagtctgtgataatgtaacggctcaagtcatttccctcgacctctctcaccggaacctctctggtcgtattcctatacagattcgttacttgtcgagcttactctacttaaatctcagtgggaattctttggaaggttcgtttccaacttctatctttgatctcaccaagctcactaccctcgacatcagccgtaactcgttcgactcgagttttcctcccggaatctccaagcttaagttcttaaaagtcttcaatgcgttcagcaacaacttcgaaggtctattacctagtgacgtgtctcgtcttcgtttcttggaagagcttaactttggtggaagttactttgaaggagagattccagcagcttacggtggtttacagagattgaagtttattcatttagctggaaatgtcctcggaggtaaactacctcctagattaggactcttaacagagctccaacacatggaaatcggttataatcacttcaacggaaacataccttcggagtttgccttactctcaaatctcaagtactttgacgtttccaattgcagcctctctggttctctgcctcaagaactcgggaatctctcaaacctagagactttatttctattccaaaacggtttcaccggtgaaatcccagagagttatagcaacttgaaatccctcaagcttctcgatttttcgagtaatcagctttctggtagtatcccatcaggcttctcgaccttgaagaacctcacatggctaagcttaatcagcaataacctctcaggtgaagtacctgaaggaatcggtgaactccctgagcttactacattgtttctatggaacaataacttcaccggagttttgccacacaagcttggatcaaacggtaaacttgagacaatggacgtctctaacaattcattcaccggaacaatcccttcttctctctgccatggaaacaagctatacaaactcatcctcttctccaacatgtttgaaggtgagctaccaaagagcttgactcgttgcgaatctctatggcggtttcggagtcaaaacaatcgattaaacggcacaattccgatcggattcggctctctacgtaacctcactttcgttgatttaagcaacaacagattcaccgatcaaattccggcggatttcgccaccgctcctgttcttcagtacttgaatctctcaaccaatttcttccacaggaaactaccggaaaacatatggaaagctccgaatctacagatcttctcagcgagtttcagcaatttgatcggtgaaatcccaaattacgttggatgcaaaagcttctacaggattgaactacaaggaaactcactcaacggaacgattccatgggacatcggacattgcgagaagcttctctgtttgaatctcagccaaaatcatctcaacggaatcattccatgggagatttcaactcttccgtcaatcgccgacgtagatctttctcataatctcttaaccggaacaatcccttccgatttcggaagctctaagacgatcacaaccttcaacgtttcgtataatcagctaatcggtccgattccaagtggttctttcgctcatctgaatccgtcgttcttctcctcaaacgaaggactctgtggagatctcgtcggaaaaccttgcaattctgataggtttaacgccggaaatgcagatatagacggtcatcataaagaggaacgacctaagaaaacagccggagctattgtttggatattggcggcggcgattggggttggattcttcgtccttgtagccgccactagatgcttccagaaaagctacggaaacagagtcgacggtggtggaagaaacggcggagatataggaccgtggaagctaacggcttttcagagactaaacttcacggcggatgatgtggttgagtgtctctcaaagactgataacatcctcggaatgggatcaacaggaacagtgtacaaagcagagatgcctaatggagaaataatcgccgtgaaaaaactttggggaaaaaacaaagagaacggcaaaatccggcggcggaagagcggcgtattggcggaggttgatgttctagggaacgtacgtcaccggaacatcgttcgtctccttggatgttgcacgaatcgagattgcacgatgcttttatacgaatacatgcctaatggaagcttagacgatcttcttcacggtggggataagacgatgaccgcggcggcggaatggacggctttgtatcagatcgcgattggagtggctcaagggatctgttatctccaccatgattgtgatccggtgattgtacaccgtgacctgaaacctagcaatatcctcctcgacgccgatttcgaggcgcgtgtggcggacttcggcgtcgcgaagcttattcaaaccgacgaatccatgtccgtcgtcgccggttcgtacggttacattgcaccagaatatgcttacactttacaagtggataaaaagagtgatatctatagctatggagtgattttattagagataatcaccggaaaaagatcggtggaaccggaatttggagaaggtaacagtatcgtggattgggttagatcaaagttgaagacgaaagaagatgtagaagaagttctagacaaaagcatgggtaggtcgtgtagtcttataagagaagagatgaaacaaatgttgagaattgcgttgttgtgtacaagccggagtccgacagacagaccgccgatgagagatgtgttgttgattcttcaagaggcaaagccaaagaggaagacagtaggggataatgtgatcgtcgttggtgatgttaatgatgtcaatttcgaagatgtttgtagtgttgatgttggtcatgatgttaaatgtcaaaggattggggtgtga

SEQ ID NO: 96010 - protein, 1041 aa, Arabidopsis thaliana
  peptide (1)..(1041): Ceres Seq. ID no. 12731512
  misc_feature (35)..(1006): Homolog of NCBI NO: 15235387 NR Description: leucine-rich repeat transmembrane protein kinase, protein id: At4g28650.1 [Arabidopsis thaliana]
  misc_feature (13)..(1006): Homolog of NCBI NO: 27497207 NR Description: Hypothetical protein [Oryza sativa (japonica
  misc_feature (19)..(1017): Homolog of NCBI NO: 15223264 NR Description: CLAVATA1 receptor kinase( CLV1); protein id:
  misc_feature (10)..(1001): Homolog of NCBI NO: 15235366 NR Description: leucine-rich repeat transmembrane protein kinase, protein id: At4g20270.1 [Arabidopsis thaliana]
  misc_feature (19)..(620): Homolog of NCBI NO: 24940244 NR Description: serine-threonine protein kinase [Pisum sativum]
  misc_feature (699)..(1012): Homolog of NCBI NO: 24940244 NR Description: serine-threonine protein kinase [Pisum sativum]
  misc_feature (15)..(999): Homolog of NCBI NO: 3641252 NR Description: leucine-rich receptor-like protein kinase [Malus
  misc_feature (64)..(999): Homolog of NCBI NO: 15218660 NR Description: leucine-rich repeat transmembrane protein kinase, protein id: At1g28440.1, supported by cDNA: gi_20260671
  misc_feature (86)..(1001): Homolog of NCBI NO: 12054894 NR Description: receptor protein kinase [Pinus sylvestris]
  misc_feature (25)..(553): Homolog of NCBI NO: 15242059 NR Description: leucine-rich repeat transmembrane protein kinase, protein id: At5g51350.1 [Arabidopsis thaliana]
MKKKNISPSLVLHPLLLLLLPFFAFNSLALKFSPQLLSLLSLKTSLSGPPSAFQDWKVPVNGQNDAVWCSWSGVVCDNVTAQVISLDLSHRNLSGRIPIQIRYLSSLLYLNLSGNSLEGSFPTSIFDLTKLTTLDISRNSFDSSFPPGISKLKFLKVFNAFSNNFEGLLPSDVSRLRFLEELNFGGSYFEGEIPAAYGGLQRLKFIHLAGNVLGGKLPPRLGLLTELQHMEIGYNHFNGNIPSEFALLSNLKYFDVSNCSLSGSLPQELGNLSNLETLFLFQNGFTGEIPESYSNLKSLKLLDFSSNQLSGSIPSGFSTLKNLTWLSLISNNLSGEVPEGIGELPELTTLFLWNNNFTGVLPHKLGSNGKLETMDVSNNSFTGTIPSSLCHGNKLYKLILFSNMFEGELPKSLTRCESLWRFRSQNNRLNGTIPIGFGSLRNLTFVDLSNNRFTDQIPADFATAPVLQYLNLSTNFFHRKLPENIWKAPNLQIFSASFSNLIGEIPNYVGCKSFYRIELQGNSLNGTIPWDIGHCEKLLCLNLSQNHLNGIIPWEISTLPSIADVDLSHNLLTGTIPSDFGSSKTITTFNVSYNQLIGPIPSGSFAHLNPSFFSSNEGLCGDLVGKPCNSDRFNAGNADIDGHHKEERPKKTAGAIVWILAAAIGVGFFVLVAATRCFQKSYGNRVDGGGRNGGDIGPWKLTAFQRLNFTADDVVECLSKTDNILGMGSTGTVYKAEMPNGEIIAVKKLWGKNKENGKIRRRKSGVLAEVDVLGNVRHRNIVRLLGCCTNRDCTMLLYEYMPNGSLDDLLHGGDKTMTAAAEWTALYQIAIGVAQGICYLHHDCDPVIVHRDLKPSNILLDADFEARVADFGVAKLIQTDESMSVVAGSYGYIAPEYAYTLQVDKKSDIYSYGVILLEIITGKRSVEPEFGEGNSIVDWVRSKLKTKEDVEEVLDKSMGRSCSLIREEMKQMLRIALLCTSRSPTDRPPMRDVLLILQEAKPKRKTVGDNVIVVGDVNDVNFEDVCSVDVGHDVKCQRIGV

SEQ ID NO: 96011 - protein, 812 aa, Arabidopsis thaliana
  peptide (1)..(812): Ceres Seq. ID no. 12731513
  misc_feature (1)..(777): Homolog of NCBI NO: 15235387 NR Description: leucine-rich repeat transmembrane protein kinase, protein id: At4g28650.1 [Arabidopsis thaliana]
  misc_feature (1)..(777): Homolog of NCBI NO: 27497207 NR Description: Hypothetical protein [Oryza sativa (japonica
  misc_feature (1)..(788): Homolog of NCBI NO: 15223264 NR Description: CLAVATA1 receptor kinase( CLV1); protein id:
  misc_feature (1)..(772): Homolog of NCBI NO: 15235366 NR Description: leucine-rich repeat transmembrane protein kinase, protein id: At4g20270.1 [Arabidopsis thaliana]
  misc_feature (1)..(391): Homolog of NCBI NO: 24940244 NR Description: serine-threonine protein kinase [Pisum sativum]
  misc_feature (470)..(783): Homolog of NCBI NO: 24940244 NR Description: serine-threonine protein kinase [Pisum sativum]
  misc_feature (1)..(770): Homolog of NCBI NO: 3641252 NR Description: leucine-rich receptor-like protein kinase [Malus
  misc_feature (1)..(770): Homolog of NCBI NO: 15218660 NR Description: leucine-rich repeat transmembrane protein kinase, protein id: At1g28440.1, supported by cDNA: gi_20260671
  misc_feature (1)..(772): Homolog of NCBI NO: 12054894 NR Description: receptor protein kinase [Pinus sylvestris]
  misc_feature (1)..(324): Homolog of NCBI NO: 15242059 NR Description: leucine-rich repeat transmembrane protein kinase, protein id: At5g51350.1 [Arabidopsis thaliana]
MEIGYNHFNGNIPSEFALLSNLKYFDVSNCSLSGSLPQELGNLSNLETLFLFQNGFTGEIPESYSNLKSLKLLDFSSNQLSGSIPSGFSTLKNLTWLSLISNNLSGEVPEGIGELPELTTLFLWNNNFTGVLPHKLGSNGKLETMDVSNNSFTGTIPSSLCHGNKLYKLILFSNMFEGELPKSLTRCESLWRFRSQNNRLNGTIPIGFGSLRNLTFVDLSNNRFTDQIPADFATAPVLQYLNLSTNFFHRKLPENIWKAPNLQIFSASFSNLIGEIPNYVGCKSFYRIELQGNSLNGTIPWDIGHCEKLLCLNLSQNHLNGIIPWEISTLPSIADVDLSHNLLTGTIPSDFGSSKTITTFNVSYNQLIGPIPSGSFAHLNPSFFSSNEGLCGDLVGKPCNSDRFNAGNADIDGHHKEERPKKTAGAIVWILAAAIGVGFFVLVAATRCFQKSYGNRVDGGGRNGGDIGPWKLTAFQRLNFTADDVVECLSKTDNILGMGSTGTVYKAEMPNGEIIAVKKLWGKNKENGKIRRRKSGVLAEVDVLGNVRHRNIVRLLGCCTNRDCTMLLYEYMPNGSLDDLLHGGDKTMTAAAEWTALYQIAIGVAQGICYLHHDCDPVIVHRDLKPSNILLDADFEARVADFGVAKLIQTDESMSVVAGSYGYIAPEYAYTLQVDKKSDIYSYGVILLEIITGKRSVEPEFGEGNSIVDWVRSKLKTKEDVEEVLDKSMGRSCSLIREEMKQMLRIALLCTSRSPTDRPPMRDVLLILQEAKPKRKTVGDNVIVVGDVNDVNFEDVCSVDVGHDVKCQRIGV

SEQ ID NO: 96012 - protein, 668 aa, Arabidopsis thaliana
  peptide (1)..(668): Ceres Seq. ID no. 12731514
  misc_feature (1)..(633): Homolog of NCBI NO: 15235387 NR Description: leucine-rich repeat transmembrane protein kinase, protein id: At4g28650.1 [Arabidopsis thaliana]
  misc_feature (1)..(633): Homolog of NCBI NO: 27497207 NR Description: Hypothetical protein [Oryza sativa (japonica
  misc_feature (1)..(644): Homolog of NCBI NO: 15223264 NR Description: CLAVATA1 receptor kinase( CLV1); protein id:
  misc_feature (1)..(628): Homolog of NCBI NO: 15235366 NR Description: leucine-rich repeat transmembrane protein kinase, protein id: At4g20270.1 [Arabidopsis thaliana]
  misc_feature (1)..(247): Homolog of NCBI NO: 24940244 NR Description: serine-threonine protein kinase [Pisum sativum]
  misc_feature (326)..(639): Homolog of NCBI NO: 24940244 NR Description: serine-threonine protein kinase [Pisum sativum]
  misc_feature (1)..(626): Homolog of NCBI NO: 3641252 NR Description: leucine-rich receptor-like protein kinase [Malus
  misc_feature (1)..(626): Homolog of NCBI NO: 15218660 NR Description: leucine-rich repeat transmembrane protein kinase, protein id: At1g28440.1, supported by cDNA: gi_20260671
  misc_feature (1)..(628): Homolog of NCBI NO: 12054894 NR Description: receptor protein kinase [Pinus sylvestris]
  misc_feature (1)..(180): Homolog of NCBI NO: 15242059 NR Description: leucine-rich repeat transmembrane protein kinase, protein id: At5g51350.1 [Arabidopsis thaliana]
MDVSNNSFTGTIPSSLCHGNKLYKLILFSNMFEGELPKSLTRCESLWRFRSQNNRLNGTIPIGFGSLRNLTFVDLSNNRFTDQIPADFATAPVLQYLNLSTNFFHRKLPENIWKAPNLQIFSASFSNLIGEIPNYVGCKSFYRIELQGNSLNGTIPWDIGHCEKLLCLNLSQNHLNGIIPWEISTLPSIADVDLSHNLLTGTIPSDFGSSKTITTFNVSYNQLIGPIPSGSFAHLNPSFFSSNEGLCGDLVGKPCNSDRFNAGNADIDGHHKEERPKKTAGAIVWILAAAIGVGFFVLVAATRCFQKSYGNRVDGGGRNGGDIGPWKLTAFQRLNFTADDVVECLSKTDNILGMGSTGTVYKAEMPNGEIIAVKKLWGKNKENGKIRRRKSGVLAEVDVLGNVRHRNIVRLLGCCTNRDCTMLLYEYMPNGSLDDLLHGGDKTMTAAAEWTALYQIAIGVAQGICYLHHDCDPVIVHRDLKPSNILLDADFEARVADFGVAKLIQTDESMSVVAGSYGYIAPEYAYTLQVDKKSDIYSYGVILLEIITGKRSVEPEFGEGNSIVDWVRSKLKTKEDVEEVLDKSMGRSCSLIREEMKQMLRIALLCTSRSPTDRPPMRDVLLILQEAKPKRKTVGDNVIVVGDVNDVNFEDVCSVDVGHDVKCQRIGV

SEQ ID NO: 96013 - DNA, 660 bp, Arabidopsis thaliana
  misc_feature (1)..(660): Ceres Seq. ID no. 12731527
  misc_feature: MA Experiment ID: 20000527 Result: Down-regulated in Transcription
  misc_feature: MA Experiment 20000527 PARAMETER Experiment Name: At_10percent_PEG_P Parameter: Age (day) Value: 20
  misc_feature: MA Experiment 20000527 PARAMETER Experiment Name: At_10percent_PEG_P Parameter: Organism Value: A. thaliana
  misc_feature: MA Experiment 20000527 PARAMETER Experiment Name: At_10percent_PEG_P Parameter: Plant Line Value: WS
  misc_feature: MA Experiment 20000527 PARAMETER Experiment Name: At_10percent_PEG_P Parameter: Timepoint (day) Value: 20
  misc_feature: MA Experiment 20000527 PARAMETER Experiment Name: At_10percent_PEG_P Parameter: Tissue Value: Whole Plant
  misc_feature: MA Experiment 20000527 PARAMETER Experiment Name: At_10percent_PEG_P Parameter: Treatment Value: 10percent PEG vs. No Treatment
atggctgatcagattgagatccagagaatgaaccaagatcttcaagaaccattggctgagatcatgccaagtgttttaacggcaatgtcgtatctcttgcaaagagtatcggagaccaacgacaacctgagccagaaacagaagccctcaagcttcactggagtaaccaaaccttccatttccatcagaagctatctcgaacggatctttgaatacgcgaattgtagctactcgtgttacatcgtcgcatatatatatttggatcggttcgtgaagaagcagccatttttgcctatcaattcttttaatgtccataggcttataatcacaagtgtcttggtctctgctaaattcatggatgacttgagttacaacaatgaatattatgcaaaagttggaggaataagcagagaagaaatgaacatgcttgagcttgacttcttgttcggaattgggtttgagttaaacgtcaccgtttctactttcaataactattgttgttttctacaaagagagatggcgatgttgatgaagatgaagtctctgtttcttgaaccttcttcattcaaaatctcttctaagacgaaacttgtgatgtatccacacgaggaagactctttatctactcaccacaacaagaagcaactcgctgctgcttga

SEQ ID NO: 96014 - protein, 219 aa, Arabidopsis thaliana
  peptide (1)..(219): Ceres Seq. ID no. 12731528
  misc_feature (27)..(156): Pfam Name: Cyclin, N-terminal domain Pfam Description: Cyclin, N-terminal domain
  misc_feature (1)..(219): Homolog of NCBI NO: 15240306 NR Description: PREG-like - like protein; protein id: At5g61650.1
  misc_feature (1)..(218): Homolog of NCBI NO: 15240794 NR Description: putative protein; protein id: At5g07450.1
  misc_feature (13)..(188): Homolog of NCBI NO: 15224950 NR Description: putative PREG1-like negative regulator; protein
  misc_feature (18)..(215): Homolog of NCBI NO: 37536902 NR Description: hypothetical protein [Oryza sativa (japonica group)] >gi|12597875|gb|AAG60183.1| hypothetical protein [Oryza >gi|31433542|gb|AAP55040.1| hypothetical protein [Oryza sativa
  misc_feature (23)..(173): Homolog of NCBI NO: 25493992 NR Description: PREG-like protein [imported] - Picea mariana
  misc_feature (22)..(173): Homolog of NCBI NO: 14140116 NR Description: PREG-like protein [Oryza sativa]
  misc_feature (23)..(197): Homolog of NCBI NO: 15233185 NR Description: PREG-like protein, putative; protein id:
  misc_feature (23)..(174): Homolog of NCBI NO: 15232360 NR Description: regulatory protein - like; protein id: At3g60550.1
  misc_feature (22)..(175): Homolog of NCBI NO: 15225402 NR Description: putative PREG1-like negative regulator; protein At2g45080.1, supported by cDNA: gi_18491282 [Arabidopsis
  misc_feature (23)..(172): Homolog of NCBI NO: 15229382 NR Description: putative protein; protein id: At3g63120.1, by cDNA: 35075. [Arabidopsis thaliana] >gi|11358166|pir||T48101
MADQIEIQRMNQDLQEPLAEIMPSVLTAMSYLLQRVSETNDNLSQKQKPSSFTGVTKPSISIRSYLERIFEYANCSYSCYIVAYIYLDRFVKKQPFLPINSFNVHRLIITSVLVSAKFMDDLSYNNEYYAKVGGISREEMNMLELDFLFGIGFELNVTVSTFNNYCCFLQREMAMLMKMKSLFLEPSSFKISSKTKLVMYPHEEDSLSTHHNKKQLAAA

SEQ ID NO: 96015 - protein, 210 aa, Arabidopsis thaliana
  peptide (1)..(210): Ceres Seq. ID no. 12731529
  misc_feature (18)..(147): Pfam Name: Cyclin, N-terminal domain Pfam Description: Cyclin, N-terminal domain
  misc_feature (1)..(210): Homolog of NCBI NO: 15240306 NR Description: PREG-like - like protein; protein id: At5g61650.1
  misc_feature (1)..(209): Homolog of NCBI NO: 15240794 NR Description: putative protein; protein id: At5g07450.1
  misc_feature (4)..(179): Homolog of NCBI NO: 15224950 NR Description: putative PREG1-like negative regulator; protein
  misc_feature (9)..(206): Homolog of NCBI NO: 37536902 NR Description: hypothetical protein [Oryza sativa (japonica group)] >gi|12597875|gb|AAG60183.1| hypothetical protein [Oryza >gi|31433542|gb|AAP55040.1| hypothetical protein [Oryza sativa
  misc_feature (14)..(164): Homolog of NCBI NO: 25493992 NR Description: PREG-like protein [imported] - Picea mariana
  misc_feature (13)..(164): Homolog of NCBI NO: 14140116 NR Description: PREG-like protein [Oryza sativa]
  misc_feature (14)..(188): Homolog of NCBI NO: 15233185 NR Description: PREG-like protein, putative; protein id:
  misc_feature (14)..(165): Homolog of NCBI NO: 15232360 NR Description: regulatory protein - like; protein id: At3g60550.1
  misc_feature (13)..(166): Homolog of NCBI NO: 15225402 NR Description: putative PREG1-like negative regulator; protein At2g45080.1, supported by cDNA: gi_18491282 [Arabidopsis
  misc_feature (14)..(163): Homolog of NCBI NO: 15229382 NR Description: putative protein; protein id: At3g63120.1, by cDNA: 35075. [Arabidopsis thaliana] >gi|11358166|pir||T48101
MNQDLQEPLAEIMPSVLTAMSYLLQRVSETNDNLSQKQKPSSFTGVTKPSISIRSYLERIFEYANCSYSCYIVAYIYLDRFVKKQPFLPINSFNVHRLIITSVLVSAKFMDDLSYNNEYYAKVGGISREEMNMLELDFLFGIGFELNVTVSTFNNYCCFLQREMAMLMKMKSLFLEPSSFKISSKTKLVMYPHEEDSLSTHHNKKQLAAA

SEQ ID NO: 96016 - protein, 198 aa, Arabidopsis thaliana
  peptide (1)..(198): Ceres Seq. ID no. 12731530
  misc_feature (6)..(135): Pfam Name: Cyclin, N-terminal domain Pfam Description: Cyclin, N-terminal domain
  misc_feature (1)..(198): Homolog of NCBI NO: 15240306 NR Description: PREG-like - like protein; protein id: At5g61650.1
  misc_feature (1)..(197): Homolog of NCBI NO: 15240794 NR Description: putative protein; protein id: At5g07450.1
  misc_feature (1)..(167): Homolog of NCBI NO: 15224950 NR Description: putative PREG1-like negative regulator; protein
  misc_feature (1)..(194): Homolog of NCBI NO: 37536902 NR Description: hypothetical protein [Oryza sativa (japonica group)] >gi|12597875|gb|AAG60183.1| hypothetical protein [Oryza >gi|31433542|gb|AAP55040.1| hypothetical protein [Oryza sativa
  misc_feature (2)..(152): Homolog of NCBI NO: 25493992 NR Description: PREG-like protein [imported] - Picea mariana
  misc_feature (1)..(152): Homolog of NCBI NO: 14140116 NR Description: PREG-like protein [Oryza sativa]
  misc_feature (2)..(176): Homolog of NCBI NO: 15233185 NR Description: PREG-like protein, putative; protein id:
  misc_feature (2)..(153): Homolog of NCBI NO: 15232360 NR Description: regulatory protein - like; protein id: At3g60550.1
  misc_feature (1)..(154): Homolog of NCBI NO: 15225402 NR Description: putative PREG1-like negative regulator; protein At2g45080.1, supported by cDNA: gi_18491282 [Arabidopsis
  misc_feature (2)..(151): Homolog of NCBI NO: 15229382 NR Description: putative protein; protein id: At3g63120.1, by cDNA: 35075. [Arabidopsis thaliana] >gi|11358166|pir||T48101
MPSVLTAMSYLLQRVSETNDNLSQKQKPSSFTGVTKPSISIRSYLERIFEYANCSYSCYIVAYIYLDRFVKKQPFLPINSFNVHRLIITSVLVSAKFMDDLSYNNEYYAKVGGISREEMNMLELDFLFGIGFELNVTVSTFNNYCCFLQREMAMLMKMKSLFLEPSSFKISSKTKLVMYPHEEDSLSTHHNKKQLAAA

SEQ ID NO: 96017 - DNA, 1017 bp, Arabidopsis thaliana
  misc_feature (1)..(1017): Ceres Seq. ID no. 12731531
  misc_feature: MA Experiment ID: 20000355 Result: Up-regulated in Transcription
  misc_feature: MA Experiment 20000355 PARAMETER Experiment Name: At_Siliques_Sub_P Parameter: Age (day) Value: 21
  misc_feature: MA Experiment 20000355 PARAMETER Experiment Name: At_Siliques_Sub_P Parameter: Organism Value: A. thaliana
  misc_feature: MA Experiment 20000355 PARAMETER Experiment Name: At_Siliques_Sub_P Parameter: Plant Line Value: WS
  misc_feature: MA Experiment 20000355 PARAMETER Experiment Name: At_Siliques_Sub_P Parameter: Tissue Value: Less Than 5mm Siliques vs. Whole Plant
atgggatacaattatgtgtccctcatagtaacaatcctgctcgtggtgattacatcgcccgtggttttcggtaacgatgcagcaccaattccggagaacaaaggccgaatcgagcagtggttcaacaccaacgtgaaacaaaatggaagaggccatttcaagacaataaccgaagcgataaatagtgtacgggcagggaacactaggcgtgtgatcatcaagataggtcctggtgtatacaaagagaaggtcacgatagatagaagcaagccattcatcacactgtacggtcatccaaatgcaatgccggtattgacattcgacggtaccgcagcacaatatgggacagtcgatagcgcaactctcattgtcttgtccgactatttcatggctgttaacatcatccttaagaattctgcgcctatgccggatggtaagaggaagggagcacaagctttatctatgagaatctctggcaacaaagcagctttctacaactgtaaattttacggttatcaagacacgatttgcgatgacaccggaaaccatttcttcaaagactgctacatcgaaggcacatttgatttcatctttggaagcggacgctctctgtacctcggtacacaactaaacgttgtgggagatggaatcagagtgatcacagctcatgcgggaaaaagcgctgcagagaaaagcggatactcgttcgtccactgcaaggttacagggactggaaccgggatctacttgggtcgatcatggatgagccaccccaaggttgtttatgcatacacggatatgtcaagtgttgtgaacccatctggatggcaagaaaaccgcgaggccggacgtgacaagacggtgttctatggagaatataagtgcacaggaacaggatcgcacaaggagaagagagtaaagtatacacaagacattgatgacatagaagctaagtacttcatctcgcttggctacatccaaggatctagctggctcctgcctcctccttctttctaa

SEQ ID NO: 96018 - protein, 338 aa, Arabidopsis thaliana
  peptide (1)..(338): Ceres Seq. ID no. 12731532
  misc_feature (45)..(329): Pfam Name: Pectinesterase Pfam Description: Pectinesterase
  misc_feature (1)..(338): Homolog of NCBI NO: 15240325 NR Description: pectinesterase family; protein id: At5g61680.1
  misc_feature (45)..(338): Homolog of NCBI NO: 9758483 NR Description: pectin methylesterase-like protein [Arabidopsis
  misc_feature (1)..(45): Homolog of NCBI NO: 9758483 NR Description: pectin methylesterase-like protein [Arabidopsis
  misc_feature (44)..(337): Homolog of NCBI NO: 30697951 NR Description: pectinesterase family [Arabidopsis thaliana]
  misc_feature (1)..(45): Homolog of NCBI NO: 30697951 NR Description: pectinesterase family [Arabidopsis thaliana]
  misc_feature (44)..(337): Homolog of NCBI NO: 18415486 NR Description: pectinesterase family; protein id: At5g07410.1,
  misc_feature (1)..(45): Homolog of NCBI NO: 18415486 NR Description: pectinesterase family; protein id: At5g07410.1,
  misc_feature (48)..(337): Homolog of NCBI NO: 25404855 NR Description: probable pectin methylesterase T17F3.3 [imported] Arabidopsis thaliana >gi|12325236|gb|AAG52566.1|AC010675_14
  misc_feature (21)..(45): Homolog of NCBI NO: 25404855 NR Description: probable pectin methylesterase T17F3.3 [imported] Arabidopsis thaliana >gi|12325236|gb|AAG52566.1|AC010675_14
  misc_feature (44)..(337): Homolog of NCBI NO: 11358603 NR Description: pectin methyl-esterase-like protein - Arabidopsis
MGYNYVSLIVTILLVVITSPVVFGNDAAPIPENKGRIEQWFNTNVKQNGRGHFKTITEAINSVRAGNTRRVIIKIGPGVYKEKVTIDRSKPFITLYGHPNAMPVLTFDGTAAQYGTVDSATLIVLSDYFMAVNIILKNSAPMPDGKRKGAQALSMRISGNKAAFYNCKFYGYQDTICDDTGNHFFKDCYIEGTFDFIFGSGRSLYLGTQLNVVGDGIRVITAHAGKSAAEKSGYSFVHCKVTGTGTGIYLGRSWMSHPKVVYAYTDMSSVVNPSGWQENREAGRDKTVFYGEYKCTGTGSHKEKRVKYTQDIDDIEAKYFISLGYIQGSSWLLPPPSF

SEQ ID NO: 96019 - protein, 237 aa, Arabidopsis thaliana
  peptide (1)..(237): Ceres Seq. ID no. 12731533
  misc_feature (1)..(228): Pfam Name: Pectinesterase Pfam Description: Pectinesterase
  misc_feature (1)..(237): Homolog of NCBI NO: 15240325 NR Description: pectinesterase family; protein id: At5g61680.1
  misc_feature (1)..(237): Homolog of NCBI NO: 9758483 NR Description: pectin methylesterase-like protein [Arabidopsis
  misc_feature (1)..(236): Homolog of NCBI NO: 30697951 NR Description: pectinesterase family [Arabidopsis thaliana]
  misc_feature (1)..(236): Homolog of NCBI NO: 18415486 NR Description: pectinesterase family; protein id: At5g07410.1,
  misc_feature (1)..(236): Homolog of NCBI NO: 25404855 NR Description: probable pectin methylesterase T17F3.3 [imported] Arabidopsis thaliana >gi|12325236|gb|AAG52566.1|AC010675_14
  misc_feature (1)..(236): Homolog of NCBI NO: 11358603 NR Description: pectin methyl-esterase-like protein - Arabidopsis
  misc_feature (1)..(236): Homolog of NCBI NO: 21593398 NR Description: pectin methyl-esterase-like protein [Arabidopsis
  misc_feature (1)..(237): Homolog of NCBI NO: 15240792 NR Description: pectinesterase family; protein id: At5g07430.1
  misc_feature (1)..(237): Homolog of NCBI NO: 15240781 NR Description: pectinesterase family; protein id: At5g07420.1,
  misc_feature (1)..(231): Homolog of NCBI NO: 15241163 NR Description: pectinesterase family; protein id: At5g19730.1, by cDNA: gi_17529289, supported by cDNA: gi_20465498 [Arabidopsis >gi|17529290|gb|AAL38872.1| putative pectin methylesterase
MPVLTFDGTAAQYGTVDSATLIVLSDYFMAVNIILKNSAPMPDGKRKGAQALSMRISGNKAAFYNCKFYGYQDTICDDTGNHFFKDCYIEGTFDFIFGSGRSLYLGTQLNVVGDGIRVITAHAGKSAAEKSGYSFVHCKVTGTGTGIYLGRSWMSHPKVVYAYTDMSSVVNPSGWQENREAGRDKTVFYGEYKCTGTGSHKEKRVKYTQDIDDIEAKYFISLGYIQGSSWLLPPPSF

SEQ ID NO: 96020 - protein, 209 aa, Arabidopsis thaliana
  peptide (1)..(209): Ceres Seq. ID no. 12731534
  misc_feature (1)..(200): Pfam Name: Pectinesterase Pfam Description: Pectinesterase
  misc_feature (1)..(209): Homolog of NCBI NO: 15240325 NR Description: pectinesterase family; protein id: At5g61680.1
  misc_feature (1)..(209): Homolog of NCBI NO: 9758483 NR Description: pectin methylesterase-like protein [Arabidopsis
  misc_feature (1)..(208): Homolog of NCBI NO: 30697951 NR Description: pectinesterase family [Arabidopsis thaliana]
  misc_feature (1)..(208): Homolog of NCBI NO: 18415486 NR Description: pectinesterase family; protein id: At5g07410.1,
  misc_feature (1)..(208): Homolog of NCBI NO: 25404855 NR Description: probable pectin methylesterase T17F3.3 [imported] Arabidopsis thaliana >gi|12325236|gb|AAG52566.1|AC010675_14
  misc_feature (1)..(208): Homolog of NCBI NO: 11358603 NR Description: pectin methyl-esterase-like protein - Arabidopsis
  misc_feature (1)..(208): Homolog of NCBI NO: 21593398 NR Description: pectin methyl-esterase-like protein [Arabidopsis
  misc_feature (1)..(209): Homolog of NCBI NO: 15240792 NR Description: pectinesterase family; protein id: At5g07430.1
  misc_feature (1)..(209): Homolog of NCBI NO: 15240781 NR Description: pectinesterase family; protein id: At5g07420.1,
  misc_feature (1)..(203): Homolog of NCBI NO: 15241163 NR Description: pectinesterase family; protein id: At5g19730.1, by cDNA: gi_17529289, supported by cDNA: gi_20465498 [Arabidopsis >gi|17529290|gb|AAL38872.1| putative pectin methylesterase
MAVNIILKNSAPMPDGKRKGAQALSMRISGNKAAFYNCKFYGYQDTICDDTGNHFFKDCYIEGTFDFIFGSGRSLYLGTQLNVVGDGIRVITAHAGKSAAEKSGYSFVHCKVTGTGTGIYLGRSWMSHPKVVYAYTDMSSVVNPSGWQENREAGRDKTVFYGEYKCTGTGSHKEKRVKYTQDIDDIEAKYFISLGYIQGSSWLLPPPSF

SEQ ID NO: 96021 - DNA, 747 bp, Arabidopsis thaliana
  misc_feature (1)..(747): Ceres Seq. ID no. 12731551
  misc_feature: MA Experiment ID: 20000169 Result: Up-regulated in Transcription
  misc_feature: MA Experiment 20000169 PARAMETER Experiment Name: At_100uM_ABA_P Parameter: Age (day) Value: 14
  misc_feature: MA Experiment 20000169 PARAMETER Experiment Name: At_100uM_ABA_P Parameter: Organism Value: A. thaliana
  misc_feature: MA Experiment 20000169 PARAMETER Experiment Name: At_100uM_ABA_P Parameter: Plant Line Value: WS
  misc_feature: MA Experiment 20000169 PARAMETER Experiment Name: At_100uM_ABA_P Parameter: Timepoint (hr) Value: 6
  misc_feature: MA Experiment 20000169 PARAMETER Experiment Name: At_100uM_ABA_P Parameter: Tissue Value: Aerial
  misc_feature: MA Experiment 20000169 PARAMETER Experiment Name: At_100uM_ABA_P Parameter: Treatment Value: 100uM ABA vs. No Treatment
  misc_feature: MA Experiment ID: 20000453 Result: Up-regulated in Transcription
  misc_feature: MA Experiment 20000453 PARAMETER Experiment Name: At_100uM_ABA_P Parameter: Age (day) Value: 15
  misc_feature: MA Experiment 20000453 PARAMETER Experiment Name: At_100uM_ABA_P Parameter: Organism Value: A. thaliana
  misc_feature: MA Experiment 20000453 PARAMETER Experiment Name: At_100uM_ABA_P Parameter: Plant Line Value: WS
  misc_feature: MA Experiment 20000453 PARAMETER Experiment Name: At_100uM_ABA_P Parameter: Timepoint (hr) Value: 24
  misc_feature: MA Experiment 20000453 PARAMETER Experiment Name: At_100uM_ABA_P Parameter: Tissue Value: Aerial
  misc_feature: MA Experiment 20000453 PARAMETER Experiment Name: At_100uM_ABA_P Parameter: Treatment Value: 100uM ABA vs. No Treatment
  misc_feature: MA Experiment ID: 20000455 Result: Up-regulated in Transcription
  misc_feature: MA Experiment 20000455 PARAMETER Experiment Name: At_100uM_ABA_P Parameter: Age (day) Value: 16
  misc_feature: MA Experiment 20000455 PARAMETER Experiment Name: At_100uM_ABA_P Parameter: Organism Value: A. thaliana
  misc_feature: MA Experiment 20000455 PARAMETER Experiment Name: At_100uM_ABA_P Parameter: Plant Line Value: WS
  misc_feature: MA Experiment 20000455 PARAMETER Experiment Name: At_100uM_ABA_P Parameter: Timepoint (hr) Value: 48
  misc_feature: MA Experiment 20000455 PARAMETER Experiment Name: At_100uM_ABA_P Parameter: Tissue Value: Aerial
  misc_feature: MA Experiment 20000455 PARAMETER Experiment Name: At_100uM_ABA_P Parameter: Treatment Value: 100uM ABA vs. No Treatment
  misc_feature: MA Experiment ID: 20001905 Result: Up-regulated in Transcription
  misc_feature: MA Experiment 20001905 PARAMETER Experiment Name: At_Drought_Reproduction_P Parameter: Age (day) Value: 40
  misc_feature: MA Experiment 20001905 PARAMETER Experiment Name: At_Drought_Reproduction_P Parameter: Organism Value: A. thaliana
  misc_feature: MA Experiment 20001905 PARAMETER Experiment Name: At_Drought_Reproduction_P Parameter: Plant Line Value: WS
  misc_feature: MA Experiment 20001905 PARAMETER Experiment Name: At_Drought_Reproduction_P Parameter: Timepoint (day) Value: 10
  misc_feature: MA Experiment 20001905 PARAMETER Experiment Name: At_Drought_Reproduction_P Parameter: Tissue Value: Rosettes
  misc_feature: MA Experiment 20001905 PARAMETER Experiment Name: At_Drought_Reproduction_P Parameter: Treatment Value: Drought vs. No Drought
atgtatgggaagaggccttttggaggtgatgaatctgaagaaagggaagaagatgagaacttgttcccggtcttctcggcccgatctcaacacgacatgcgtgttatggtctcggccttgactcaagtaatcggaaaccaacaaagcaaatctcatgataacatcagctctattgatgataactatccttctgtgtataatccacaagaccctaatcaacaagttgcgcctactcatcaagaccaaggggacttgaggaggagacattatagaggtgtaaggcaaaggccatggggaaagtgggcagctgaaatccgagacccaaaaaaggcggcacgtgtgtggctcgggacatttgaaaccgctgaatctgcggccttagcttatgatgaagcagccctaaagttcaaaggaagcaaagcaaaactcaatttcccggagagggttcagcttggaagtaactctacatattactcctccaaccaaattccacaaatggaaccacaaagtataccgaactataatcaatactatcatgatgcgagtagtggtgatatgctaagttttaatttgggcggtgggtatgggagtggtaccggatattcaatgtctcatgataatagtactacgactgctgctacaacttcttcgtcttctggtggctcttctaggcaacaagaagagcaagattatgccagattctggcgctttggggattcttcttcctctcctcattcgggatattaa

SEQ ID NO: 96022 - protein, 248 aa, Arabidopsis thaliana
  peptide (1)..(248): Ceres Seq. ID no. 12731552
  misc_feature (87)..(151): Pfam Name: AP2 domain Pfam Description: AP2 domain
  misc_feature (1)..(248): Homolog of NCBI NO: 15240379 NR Description: putative protein; protein id: At5g61890.1
  misc_feature (2)..(248): Homolog of NCBI NO: 15240754 NR Description: putative transcription factor; protein id:
  misc_feature (65)..(229): Homolog of NCBI NO: 15240604 NR Description: putative protein; protein id: At5g13330.1
  misc_feature (62)..(247): Homolog of NCBI NO: 38347164 NR Description: OSJNBa0039C07.10 [Oryza sativa (japonica
  misc_feature (72)..(205): Homolog of NCBI NO: 15226153 NR Description: putative AP2 domain transcription factor; protein At2g33710.1 [Arabidopsis thaliana] >gi|25408300|pir||F84748
  misc_feature (45)..(151): Homolog of NCBI NO: 15238232 NR Description: putative protein; protein id: At5g64750.1 thaliana] >gi|10177206|dbj|BAB10308.1| contains similarity to factor~gene_id:MVP7.8 [Arabidopsis thaliana]
  misc_feature (21)..(151): Homolog of NCBI NO: 34221731 NR Description: putative AP2 domain transcription factor
  misc_feature (84)..(151): Homolog of NCBI NO: 34908616 NR Description: P0677H08.8 [Oryza sativa (japonica
  misc_feature (21)..(151): Homolog of NCBI NO: 15240610 NR Description: putative protein; protein id: At5g50080.1 thaliana] >gi|10177219|dbj|BAB10294.1| contains similarity to AP2
  misc_feature (63)..(172): Homolog of NCBI NO: 33519168 NR Description: AP2 domain-containing protein AP29 [Oryza sativa
MYGKRPFGGDESEEREEDENLFPVFSARSQHDMRVMVSALTQVIGNQQSKSHDNISSIDDNYPSVYNPQDPNQQVAPTHQDQGDLRRRHYRGVRQRPWGKWAAEIRDPKKAARVWLGTFETAESAALAYDEAALKFKGSKAKLNFPERVQLGSNSTYYSSNQIPQMEPQSIPNYNQYYHDASSGDMLSFNLGGGYGSGTGYSMSHDNSTTTAATTSSSSGGSSRQQEEQDYARFWRFGDSSSSPHSGY

SEQ ID NO: 96023 - protein, 216 aa, Arabidopsis thaliana
  peptide (1)..(216): Ceres Seq. ID no. 12731553
  misc_feature (55)..(119): Pfam Name: AP2 domain Pfam Description: AP2 domain
  misc_feature (1)..(216): Homolog of NCBI NO: 15240379 NR Description: putative protein; protein id: At5g61890.1
  misc_feature (1)..(216): Homolog of NCBI NO: 15240754 NR Description: putative transcription factor; protein id:
  misc_feature (33)..(197): Homolog of NCBI NO: 15240604 NR Description: putative protein; protein id: At5g13330.1
  misc_feature (30)..(215): Homolog of NCBI NO: 38347164 NR Description: OSJNBa0039C07.10 [Oryza sativa (japonica
  misc_feature (40)..(173): Homolog of NCBI NO: 15226153 NR Description: putative AP2 domain transcription factor; protein At2g33710.1 [Arabidopsis thaliana] >gi|25408300|pir||F84748
  misc_feature (13)..(119): Homolog of NCBI NO: 15238232 NR Description: putative protein; protein id: At5g64750.1 thaliana] >gi|10177206|dbj|BAB10308.1| contains similarity to factor~gene_id:MVP7.8 [Arabidopsis thaliana]
  misc_feature (1)..(119): Homolog of NCBI NO: 34221731 NR Description: putative AP2 domain transcription factor
  misc_feature (52)..(119): Homolog of NCBI NO: 34908616 NR Description: P0677H08.8 [Oryza sativa (japonica
  misc_feature (1)..(119): Homolog of NCBI NO: 15240610 NR Description: putative protein; protein id: At5g50080.1 thaliana] >gi|10177219|dbj|BAB10294.1| contains similarity to AP2
  misc_feature (31)..(140): Homolog of NCBI NO: 33519168 NR Description: AP2 domain-containing protein AP29 [Oryza sativa
MRVMVSALTQVIGNQQSKSHDNISSIDDNYPSVYNPQDPNQQVAPTHQDQGDLRRRHYRGVRQRPWGKWAAEIRDPKKAARVWLGTFETAESAALAYDEAALKFKGSKAKLNFPERVQLGSNSTYYSSNQIPQMEPQSIPNYNQYYHDASSGDMLSFNLGGGYGSGTGYSMSHDNSTTTAATTSSSSGGSSRQQEEQDYARFWRFGDSSSSPHSGY

SEQ ID NO: 96024 - protein, 213 aa, Arabidopsis thaliana
  peptide (1)..(213): Ceres Seq. ID no. 12731554
  misc_feature (52)..(116): Pfam Name: AP2 domain Pfam Description: AP2 domain
  misc_feature (1)..(213): Homolog of NCBI NO: 15240379 NR Description: putative protein; protein id: At5g61890.1
  misc_feature (1)..(213): Homolog of NCBI NO: 15240754 NR Description: putative transcription factor; protein id:
  misc_feature (30)..(194): Homolog of NCBI NO: 15240604 NR Description: putative protein; protein id: At5g13330.1
  misc_feature (27)..(212): Homolog of NCBI NO: 38347164 NR Description: OSJNBa0039C07.10 [Oryza sativa (japonica
  misc_feature (37)..(170): Homolog of NCBI NO: 15226153 NR Description: putative AP2 domain transcription factor; protein At2g33710.1 [Arabidopsis thaliana] >gi|25408300|pir||F84748
  misc_feature (10)..(116): Homolog of NCBI NO: 15238232 NR Description: putative protein; protein id: At5g64750.1 thaliana] >gi|10177206|dbj|BAB10308.1| contains similarity to factor~gene_id:MVP7.8 [Arabidopsis thaliana]
  misc_feature (1)..(116): Homolog of NCBI NO: 34221731 NR Description: putative AP2 domain transcription factor
  misc_feature (49)..(116): Homolog of NCBI NO: 34908616 NR Description: P0677H08.8 [Oryza sativa (japonica
  misc_feature (1)..(116): Homolog of NCBI NO: 15240610 NR Description: putative protein; protein id: At5g50080.1 thaliana] >gi|10177219|dbj|BAB10294.1| contains similarity to AP2
  misc_feature (28)..(137): Homolog of NCBI NO: 33519168 NR Description: AP2 domain-containing protein AP29 [Oryza sativa
MVSALTQVIGNQQSKSHDNISSIDDNYPSVYNPQDPNQQVAPTHQDQGDLRRRHYRGVRQRPWGKWAAEIRDPKKAARVWLGTFETAESAALAYDEAALKFKGSKAKLNFPERVQLGSNSTYYSSNQIPQMEPQSIPNYNQYYHDASSGDMLSFNLGGGYGSGTGYSMSHDNSTTTAATTSSSSGGSSRQQEEQDYARFWRFGDSSSSPHSGY

SEQ ID NO: 96025 - DNA, 2553 bp, Arabidopsis thaliana
  misc_feature (1)..(2553): Ceres Seq. ID no. 12731566
  misc_feature: MA Experiment ID: 20000185 Result: Up-regulated in Transcription
  misc_feature: MA Experiment 20000185 PARAMETER Experiment Name: At_Roots__P Parameter: Age (day) Value: 7 vs. 21
  misc_feature: MA Experiment 20000185 PARAMETER Experiment Name: At_Roots__P Parameter: Organism Value: A. thaliana
  misc_feature: MA Experiment 20000185 PARAMETER Experiment Name: At_Roots__P Parameter: Tissue Value: Roots vs. Whole Plant
  misc_feature: MA Experiment ID: 20000235 Result: Up-regulated in Transcription
  misc_feature: MA Experiment 20000235 PARAMETER Experiment Name: At_Siliques_P Parameter: Age (day) Value: 21
  misc_feature: MA Experiment 20000235 PARAMETER Experiment Name: At_Siliques_P Parameter: Organism Value: A. thaliana
  misc_feature: MA Experiment 20000235 PARAMETER Experiment Name: At_Siliques_P Parameter: Plant Line Value: WS
  misc_feature: MA Experiment 20000235 PARAMETER Experiment Name: At_Siliques_P Parameter: Tissue Value: 5-10mm Siliques vs. Whole Plant
  misc_feature: MA Experiment ID: 20000264 Result: Up-regulated in Transcription
  misc_feature: MA Experiment 20000264 PARAMETER Experiment Name: At_Open_Flower_P Parameter: Age (day) Value: 21
  misc_feature: MA Experiment 20000264 PARAMETER Experiment Name: At_Open_Flower_P Parameter: Plant Line Value: WS
  misc_feature: MA Experiment 20000264 PARAMETER Experiment Name: At_Open_Flower_P Parameter: Tissue Value: Open Flower vs. Whole Plant
  misc_feature: MA Experiment ID: 20000265 Result: Up-regulated in Transcription
  misc_feature: MA Experiment 20000265 PARAMETER Experiment Name: At_Open_Flower_P Parameter: Age (day) Value: 21
  misc_feature: MA Experiment 20000265 PARAMETER Experiment Name: At_Open_Flower_P Parameter: Plant Line Value: WS
  misc_feature: MA Experiment 20000265 PARAMETER Experiment Name: At_Open_Flower_P Parameter: Tissue Value: Closed Flower vs. Whole Plant
  misc_feature: MA Experiment ID: 20000286 Result: Up-regulated in Transcription
  misc_feature: MA Experiment 20000286 PARAMETER Experiment Name: At_Open_Flower_P Parameter: Age (day) Value: 21
  misc_feature: MA Experiment 20000286 PARAMETER Experiment Name: At_Open_Flower_P Parameter: Plant Line Value: WS
  misc_feature: MA Experiment 20000286 PARAMETER Experiment Name: At_Open_Flower_P Parameter: Tissue Value: Half Open vs. Whole Plant
  misc_feature: MA Experiment ID: 20000439 Result: Up-regulated in Transcription
  misc_feature: MA Experiment 20000439 PARAMETER Experiment Name: At_Roots__P Parameter: Age (day) Value: 14 vs. 21
  misc_feature: MA Experiment 20000439 PARAMETER Experiment Name: At_Roots__P Parameter: Organism Value: A. thaliana
  misc_feature: MA Experiment 20000439 PARAMETER Experiment Name: At_Roots__P Parameter: Tissue Value: Roots vs. Whole Plant
  misc_feature: MA Experiment ID: 20000496 Result: Up-regulated in Transcription
  misc_feature: MA Experiment 20000496 PARAMETER Experiment Name: At_Guard_Cells_P Parameter: Harvest Date Value: 7/19/2002
  misc_feature: MA Experiment 20000496 PARAMETER Experiment Name: At_Guard_Cells_P Parameter: Organism Value: Canola
  misc_feature: MA Experiment 20000496 PARAMETER Experiment Name: At_Guard_Cells_P Parameter: Tissue Value: Guard Cells vs. Leaves
  misc_feature: MA Experiment ID: 20000794 Result: Up-regulated in Transcription
  misc_feature: MA Experiment 20000794 PARAMETER Experiment Name: At_Petals_P Parameter: Age (day) Value: 23-25 days
  misc_feature: MA Experiment 20000794 PARAMETER Experiment Name: At_Petals_P Parameter: Plant Line Value: WS
  misc_feature: MA Experiment 20000794 PARAMETER Experiment Name: At_Petals_P Parameter: Tissue Value: Petals vs. Whole plant
atgcatttcgccaagctcgatgattctcccatgtttcgccaacagatgcaatctatggaagagagtgcggagttgctccgactgcgatgcttaaggttctataaaggttgcagaaaatacacggaggggcttggagaagggtatgatgcagatattggctttgtaaatgcacttgaatctttcggaggaggccataatgatcctgtttgtgttgcttttggaggtcctgtaatgacaaaattcactattgctctacgagaaatcgggacatacaaggaagtacttcgttctcaggtagaacacatgctgagtgatcggttgcttcaatttgtgaatggtgatgtccacgaagttaaggaagctcgtaaacggtttgacaaagctaccattacatatgatcaggcacgagaaaaatatctttcattaaggaagagcacacgattggatgtggctgccacaattgaggaggacctacatagcgcaagaacgacatttgagcaagcccggtttcatctggttagtgcactctctaatgcagagtctaaaaagagatttgagtttttggaagcagtcagcgggactatggatgctcatctccgtttcttcaaacaggcaagctttttcttgaaaacaattttcagagcaagaccacaaataactctggatccaatccgcttgggatatgaactactacatcaaatggagccttttattaatcaggtgttggcttatgcacaccagtctagagaatgtgcaaactatgagatggcatcacttaatgaaaggatgcaggaataccaaaggcaagttgatcgtgaaactagaaactcctgtgtttctccaacaggggatggcatgagacataactcaagaaactcccagaaagtcatcgaggccgtgatgcaatctgctgcaaaaggaaaggttcagactatcagacaagggtatctgtctaaacgttcctcaaacttgagaggtgactggaaaagaagattctttatccttgatagccgtgggatgctatactattaccgcaagccatggaattggtcttcaggaaatggaagtcgctctgttgttcacaggaatatggcttcagaaaacagtcctgggctgctaagtcggtggctgtcttctcattatcatggtggtgtgcacgatgaaaaaccagtggcacgtcacaccgtcaatctgctgacctcaacgatcaaagttgatgcagatcagaccgatctaagattctgctttagaataatttcaccaacaaaagtttatacattgcaggcagagaatgcacaggatcagatggactggatcgaaaaaataactggagtaattgcttctttgttgagtttccaaacacctgaaagagcaatcatgcgtctctctactgtggacggaggtgatactttctctgcaagtgattctggttctttagcagatccttatgatatcgaacaggcagaaagtggagaatccacagtggaacatcccatgacaggaggaaaccgttcgaggttctcagggtgcttgcagcaacatgatatggtaaagactgaaaagccaattgatgtcttgacaagggtattgggtaatgagagatgtgcagactgcggtgctcctgaacctgattgggcctctttgaacctcggtgtccttatttgtatcgagtgttctggtatccatcgtaaccttggtgttcacatttcaaaggtcagatcgctcactcttgatgtcaaagtatgggaaccatcggtcttgacgttattccaatcgttaggtaatgtatatgtaaactcagtgtgggaggagctgttgaactcggagagtagaacttccagtgctagtagatcttcgggcactcccaagtcagatcgaccaagaaagttgcttgtaaggaagcctggtttcaatgatcccatttcggtgaaagagttgttcatccacgcaaagtactcagagaggatttttgtccgcaaagcaatagacagtcagcattttcaggcagttttccaagagatatgggagaatgtccgtgccaacgacaagaaatcagtttacaggcacattgtctgctctgaagcagatgtgaatgctctacgtggtcaagcatcatacactgtgtctttgcccttatcaaagatgatgcaaatggaggaaacccttgaagcgaaattcaagagcattgaagaggagtttcaagagaatccagcgggatattctaactcaagaggtgacggggaaagtatggtcagagaagaaacttcaaacgactgttctttgcttcaccttgcttgtctttctgcggatatcggtatggtagaactattgcttcaatatggcgcaaaaataaatgcaacagattcaaaaggtcggactccacttcatcattgtatcatcagcaggagatatgcaattgcaaggttgctacttatgaggggaggagatccaaatgctgtggataaagacagtaacataccagtcaaatatgcttcacagacagacctcaatgatagcgaactgattgctttattaacagactccaaaagatga

SEQ ID NO: 96026 - protein, 850 aa, Arabidopsis thaliana
  peptide (1)..(850): Ceres Seq. ID no. 12731567
  misc_feature (520)..(665): Pfam Name: Putative GTPase activating protein for Arf Pfam Description: Putative GTPase activating protein for Arf
  misc_feature (353)..(848): Homolog of NCBI NO: 30684352 NR Description: ARF GTPase-activating domain-containing protein
  misc_feature (1)..(204): Homolog of NCBI NO: 30684352 NR Description: ARF GTPase-activating domain-containing protein
  misc_feature (353)..(848): Homolog of NCBI NO: 11358303 NR Description: hypothetical protein T31B5.120 - Arabidopsis >gi|7529285|emb|CAB86637.1| putative protein [Arabidopsis
  misc_feature (19)..(204): Homolog of NCBI NO: 11358303 NR Description: hypothetical protein T31B5.120 - Arabidopsis >gi|7529285|emb|CAB86637.1| putative protein [Arabidopsis
  misc_feature (351)..(850): Homolog of NCBI NO: 38175545 NR Description: putative ARF GTPase-activating domain-containing
  misc_feature (1)..(168): Homolog of NCBI NO: 38175545 NR Description: putative ARF GTPase-activating domain-containing
  misc_feature (184)..(328): Homolog of NCBI NO: 11358303 NR Description: hypothetical protein T31B5.120 - Arabidopsis >gi|7529285|emb|CAB86637.1| putative protein [Arabidopsis
  misc_feature (184)..(328): Homolog of NCBI NO: 30684352 NR Description: ARF GTPase-activating domain-containing protein
  misc_feature (154)..(308): Homolog of NCBI NO: 38175545 NR Description: putative ARF GTPase-activating domain-containing
  misc_feature (176)..(503): Homolog of NCBI NO: 30681946 NR Description: ARF GTPase-activating domain-containing protein
MHFAKLDDSPMFRQQMQSMEESAELLRLRCLRFYKGCRKYTEGLGEGYDADIGFVNALESFGGGHNDPVCVAFGGPVMTKFTIALREIGTYKEVLRSQVEHMLSDRLLQFVNGDVHEVKEARKRFDKATITYDQAREKYLSLRKSTRLDVAATIEEDLHSARTTFEQARFHLVSALSNAESKKRFEFLEAVSGTMDAHLRFFKQASFFLKTIFRARPQITLDPIRLGYELLHQMEPFINQVLAYAHQSRECANYEMASLNERMQEYQRQVDRETRNSCVSPTGDGMRHNSRNSQKVIEAVMQSAAKGKVQTIRQGYLSKRSSNLRGDWKRRFFILDSRGMLYYYRKPWNWSSGNGSRSVVHRNMASENSPGLLSRWLSSHYHGGVHDEKPVARHTVNLLTSTIKVDADQTDLRFCFRIISPTKVYTLQAENAQDQMDWIEKITGVIASLLSFQTPERAIMRLSTVDGGDTFSASDSGSLADPYDIEQAESGESTVEHPMTGGNRSRFSGCLQQHDMVKTEKPIDVLTRVLGNERCADCGAPEPDWASLNLGVLICIECSGIHRNLGVHISKVRSLTLDVKVWEPSVLTLFQSLGNVYVNSVWEELLNSESRTSSASRSSGTPKSDRPRKLLVRKPGFNDPISVKELFIHAKYSERIFVRKAIDSQHFQAVFQEIWENVRANDKKSVYRHIVCSEADVNALRGQASYTVSLPLSKMMQMEETLEAKFKSIEEEFQENPAGYSNSRGDGESMVREETSNDCSLLHLACLSADIGMVELLLQYGAKINATDSKGRTPLHHCIISRRYAIARLLLMRGGDPNAVDKDSNIPVKYASQTDLNDSELIALLTDSKR

SEQ ID NO: 96027 - protein, 840 aa, Arabidopsis thaliana
  peptide (1)..(840): Ceres Seq. ID no. 12731568
  misc_feature (510)..(655): Pfam Name: Putative GTPase activating protein for Arf Pfam Description: Putative GTPase activating protein for Arf
  misc_feature (343)..(838): Homolog of NCBI NO: 30684352 NR Description: ARF GTPase-activating domain-containing protein
  misc_feature (1)..(194): Homolog of NCBI NO: 30684352 NR Description: ARF GTPase-activating domain-containing protein
  misc_feature (343)..(838): Homolog of NCBI NO: 11358303 NR Description: hypothetical protein T31B5.120 - Arabidopsis >gi|7529285|emb|CAB86637.1| putative protein [Arabidopsis
  misc_feature (9)..(194): Homolog of NCBI NO: 11358303 NR Description: hypothetical protein T31B5.120 - Arabidopsis >gi|7529285|emb|CAB86637.1| putative protein [Arabidopsis
  misc_feature (341)..(840): Homolog of NCBI NO: 38175545 NR Description: putative ARF GTPase-activating domain-containing
  misc_feature (1)..(158): Homolog of NCBI NO: 38175545 NR Description: putative ARF GTPase-activating domain-containing
  misc_feature (174)..(318): Homolog of NCBI NO: 11358303 NR Description: hypothetical protein T31B5.120 - Arabidopsis >gi|7529285|emb|CAB86637.1| putative protein [Arabidopsis
  misc_feature (174)..(318): Homolog of NCBI NO: 30684352 NR Description: ARF GTPase-activating domain-containing protein
  misc_feature (144)..(298): Homolog of NCBI NO: 38175545 NR Description: putative ARF GTPase-activating domain-containing
  misc_feature (166)..(493): Homolog of NCBI NO: 30681946 NR Description: ARF GTPase-activating domain-containing protein
MFRQQMQSMEESAELLRLRCLRFYKGCRKYTEGLGEGYDADIGFVNALESFGGGHNDPVCVAFGGPVMTKFTIALREIGTYKEVLRSQVEHMLSDRLLQFVNGDVHEVKEARKRFDKATITYDQAREKYLSLRKSTRLDVAATIEEDLHSARTTFEQARFHLVSALSNAESKKRFEFLEAVSGTMDAHLRFFKQASFFLKTIFRARPQITLDPIRLGYELLHQMEPFINQVLAYAHQSRECANYEMASLNERMQEYQRQVDRETRNSCVSPTGDGMRHNSRNSQKVIEAVMQSAAKGKVQTIRQGYLSKRSSNLRGDWKRRFFILDSRGMLYYYRKPWNWSSGNGSRSVVHRNMASENSPGLLSRWLSSHYHGGVHDEKPVARHTVNLLTSTIKVDADQTDLRFCFRIISPTKVYTLQAENAQDQMDWIEKITGVIASLLSFQTPERAIMRLSTVDGGDTFSASDSGSLADPYDIEQAESGESTVEHPMTGGNRSRFSGCLQQHDMVKTEKPIDVLTRVLGNERCADCGAPEPDWASLNLGVLICIECSGIHRNLGVHISKVRSLTLDVKVWEPSVLTLFQSLGNVYVNSVWEELLNSESRTSSASRSSGTPKSDRPRKLLVRKPGFNDPISVKELFIHAKYSERIFVRKAIDSQHFQAVFQEIWENVRANDKKSVYRHIVCSEADVNALRGQASYTVSLPLSKMMQMEETLEAKFKSIEEEFQENPAGYSNSRGDGESMVREETSNDCSLLHLACLSADIGMVELLLQYGAKINATDSKGRTPLHHCIISRRYAIARLLLMRGGDPNAVDKDSNIPVKYASQTDLNDSELIALLTDSKR

SEQ ID NO: 96028 - protein, 835 aa, Arabidopsis thaliana
  peptide (1)..(835): Ceres Seq. ID no. 12731569
  misc_feature (505)..(650): Pfam Name: Putative GTPase activating protein for Arf Pfam Description: Putative GTPase activating protein for Arf
  misc_feature (338)..(833): Homolog of NCBI NO: 30684352 NR Description: ARF GTPase-activating domain-containing protein
  misc_feature (1)..(189): Homolog of NCBI NO: 30684352 NR Description: ARF GTPase-activating domain-containing protein
  misc_feature (338)..(833): Homolog of NCBI NO: 11358303 NR Description: hypothetical protein T31B5.120 - Arabidopsis >gi|7529285|emb|CAB86637.1| putative protein [Arabidopsis
  misc_feature (4)..(189): Homolog of NCBI NO: 11358303 NR Description: hypothetical protein T31B5.120 - Arabidopsis >gi|7529285|emb|CAB86637.1| putative protein [Arabidopsis
  misc_feature (336)..(835): Homolog of NCBI NO: 38175545 NR Description: putative ARF GTPase-activating domain-containing
  misc_feature (1)..(153): Homolog of NCBI NO: 38175545 NR Description: putative ARF GTPase-activating domain-containing
  misc_feature (169)..(313): Homolog of NCBI NO: 11358303 NR Description: hypothetical protein T31B5.120 - Arabidopsis >gi|7529285|emb|CAB86637.1| putative protein [Arabidopsis
  misc_feature (169)..(313): Homolog of NCBI NO: 30684352 NR Description: ARF GTPase-activating domain-containing protein
  misc_feature (139)..(293): Homolog of NCBI NO: 38175545 NR Description: putative ARF GTPase-activating domain-containing
  misc_feature (161)..(488): Homolog of NCBI NO: 30681946 NR Description: ARF GTPase-activating domain-containing protein
MQSMEESAELLRLRCLRFYKGCRKYTEGLGEGYDADIGFVNALESFGGGHNDPVCVAFGGPVMTKFTIALREIGTYKEVLRSQVEHMLSDRLLQFVNGDVHEVKEARKRFDKATITYDQAREKYLSLRKSTRLDVAATIEEDLHSARTTFEQARFHLVSALSNAESKKRFEFLEAVSGTMDAHLRFFKQASFFLKTIFRARPQITLDPIRLGYELLHQMEPFINQVLAYAHQSRECANYEMASLNERMQEYQRQVDRETRNSCVSPTGDGMRHNSRNSQKVIEAVMQSAAKGKVQTIRQGYLSKRSSNLRGDWKRRFFILDSRGMLYYYRKPWNWSSGNGSRSVVHRNMASENSPGLLSRWLSSHYHGGVHDEKPVARHTVNLLTSTIKVDADQTDLRFCFRIISPTKVYTLQAENAQDQMDWIEKITGVIASLLSFQTPERAIMRLSTVDGGDTFSASDSGSLADPYDIEQAESGESTVEHPMTGGNRSRFSGCLQQHDMVKTEKPIDVLTRVLGNERCADCGAPEPDWASLNLGVLICIECSGIHRNLGVHISKVRSLTLDVKVWEPSVLTLFQSLGNVYVNSVWEELLNSESRTSSASRSSGTPKSDRPRKLLVRKPGFNDPISVKELFIHAKYSERIFVRKAIDSQHFQAVFQEIWENVRANDKKSVYRHIVCSEADVNALRGQASYTVSLPLSKMMQMEETLEAKFKSIEEEFQENPAGYSNSRGDGESMVREETSNDCSLLHLACLSADIGMVELLLQYGAKINATDSKGRTPLHHCIISRRYAIARLLLMRGGDPNAVDKDSNIPVKYASQTDLNDSELIALLTDSKR

SEQ ID NO: 96029 - DNA, 3506 bp, Arabidopsis thaliana
  misc_feature (1)..(3506): Ceres Seq. ID no. 12731570
  misc_feature: MA Experiment ID: 20000794 Result: Up-regulated in Transcription
  misc_feature: MA Experiment 20000794 PARAMETER Experiment Name: At_Petals_P Parameter: Age (day) Value: 23-25 days
  misc_feature: MA Experiment 20000794 PARAMETER Experiment Name: At_Petals_P Parameter: Plant Line Value: WS
  misc_feature: MA Experiment 20000794 PARAMETER Experiment Name: At_Petals_P Parameter: Tissue Value: Petals vs. Whole plant
  misc_feature: MA Experiment ID: 20001757 Result: Down-regulated in Transcription
  misc_feature: MA Experiment 20001757 PARAMETER Experiment Name: At_50mM_NH4NO3_L-to-H_P Parameter: Timepoint (hr) Value: 6
  misc_feature: MA Experiment 20001757 PARAMETER Experiment Name: At_50mM_NH4NO3_L-to-H_P Parameter: Tissue Value: Leaf
  misc_feature: MA Experiment 20001757 PARAMETER Experiment Name: At_50mM_NH4NO3_L-to-H_P Parameter: Treatment Value: 50mM NH4NO3 vs 100mM Mannitol
atcggtgatgatgggatcgatgttgttcaggaagagaactttggtcacgagagcgaattttttacttttccggtcgttttccgttaacgttgagaaactttccgacgcatcagctgaaatagcgggaattctcaagcaagagaactggcgtgacactctggtatcttcgaatctttcaatcgagataaatccagaagtagttctctccgttttacgatccaaacgcgtcgatgatccctctaagcttttgagtttcttcaactgggtcgattctcaaaaagtcacagagcagaaattggattcgttttcgtttctcgctttggatttgtgtaatttcggtagttttgagaaagctcttagtgttgtagaacggatgattgagagaaattggcctgtagctgaggtttggagttcgattgtgagatgttcacaagagtttgtgggaaagagtgatgatggagttctatttgggatattgtttgatggatacattgcaaaagggtatatagaagaagctgtgtttgtgttttctagctctatgggtttggaattggttcctcgtttgtcacgatgtaaagttttgttggatgcgttgttgaggtggaaccggctggatttgttttgggatgtgtataaggggatggttgagagaaatgtagtatttgatgttaagacctatcatatgttgattattgctcattgtagggctgggaatgttcagttggggaaagatgttctttttaaaacggaaaaagaattcaggacggctactttgaatgtggatggagcacttaagcttaaggagtcgatgatttgcaaaggattggtgccattgaagtatacatacgatgtacttatagatgggttgtgtaagataaagagactagaagatgctaaatcgttgctggtagagatggatagtttaggtgtgtctcttgataatcatacttatagtttactgattgatggcttactgaagggtagaaatgcagatgctgcgaaaggactagtccatgagatggtttcacatggtattaacatcaaaccttatatgtatgattgttgtatttgtgtgatgtcaaaggaaggggtgatggagaaggcaaaggctctctttgatggaatgatcgcatccggactgataccacaggctcaggcttatgctagtctgatcgaaggatactgtcgagaaaagaatgtacgtcagggttatgagttacttgttgaaatgaaaaagaggaacattgtcatatctccatatacttatggtacagtggtgaaaggcatgtgctcttctggggatctcgatggagcttataacattgtgaaggaaatgattgcaagtggttgcagacccaatgtggttatatataccacattgatcaaaacctttctccagaatagtaggtttggagatgcaatgagggtgttaaaagaaatgaaagaacaaggaatcgcaccagacatattttgctacaattcccttataattggcctttcaaaagctaaaagaatggacgaagcaaggtcttttctggttgaaatggtcgagaacggattaaagcctaatgctttcacctatggggcttttatcagtggatatatagaggcaagtgaatttgcatctgcagataagtatgtgaaagagatgcgggaatgtggcgtacttccaaataaggttctttgcacgggtttgatcaatgagtattgcaaaaaggggaaagtaatagaggcgtgttcagcatatagatccatggttgaccaagggatcctgggggatgctaaaacatacactgttcttatgaatggtctttttaaaaatgataaagtagatgatgccgaggagattttccgcgaaatgcgtgggaagggtattgcacctgatgtattctcttatggtgttctcattaatggattttctaagttgggaaatatgcagaaggcttctagtatttttgatgagatggttgaagaaggtttgactcctaatgttatcatatacaacatgttacttggtggcttttgcagatctggtgaaattgaaaaagctaaggaactgcttgatgaaatgtcagttaaaggtcttcacccgaatgcagtgacctactgtacaattatagatggatattgcaaatctggggatctagctgaggcttttcggttatttgatgagatgaaactaaagggattagttcctgatagttttgtgtacacaacactcgtggatgggtgttgcagattgaacgatgtggaaagagctataaccatctttgggacaaacaagaagggctgtgcttctagtaccgcccctttcaatgctttgatcaattgggtttttaagtttggaaaaacagaattaaaaacagaagtgttaaatcggctaatggatgggtcgtttgataggtttggcaagcccaatgacgtaacatacaacattatgattgattatctatgcaaggaaggaaacttggaagctgcaaaggagctctttcaccagatgcagaacgctaatctgatgcctactgttataacttacacatctcttctaaacgggtatgataaaatgggtagaagagctgaaatgtttcctgtatttgatgaggcgattgctgcaggaattgaaccagaccacataatgtatagtgttatcatcaatgctttcctgaaagaagggatgacgacaaaagcacttgtgcttgtggatcaaatgtttgctaagaacgctgttgatgatgggtgtaagctaagtatttcaacatgccgggctctactctctggttttgctaaagtgggagaaatggaggtagctgagaaggttatggagaacatggttcgactccaatatattcctgattctgcgactgttattgagttaatcaatgaaagttgcatttcctcaaaccaaagagtggaagctgatgcagttccatagttttctagacggaaagctagagcagataaacttccttctttttctttgtggctaaaaacggagtctgctgcttttagtttggtttacggcaaatttctgatgggctgcaattgtggcaaaatttacaagctttatcatctcacttttgatgatctctactcagtctcaatcttctgatatgtcattgtatattttttcagttaccattaagaatctggaggtgctgttcctgaaacaatttgtgtctgctcataaactcttctggaccaattcatttacttcagaacggtttgccttcagctagacatgttggatcccattgatttacatgggagcagtttccattacgatgacgacaatcagaagttgacgatgaaaaggagacgcatgggagcaatttattctgcaacttcctctgttttcttagtctcggaaaaatcctgttgaagaacagagatgacagttttatactgatttttttatctataaaaagattttggtgtgcgaatgttactatgatgatcaacttatattaagttatttattcatcaatatcaaaatctggctggtgatt

SEQ ID NO: 96030 - protein, 976 aa, Arabidopsis thaliana
  peptide (1)..(976): Ceres Seq. ID no. 12731571
  misc_feature (420)..(454): Pfam Name: PPR repeat Pfam Description: PPR repeat
  misc_feature (79)..(944): Homolog of NCBI NO: 34394343 NR Description: putative fertility restorer homologue [Oryza
  misc_feature (264)..(975): Homolog of NCBI NO: 15221621 NR Description: unknown protein; protein id: At1g62910.1
  misc_feature (145)..(971): Homolog of NCBI NO: 6630464 NR Description: F23N19.4 [Arabidopsis thaliana]
  misc_feature (260)..(909): Homolog of NCBI NO: 15221300 NR Description: hypothetical protein; protein id: At1g74580.1
  misc_feature (277)..(909): Homolog of NCBI NO: 34394163 NR Description: putative fertility restorer homologue [Oryza
  misc_feature (269)..(902): Homolog of NCBI NO: 37535672 NR Description: putative chloroplast RNA processing protein
  misc_feature (106)..(965): Homolog of NCBI NO: 15238562 NR Description: putative protein; protein id: At5g59900.1 thaliana] >gi|9757911|dbj|BAB08358.1|
  misc_feature (263)..(936): Homolog of NCBI NO: 33146978 NR Description: putative pentatricopeptide (PPR)
  misc_feature (255)..(660): Homolog of NCBI NO: 25404938 NR Description: protein F1N19.15 [imported] - Arabidopsis >gi|6633829|gb|AAF19688.1|AC009519_22 F1N19.15 [Arabidopsis
  misc_feature (255)..(660): Homolog of NCBI NO: 15217683 NR Description: hypothetical protein; protein id: At1g64580.1
SVMMGSMLFRKRTLVTRANFLLFRSFSVNVEKLSDASAEIAGILKQENWRDTLVSSNLSIEINPEVVLSVLRSKRVDDPSKLLSFFNWVDSQKVTEQKLDSFSFLALDLCNFGSFEKALSVVERMIERNWPVAEVWSSIVRCSQEFVGKSDDGVLFGILFDGYIAKGYIEEAVFVFSSSMGLELVPRLSRCKVLLDALLRWNRLDLFWDVYKGMVERNVVFDVKTYHMLIIAHCRAGNVQLGKDVLFKTEKEFRTATLNVDGALKLKESMICKGLVPLKYTYDVLIDGLCKIKRLEDAKSLLVEMDSLGVSLDNHTYSLLIDGLLKGRNADAAKGLVHEMVSHGINIKPYMYDCCICVMSKEGVMEKAKALFDGMIASGLIPQAQAYASLIEGYCREKNVRQGYELLVEMKKRNIVISPYTYGTVVKGMCSSGDLDGAYNIVKEMIASGCRPNVVIYTTLIKTFLQNSRFGDAMRVLKEMKEQGIAPDIFCYNSLIIGLSKAKRMDEARSFLVEMVENGLKPNAFTYGAFISGYIEASEFASADKYVKEMRECGVLPNKVLCTGLINEYCKKGKVIEACSAYRSMVDQGILGDAKTYTVLMNGLFKNDKVDDAEEIFREMRGKGIAPDVFSYGVLINGFSKLGNMQKASSIFDEMVEEGLTPNVIIYNMLLGGFCRSGEIEKAKELLDEMSVKGLHPNAVTYCTIIDGYCKSGDLAEAFRLFDEMKLKGLVPDSFVYTTLVDGCCRLNDVERAITIFGTNKKGCASSTAPFNALINWVFKFGKTELKTEVLNRLMDGSFDRFGKPNDVTYNIMIDYLCKEGNLEAAKELFHQMQNANLMPTVITYTSLLNGYDKMGRRAEMFPVFDEAIAAGIEPDHIMYSVIINAFLKEGMTTKALVLVDQMFAKNAVDDGCKLSISTCRALLSGFAKVGEMEVAEKVMENMVRLQYIPDSATVIELINESCISSNQRVEADAVP

SEQ ID NO: 96031 - protein, 974 aa, Arabidopsis thaliana
  peptide (1)..(974): Ceres Seq. ID no. 12731572
  misc_feature (418)..(452): Pfam Name: PPR repeat Pfam Description: PPR repeat
  misc_feature (77)..(942): Homolog of NCBI NO: 34394343 NR Description: putative fertility restorer homologue [Oryza
  misc_feature (262)..(973): Homolog of NCBI NO: 15221621 NR Description: unknown protein; protein id: At1g62910.1
  misc_feature (143)..(969): Homolog of NCBI NO: 6630464 NR Description: F23N19.4 [Arabidopsis thaliana]
  misc_feature (258)..(907): Homolog of NCBI NO: 15221300 NR Description: hypothetical protein; protein id: At1g74580.1
  misc_feature (275)..(907): Homolog of NCBI NO: 34394163 NR Description: putative fertility restorer homologue [Oryza
  misc_feature (267)..(900): Homolog of NCBI NO: 37535672 NR Description: putative chloroplast RNA processing protein
  misc_feature (104)..(963): Homolog of NCBI NO: 15238562 NR Description: putative protein; protein id: At5g59900.1 thaliana] >gi|9757911|dbj|BAB08358.1|
  misc_feature (261)..(934): Homolog of NCBI NO: 33146978 NR Description: putative pentatricopeptide (PPR)
  misc_feature (253)..(658): Homolog of NCBI NO: 25404938 NR Description: protein F1N19.15 [imported] - Arabidopsis >gi|6633829|gb|AAF19688.1|AC009519_22 F1N19.15 [Arabidopsis
  misc_feature (253)..(658): Homolog of NCBI NO: 15217683 NR Description: hypothetical protein; protein id: At1g64580.1
MMGSMLFRKRTLVTRANFLLFRSFSVNVEKLSDASAEIAGILKQENWRDTLVSSNLSIEINPEVVLSVLRSKRVDDPSKLLSFFNWVDSQKVTEQKLDSFSFLALDLCNFGSFEKALSVVERMIERNWPVAEVWSSIVRCSQEFVGKSDDGVLFGILFDGYIAKGYIEEAVFVFSSSMGLELVPRLSRCKVLLDALLRWNRLDLFWDVYKGMVERNVVFDVKTYHMLIIAHCRAGNVQLGKDVLFKTEKEFRTATLNVDGALKLKESMICKGLVPLKYTYDVLIDGLCKIKRLEDAKSLLVEMDSLGVSLDNHTYSLLIDGLLKGRNADAAKGLVHEMVSHGINIKPYMYDCCICVMSKEGVMEKAKALFDGMIASGLIPQAQAYASLIEGYCREKNVRQGYELLVEMKKRNIVISPYTYGTVVKGMCSSGDLDGAYNIVKEMIASGCRPNVVIYTTLIKTFLQNSRFGDAMRVLKEMKEQGIAPDIFCYNSLIIGLSKAKRMDEARSFLVEMVENGLKPNAFTYGAFISGYIEASEFASADKYVKEMRECGVLPNKVLCTGLINEYCKKGKVIEACSAYRSMVDQGILGDAKTYTVLMNGLFKNDKVDDAEEIFREMRGKGIAPDVFSYGVLINGFSKLGNMQKASSIFDEMVEEGLTPNVIIYNMLLGGFCRSGEIEKAKELLDEMSVKGLHPNAVTYCTIIDGYCKSGDLAEAFRLFDEMKLKGLVPDSFVYTTLVDGCCRLNDVERAITIFGTNKKGCASSTAPFNALINWVFKFGKTELKTEVLNRLMDGSFDRFGKPNDVTYNIMIDYLCKEGNLEAAKELFHQMQNANLMPTVITYTSLLNGYDKMGRRAEMFPVFDEAIAAGIEPDHIMYSVIINAFLKEGMTTKALVLVDQMFAKNAVDDGCKLSISTCRALLSGFAKVGEMEVAEKVMENMVRLQYIPDSATVIELINESCISSNQRVEADAVP

SEQ ID NO: 96032 - protein, 973 aa, Arabidopsis thaliana
  peptide (1)..(973): Ceres Seq. ID no. 12731573
  misc_feature (417)..(451): Pfam Name: PPR repeat Pfam Description: PPR repeat
  misc_feature (76)..(941): Homolog of NCBI NO: 34394343 NR Description: putative fertility restorer homologue [Oryza
  misc_feature (261)..(972): Homolog of NCBI NO: 15221621 NR Description: unknown protein; protein id: At1g62910.1
  misc_feature (142)..(968): Homolog of NCBI NO: 6630464 NR Description: F23N19.4 [Arabidopsis thaliana]
  misc_feature (257)..(906): Homolog of NCBI NO: 15221300 NR Description: hypothetical protein; protein id: At1g74580.1
  misc_feature (274)..(906): Homolog of NCBI NO: 34394163 NR Description: putative fertility restorer homologue [Oryza
  misc_feature (266)..(899): Homolog of NCBI NO: 37535672 NR Description: putative chloroplast RNA processing protein
  misc_feature (103)..(962): Homolog of NCBI NO: 15238562 NR Description: putative protein; protein id: At5g59900.1 thaliana] >gi|9757911|dbj|BAB08358.1|
  misc_feature (260)..(933): Homolog of NCBI NO: 33146978 NR Description: putative pentatricopeptide (PPR)
  misc_feature (252)..(657): Homolog of NCBI NO: 25404938 NR Description: protein F1N19.15 [imported] - Arabidopsis >gi|6633829|gb|AAF19688.1|AC009519_22 F1N19.15 [Arabidopsis
  misc_feature (252)..(657): Homolog of NCBI NO: 15217683 NR Description: hypothetical protein; protein id: At1g64580.1
MGSMLFRKRTLVTRANFLLFRSFSVNVEKLSDASAEIAGILKQENWRDTLVSSNLSIEINPEVVLSVLRSKRVDDPSKLLSFFNWVDSQKVTEQKLDSFSFLALDLCNFGSFEKALSVVERMIERNWPVAEVWSSIVRCSQEFVGKSDDGVLFGILFDGYIAKGYIEEAVFVFSSSMGLELVPRLSRCKVLLDALLRWNRLDLFWDVYKGMVERNVVFDVKTYHMLIIAHCRAGNVQLGKDVLFKTEKEFRTATLNVDGALKLKESMICKGLVPLKYTYDVLIDGLCKIKRLEDAKSLLVEMDSLGVSLDNHTYSLLIDGLLKGRNADAAKGLVHEMVSHGINIKPYMYDCCICVMSKEGVMEKAKALFDGMIASGLIPQAQAYASLIEGYCREKNVRQGYELLVEMKKRNIVISPYTYGTVVKGMCSSGDLDGAYNIVKEMIASGCRPNVVIYTTLIKTFLQNSRFGDAMRVLKEMKEQGIAPDIFCYNSLIIGLSKAKRMDEARSFLVEMVENGLKPNAFTYGAFISGYIEASEFASADKYVKEMRECGVLPNKVLCTGLINEYCKKGKVIEACSAYRSMVDQGILGDAKTYTVLMNGLFKNDKVDDAEEIFREMRGKGIAPDVFSYGVLINGFSKLGNMQKASSIFDEMVEEGLTPNVIIYNMLLGGFCRSGEIEKAKELLDEMSVKGLHPNAVTYCTIIDGYCKSGDLAEAFRLFDEMKLKGLVPDSFVYTTLVDGCCRLNDVERAITIFGTNKKGCASSTAPFNALINWVFKFGKTELKTEVLNRLMDGSFDRFGKPNDVTYNIMIDYLCKEGNLEAAKELFHQMQNANLMPTVITYTSLLNGYDKMGRRAEMFPVFDEAIAAGIEPDHIMYSVIINAFLKEGMTTKALVLVDQMFAKNAVDDGCKLSISTCRALLSGFAKVGEMEVAEKVMENMVRLQYIPDSATVIELINESCISSNQRVEADAVP

SEQ ID NO: 96033 - DNA, 1671 bp, Arabidopsis thaliana
  misc_feature (1)..(1671): Ceres Seq. ID no. 12731582
  misc_feature: MA Experiment ID: 20000173 Result: Up-regulated in Transcription
  misc_feature: MA Experiment 20000173 PARAMETER Experiment Name: At_42deg_Heat_P Parameter: Age (day) Value: 14
  misc_feature: MA Experiment 20000173 PARAMETER Experiment Name: At_42deg_Heat_P Parameter: Organism Value: A. thaliana
  misc_feature: MA Experiment 20000173 PARAMETER Experiment Name: At_42deg_Heat_P Parameter: Plant Line Value: WS
  misc_feature: MA Experiment 20000173 PARAMETER Experiment Name: At_42deg_Heat_P Parameter: Temperature (deg C) Value: 42 vs. 22
  misc_feature: MA Experiment 20000173 PARAMETER Experiment Name: At_42deg_Heat_P Parameter: Timepoint (hr) Value: 6
  misc_feature: MA Experiment 20000173 PARAMETER Experiment Name: At_42deg_Heat_P Parameter: Tissue Value: Aerial
  misc_feature: MA Experiment ID: 20000573 Result: Down-regulated in Transcription
  misc_feature: MA Experiment 20000573 PARAMETER Experiment Name: At_100uM_ABA_Mutants__P Parameter: Organism Value: A. thaliana
  misc_feature: MA Experiment 20000573 PARAMETER Experiment Name: At_100uM_ABA_Mutants__P Parameter: Plant Line Value: CS22 vs. Ler wt
  misc_feature: MA Experiment 20000573 PARAMETER Experiment Name: At_100uM_ABA_Mutants__P Parameter: Timepoint (hr) Value: N/A
  misc_feature: MA Experiment 20000573 PARAMETER Experiment Name: At_100uM_ABA_Mutants__P Parameter: Tissue Value: Whole Plant
  misc_feature: MA Experiment 20000573 PARAMETER Experiment Name: At_100uM_ABA_Mutants__P Parameter: Treatment Value: None
  misc_feature: MA Experiment ID: 20000574 Result: Down-regulated in Transcription
  misc_feature: MA Experiment 20000574 PARAMETER Experiment Name: At_100uM_ABA_Mutants__P Parameter: Organism Value: A. thaliana
  misc_feature: MA Experiment 20000574 PARAMETER Experiment Name: At_100uM_ABA_Mutants__P Parameter: Plant Line Value: CS23 vs. Ler wt
  misc_feature: MA Experiment 20000574 PARAMETER Experiment Name: At_100uM_ABA_Mutants__P Parameter: Timepoint (hr) Value: N/A
  misc_feature: MA Experiment 20000574 PARAMETER Experiment Name: At_100uM_ABA_Mutants__P Parameter: Tissue Value: Whole Plant
  misc_feature: MA Experiment 20000574 PARAMETER Experiment Name: At_100uM_ABA_Mutants__P Parameter: Treatment Value: None
  misc_feature: MA Experiment ID: 20001248 Result: Down-regulated in Transcription
  misc_feature: MA Experiment 20001248 PARAMETER Experiment Name: At_Far-red-induction_P Parameter: Age (day) Value: 7
  misc_feature: MA Experiment 20001248 PARAMETER Experiment Name: At_Far-red-induction_P Parameter: Light Value: Far-red vs. White
  misc_feature: MA Experiment 20001248 PARAMETER Experiment Name: At_Far-red-induction_P Parameter: Organism Value: A. thaliana
  misc_feature: MA Experiment 20001248 PARAMETER Experiment Name: At_Far-red-induction_P Parameter: Plant Line Value: Columbia
  misc_feature: MA Experiment 20001248 PARAMETER Experiment Name: At_Far-red-induction_P Parameter: Timepoint (hr) Value: 4
  misc_feature: MA Experiment 20001248 PARAMETER Experiment Name: At_Far-red-induction_P Parameter: Tissue Value: Whole Plant
  misc_feature: MA Experiment ID: 20001451 Result: Up-regulated in Transcription
  misc_feature: MA Experiment 20001451 PARAMETER Experiment Name: At_Far-red-induction_P Parameter: Age (day) Value: 7
  misc_feature: MA Experiment 20001451 PARAMETER Experiment Name: At_Far-red-induction_P Parameter: Light Value: Far-red vs. White
  misc_feature: MA Experiment 20001451 PARAMETER Experiment Name: At_Far-red-induction_P Parameter: Organism Value: A. thaliana
  misc_feature: MA Experiment 20001451 PARAMETER Experiment Name: At_Far-red-induction_P Parameter: Plant Line Value: Columbia
  misc_feature: MA Experiment 20001451 PARAMETER Experiment Name: At_Far-red-induction_P Parameter: Timepoint (hr) Value: 24
  misc_feature: MA Experiment 20001451 PARAMETER Experiment Name: At_Far-red-induction_P Parameter: Tissue Value: Whole Plant
  misc_feature: MA Experiment ID: 20001905 Result: Up-regulated in Transcription
  misc_feature: MA Experiment 20001905 PARAMETER Experiment Name: At_Drought_Reproduction_P Parameter: Age (day) Value: 40
  misc_feature: MA Experiment 20001905 PARAMETER Experiment Name: At_Drought_Reproduction_P Parameter: Organism Value: A. thaliana
  misc_feature: MA Experiment 20001905 PARAMETER Experiment Name: At_Drought_Reproduction_P Parameter: Plant Line Value: WS
  misc_feature: MA Experiment 20001905 PARAMETER Experiment Name: At_Drought_Reproduction_P Parameter: Timepoint (day) Value: 10
  misc_feature: MA Experiment 20001905 PARAMETER Experiment Name: At_Drought_Reproduction_P Parameter: Tissue Value: Rosettes
  misc_feature: MA Experiment 20001905 PARAMETER Experiment Name: At_Drought_Reproduction_P Parameter: Treatment Value: Drought vs. No Drought
ctctctctctctctctcttttgccgcagcgagatctctctcttcttctctctctctctggctctatgcatccacctgtctccgtaatttgatggacaagaagaaactgccacaccctaacccattcaattcctccgatcacccaccgacttactctgctctctagaaatttccctacgagaaagcttcttccttttgtctttttgcttctcctttcttcttctcttctatttcttctctctactctctactttcttctgtttttggtaatcggatggcgcgaaatctgccatgggttctgcttattattgtggtatcgtgtcttgtttcaacacttgaagctagtgaaggagattctgattctctttacaagtcatgtgttgatcaatgtcagaaaactggatgcgtgggggatacttgcttccaacactgtaaattttcagctgatggaaaagccattgacggtccatggtacatgcaagagccactttacctgagatggaaacaatgggattgccaaagtgattgtcagtacgaatgcatgatgacaagagaagaagaaagaaaaagaaacggagagagacctaccaagtatttcggtaaatggccactcaaacatgtctacggaattcaggaacctgtctctgttgctttctctgctctggatcttgcaatgcagtttcaaggatgggtctcatatttcatcctcgtttactataaattgcctctccagccaaatcggaaaacgtactacgagtacaatggaatagtgcatatctacgccatcattgtaatgaattcactcttctggagtagtatttgtcatagcagagatgttgaattgacggagaggctagattactcttcagctactgtattagccggattttcgcttattctagcaatactccggtccttcagtattcaagatcaatctgtcaaaatcatggttactgcacctattcttgcggttgttgcaactcatattctctaccttaatttctacaacctcgatgaagggcttcactggaaagttatattcgggattggaggaatagagctagtagtatggggattatgggcggctttaacgtcacatccatcaaagtggaagctaagagctttcttgatctcgagcatactcacattgtgtcttagaatgttcgacttccctccgtacaaaggctacatcgatgctcatgctctttggcgcggtgcagggattcctctttcttacctttggtggagtttcgtctgcgatgacgcagttttcagaaccaccgttaatctcaagaaatccaagtgatcatgaacaaatgatacaaaagtctcgtttatcttatatttttccggcgagtttctccggtgttcagaagttgtttttaggcgtgttttcgcagaagaagcaatgtttttggttcttctgtggtgaatctgcttcgctttttggggtcttcctctctctctgtttttatgtattatttttgttgttgttggttttttgtttttgctctcaaggcttgtcggccggagagttttaccgtcgagagggaccgatcttttaggatcaccagtttcattttcccgccctttgactcaaatcaaaagtccttttctagttatcatttttctcaatgtaaaaaaatgttctattaatctgtttttttattcc

SEQ ID NO: 96034 - protein, 343 aa, Arabidopsis thaliana
  peptide (1)..(343): Ceres Seq. ID no. 12731583
  misc_feature (69)..(339): Pfam Name: Per1-like Pfam Description: Per1-like
  misc_feature (1)..(343): Homolog of NCBI NO: 18424554 NR Description: putative protein; protein id: At5g62130.1, by cDNA: gi_15294203, supported by cDNA: gi_20147282 [Arabidopsis >gi|15294204|gb|AAK95279.1|AF410293_1 AT5g62130/mtg10_150
  misc_feature (68)..(343): Homolog of NCBI NO: 10176931 NR Description: gene_id:MTG10.16~unknown protein [Arabidopsis
  misc_feature (7)..(343): Homolog of NCBI NO: 15219283 NR Description: unknown protein; protein id: At1g16560.1
  misc_feature (7)..(343): Homolog of NCBI NO: 37536224 NR Description: unknown protein [Oryza sativa (japonica
  misc_feature (36)..(186): Homolog of NCBI NO: 20260110 NR Description: unknown protein [Arabidopsis thaliana]
  misc_feature (8)..(340): Homolog of NCBI NO: 19114746 NR Description: similar to yeast protein involved in Mn2+ [Schizosaccharomyces pombe] >gi|7708605|emb|CAB90152.1| similar yeast protein involved in Mn2+ homeostasis [Schizosaccharomyces
  misc_feature (49)..(343): Homolog of NCBI NO: 19921698 NR Description: CG3271-PB [Drosophila melanogaster]
  misc_feature (49)..(327): Homolog of NCBI NO: 24586036 NR Description: CG3271-PA [Drosophila melanogaster]
  misc_feature (49)..(333): Homolog of NCBI NO: 32949296 NR Description: CAB2 protein [Homo sapiens]
  misc_feature (161)..(333): Homolog of NCBI NO: 22761646 NR Description: unnamed protein product [Homo sapiens]
MARNLPWVLLIIVVSCLVSTLEASEGDSDSLYKSCVDQCQKTGCVGDTCFQHCKFSADGKAIDGPWYMQEPLYLRWKQWDCQSDCQYECMMTREEERKRNGERPTKYFGKWPLKHVYGIQEPVSVAFSALDLAMQFQGWVSYFILVYYKLPLQPNRKTYYEYNGIVHIYAIIVMNSLFWSSICHSRDVELTERLDYSSATVLAGFSLILAILRSFSIQDQSVKIMVTAPILAVVATHILYLNFYNLDEGLHWKVIFGIGGIELVVWGLWAALTSHPSKWKLRAFLISSILTLCLRMFDFPPYKGYIDAHALWRGAGIPLSYLWWSFVCDDAVFRTTVNLKKSK

SEQ ID NO: 96035 - protein, 276 aa, Arabidopsis thaliana
  peptide (1)..(276): Ceres Seq. ID no. 12731584
  misc_feature (2)..(272): Pfam Name: Per1-like Pfam Description: Per1-like
  misc_feature (1)..(276): Homolog of NCBI NO: 18424554 NR Description: putative protein; protein id: At5g62130.1, by cDNA: gi_15294203, supported by cDNA: gi_20147282 [Arabidopsis >gi|15294204|gb|AAK95279.1|AF410293_1 AT5g62130/mtg10_150
  misc_feature (1)..(276): Homolog of NCBI NO: 10176931 NR Description: gene_id:MTG10.16~unknown protein [Arabidopsis
  misc_feature (1)..(276): Homolog of NCBI NO: 15219283 NR Description: unknown protein; protein id: At1g16560.1
  misc_feature (1)..(276): Homolog of NCBI NO: 37536224 NR Description: unknown protein [Oryza sativa (japonica
  misc_feature (1)..(119): Homolog of NCBI NO: 20260110 NR Description: unknown protein [Arabidopsis thaliana]
  misc_feature (1)..(273): Homolog of NCBI NO: 19114746 NR Description: similar to yeast protein involved in Mn2+ [Schizosaccharomyces pombe] >gi|7708605|emb|CAB90152.1| similar yeast protein involved in Mn2+ homeostasis [Schizosaccharomyces
  misc_feature (1)..(276): Homolog of NCBI NO: 19921698 NR Description: CG3271-PB [Drosophila melanogaster]
  misc_feature (1)..(260): Homolog of NCBI NO: 24586036 NR Description: CG3271-PA [Drosophila melanogaster]
  misc_feature (1)..(266): Homolog of NCBI NO: 32949296 NR Description: CAB2 protein [Homo sapiens]
  misc_feature (94)..(266): Homolog of NCBI NO: 22761646 NR Description: unnamed protein product [Homo sapiens]
MQEPLYLRWKQWDCQSDCQYECMMTREEERKRNGERPTKYFGKWPLKHVYGIQEPVSVAFSALDLAMQFQGWVSYFILVYYKLPLQPNRKTYYEYNGIVHIYAIIVMNSLFWSSICHSRDVELTERLDYSSATVLAGFSLILAILRSFSIQDQSVKIMVTAPILAVVATHILYLNFYNLDEGLHWKVIFGIGGIELVVWGLWAALTSHPSKWKLRAFLISSILTLCLRMFDFPPYKGYIDAHALWRGAGIPLSYLWWSFVCDDAVFRTTVNLKKSK

SEQ ID NO: 96036 - protein, 254 aa, Arabidopsis thaliana
  peptide (1)..(254): Ceres Seq. ID no. 12731585
  misc_feature (1)..(250): Pfam Name: Per1-like Pfam Description: Per1-like
  misc_feature (1)..(254): Homolog of NCBI NO: 18424554 NR Description: putative protein; protein id: At5g62130.1, by cDNA: gi_15294203, supported by cDNA: gi_20147282 [Arabidopsis >gi|15294204|gb|AAK95279.1|AF410293_1 AT5g62130/mtg10_150
  misc_feature (1)..(254): Homolog of NCBI NO: 10176931 NR Description: gene_id:MTG10.16~unknown protein [Arabidopsis
  misc_feature (1)..(254): Homolog of NCBI NO: 15219283 NR Description: unknown protein; protein id: At1g16560.1
  misc_feature (1)..(254): Homolog of NCBI NO: 37536224 NR Description: unknown protein [Oryza sativa (japonica
  misc_feature (1)..(97): Homolog of NCBI NO: 20260110 NR Description: unknown protein [Arabidopsis thaliana]
  misc_feature (1)..(251): Homolog of NCBI NO: 19114746 NR Description: similar to yeast protein involved in Mn2+ [Schizosaccharomyces pombe] >gi|7708605|emb|CAB90152.1| similar yeast protein involved in Mn2+ homeostasis [Schizosaccharomyces
  misc_feature (1)..(254): Homolog of NCBI NO: 19921698 NR Description: CG3271-PB [Drosophila melanogaster]
  misc_feature (1)..(238): Homolog of NCBI NO: 24586036 NR Description: CG3271-PA [Drosophila melanogaster]
  misc_feature (1)..(244): Homolog of NCBI NO: 32949296 NR Description: CAB2 protein [Homo sapiens]
  misc_feature (72)..(244): Homolog of NCBI NO: 22761646 NR Description: unnamed protein product [Homo sapiens]
MMTREEERKRNGERPTKYFGKWPLKHVYGIQEPVSVAFSALDLAMQFQGWVSYFILVYYKLPLQPNRKTYYEYNGIVHIYAIIVMNSLFWSSICHSRDVELTERLDYSSATVLAGFSLILAILRSFSIQDQSVKIMVTAPILAVVATHILYLNFYNLDEGLHWKVIFGIGGIELVVWGLWAALTSHPSKWKLRAFLISSILTLCLRMFDFPPYKGYIDAHALWRGAGIPLSYLWWSFVCDDAVFRTTVNLKKSK

SEQ ID NO: 96037 - DNA, 1091 bp, Arabidopsis thaliana
  misc_feature (1)..(1091): Ceres Seq. ID no. 12731590
  misc_feature: MA Experiment ID: 20000184 Result: Down-regulated in Transcription
  misc_feature: MA Experiment 20000184 PARAMETER Experiment Name: At_Shoots__P Parameter: Age (day) Value: 7
  misc_feature: MA Experiment 20000184 PARAMETER Experiment Name: At_Shoots__P Parameter: Tissue Value: Shoots vs. Whole Plant
  misc_feature: MA Experiment ID: 20000227 Result: Up-regulated in Transcription
  misc_feature: MA Experiment 20000227 PARAMETER Experiment Name: At_Root-Tips-vs-Tops_P Parameter: Tissue Value: Root Tips vs. Root Tops
  misc_feature: MA Experiment ID: 20000234 Result: Down-regulated in Transcription
  misc_feature: MA Experiment 20000234 PARAMETER Experiment Name: At_Siliques_P Parameter: Age (day) Value: 21
  misc_feature: MA Experiment 20000234 PARAMETER Experiment Name: At_Siliques_P Parameter: Organism Value: A. thaliana
  misc_feature: MA Experiment 20000234 PARAMETER Experiment Name: At_Siliques_P Parameter: Plant Line Value: WS
  misc_feature: MA Experiment 20000234 PARAMETER Experiment Name: At_Siliques_P Parameter: Tissue Value: Less Than 5mm Siliques vs. Whole Plant
  misc_feature: MA Experiment ID: 20000269 Result: Down-regulated in Transcription
  misc_feature: MA Experiment 20000269 PARAMETER Experiment Name: At_1mM_KNO3_L-vs-H_Roots_P Parameter: Age (day) Value: 7,10,12
  misc_feature: MA Experiment 20000269 PARAMETER Experiment Name: At_1mM_KNO3_L-vs-H_Roots_P Parameter: Organism Value: A. thaliana
  misc_feature: MA Experiment 20000269 PARAMETER Experiment Name: At_1mM_KNO3_L-vs-H_Roots_P Parameter: Plant Line Value: WS
  misc_feature: MA Experiment 20000269 PARAMETER Experiment Name: At_1mM_KNO3_L-vs-H_Roots_P Parameter: Timepoint (day) Value: 7,10,12
  misc_feature: MA Experiment 20000269 PARAMETER Experiment Name: At_1mM_KNO3_L-vs-H_Roots_P Parameter: Tissue Value: Roots
  misc_feature: MA Experiment 20000269 PARAMETER Experiment Name: At_1mM_KNO3_L-vs-H_Roots_P Parameter: Treatment Value: 1mM KNO3 vs. 50mM KNO3
  misc_feature: MA Experiment ID: 20000439 Result: Up-regulated in Transcription
  misc_feature: MA Experiment 20000439 PARAMETER Experiment Name: At_Roots__P Parameter: Age (day) Value: 14 vs. 21
  misc_feature: MA Experiment 20000439 PARAMETER Experiment Name: At_Roots__P Parameter: Organism Value: A. thaliana
  misc_feature: MA Experiment 20000439 PARAMETER Experiment Name: At_Roots__P Parameter: Tissue Value: Roots vs. Whole Plant
  misc_feature: MA Experiment ID: 20000527 Result: Down-regulated in Transcription
  misc_feature: MA Experiment 20000527 PARAMETER Experiment Name: At_10percent_PEG_P Parameter: Age (day) Value: 20
  misc_feature: MA Experiment 20000527 PARAMETER Experiment Name: At_10percent_PEG_P Parameter: Organism Value: A. thaliana
  misc_feature: MA Experiment 20000527 PARAMETER Experiment Name: At_10percent_PEG_P Parameter: Plant Line Value: WS
  misc_feature: MA Experiment 20000527 PARAMETER Experiment Name: At_10percent_PEG_P Parameter: Timepoint (day) Value: 20
  misc_feature: MA Experiment 20000527 PARAMETER Experiment Name: At_10percent_PEG_P Parameter: Tissue Value: Whole Plant
  misc_feature: MA Experiment 20000527 PARAMETER Experiment Name: At_10percent_PEG_P Parameter: Treatment Value: 10percent PEG vs. No Treatment
  misc_feature: MA Experiment ID: 20000794 Result: Down-regulated in Transcription
  misc_feature: MA Experiment 20000794 PARAMETER Experiment Name: At_Petals_P Parameter: Age (day) Value: 23-25 days
  misc_feature: MA Experiment 20000794 PARAMETER Experiment Name: At_Petals_P Parameter: Plant Line Value: WS
  misc_feature: MA Experiment 20000794 PARAMETER Experiment Name: At_Petals_P Parameter: Tissue Value: Petals vs. Whole plant
  misc_feature: MA Experiment ID: 20001768 Result: Up-regulated in Transcription
  misc_feature: MA Experiment 20001768 PARAMETER Experiment Name: At_Far-red-enriched-adult_P Parameter: Age (day) Value: 28
  misc_feature: MA Experiment 20001768 PARAMETER Experiment Name: At_Far-red-enriched-adult_P Parameter: Light Value: Far-red enriched vs. White
  misc_feature: MA Experiment 20001768 PARAMETER Experiment Name: At_Far-red-enriched-adult_P Parameter: Organism Value: A. thaliana
  misc_feature: MA Experiment 20001768 PARAMETER Experiment Name: At_Far-red-enriched-adult_P Parameter: Plant Line Value: Columbia
  misc_feature: MA Experiment 20001768 PARAMETER Experiment Name: At_Far-red-enriched-adult_P Parameter: Timepoint (hr) Value: 1
  misc_feature: MA Experiment 20001768 PARAMETER Experiment Name: At_Far-red-enriched-adult_P Parameter: Tissue Value: Aerial
aaaaaaaaactttctataaaaaaaaaaaacattaagaaacttgccccttccttctctcacagatcattctagggctcctgacagaaaaaccaaataccttttcctctttccatttttgtagaatttcaaatctttctttcctcaatctttcacaatgatcttttcctgtgaagttcttgattttaaatcaccctttcttcactactagcttatctcttcttcaattttctctaccgacattcaattactctccctattcggtgagatctctctctctcttttatgactttggttatgatgactggtcactggcttgtttagggtttcaatctttacagatcttgtggcagaaaaaatcaagtcaaagcaagaaaaatggttagaggaaagatagagatgaagaaaatagaaaacgcaacgagtagacaagtgactttctcaaaaagaagaaatggtttgttgaagaaagcttatgagctctcagtactctgcgatgctcaactctctctcatcatcttctcccagagaggaaggctttatgaattctctagctctgatatgcagaagacgatcgaacgctaccgcaagtacacaaaagatcatgaaaccagcaatcacgactcacaaattcacttgcagcaattgaaacaagaagcaagccacatgataacaaagattgaactccttgagtttcacaagcggaagctattgggacaaggaattgcttcttgttctctagaagagcttcaagaaatcgatagtcaactccaaagaagtctgggaaaggtccgagaaagaaaggctcaattgttcaaggagcagttggagaaactaaaagcaaaggagaaacaattgttagaagagaacgtcaagttacatcaaaagaatgttattaatccatggagaggatcatcgactgatcagcagcaagagaaatacaaagttatagatttgaatttggaagttgaaactgacttattcatcggtttgccaaatagaaactgctagtaacattatataatatgtttatttatttatcatgaaatattcaaaatcattcaataaattgtgaggtaatgatttgggatagt

SEQ ID NO: 96038 - protein, 210 aa, Arabidopsis thaliana
  peptide (1)..(210): Ceres Seq. ID no. 12731591
  misc_feature (74)..(173): Pfam Name: K-box region Pfam Description: K-box region
  misc_feature (1)..(210): Homolog of NCBI NO: 18424559 NR Description: MADS-box protein; protein id: At5g62165.1, by cDNA: gi_15809904, supported by cDNA: gi_17528943, supported cDNA: gi_17978860, supported by cDNA: gi_20465946 [Arabidopsis
  misc_feature (1)..(205): Homolog of NCBI NO: 13384058 NR Description: MADS-box transcription factor FBP22 [Petunia x
  misc_feature (1)..(206): Homolog of NCBI NO: 7446552 NR Description: MADS box protein A - white mustard
  misc_feature (1)..(206): Homolog of NCBI NO: 30171307 NR Description: MADS-box protein [Brassica rapa subsp. pekinensis]
  misc_feature (1)..(206): Homolog of NCBI NO: 15225534 NR Description: MADS-box protein (AGL20); protein id: supported by cDNA: 5467., supported by cDNA: gi_11496164, by cDNA: gi_14326553, supported by cDNA: gi_20334733 [Arabidopsis
  misc_feature (1)..(206): Homolog of NCBI NO: 30171309 NR Description: MADS-box protein [Cardamine flexuosa]
  misc_feature (1)..(206): Homolog of NCBI NO: 33771690 NR Description: MADS-box protein [Brassica rapa]
  misc_feature (1)..(206): Homolog of NCBI NO: 31295609 NR Description: MADS-box protein PTM5 [Populus tremuloides]
  misc_feature (1)..(208): Homolog of NCBI NO: 3493647 NR Description: transcription activator [Pimpinella brachycarpa]
  misc_feature (1)..(206): Homolog of NCBI NO: 1076646 NR Description: MADS box protein mads1 - common tobacco
MVRGKIEMKKIENATSRQVTFSKRRNGLLKKAYELSVLCDAQLSLIIFSQRGRLYEFSSSDMQKTIERYRKYTKDHETSNHDSQIHLQQLKQEASHMITKIELLEFHKRKLLGQGIASCSLEELQEIDSQLQRSLGKVRERKAQLFKEQLEKLKAKEKQLLEENVKLHQKNVINPWRGSSTDQQQEKYKVIDLNLEVETDLFIGLPNRNC

SEQ ID NO: 96039 - protein, 203 aa, Arabidopsis thaliana
  peptide (1)..(203): Ceres Seq. ID no. 12731592
  misc_feature (67)..(166): Pfam Name: K-box region Pfam Description: K-box region
  misc_feature (1)..(203): Homolog of NCBI NO: 18424559 NR Description: MADS-box protein; protein id: At5g62165.1, by cDNA: gi_15809904, supported by cDNA: gi_17528943, supported cDNA: gi_17978860, supported by cDNA: gi_20465946 [Arabidopsis
  misc_feature (1)..(198): Homolog of NCBI NO: 13384058 NR Description: MADS-box transcription factor FBP22 [Petunia x
  misc_feature (1)..(199): Homolog of NCBI NO: 7446552 NR Description: MADS box protein A - white mustard
  misc_feature (1)..(199): Homolog of NCBI NO: 30171307 NR Description: MADS-box protein [Brassica rapa subsp. pekinensis]
  misc_feature (1)..(199): Homolog of NCBI NO: 15225534 NR Description: MADS-box protein (AGL20); protein id: supported by cDNA: 5467., supported by cDNA: gi_11496164, by cDNA: gi_14326553, supported by cDNA: gi_20334733 [Arabidopsis
  misc_feature (1)..(199): Homolog of NCBI NO: 30171309 NR Description: MADS-box protein [Cardamine flexuosa]
  misc_feature (1)..(199): Homolog of NCBI NO: 33771690 NR Description: MADS-box protein [Brassica rapa]
  misc_feature (1)..(199): Homolog of NCBI NO: 31295609 NR Description: MADS-box protein PTM5 [Populus tremuloides]
  misc_feature (1)..(201): Homolog of NCBI NO: 3493647 NR Description: transcription activator [Pimpinella brachycarpa]
  misc_feature (1)..(199): Homolog of NCBI NO: 1076646 NR Description: MADS box protein mads1 - common tobacco
MKKIENATSRQVTFSKRRNGLLKKAYELSVLCDAQLSLIIFSQRGRLYEFSSSDMQKTIERYRKYTKDHETSNHDSQIHLQQLKQEASHMITKIELLEFHKRKLLGQGIASCSLEELQEIDSQLQRSLGKVRERKAQLFKEQLEKLKAKEKQLLEENVKLHQKNVINPWRGSSTDQQQEKYKVIDLNLEVETDLFIGLPNRNC

SEQ ID NO: 96040 - protein, 149 aa, Arabidopsis thaliana
  peptide (1)..(149): Ceres Seq. ID no. 12731593
  misc_feature (13)..(112): Pfam Name: K-box region Pfam Description: K-box region
  misc_feature (1)..(149): Homolog of NCBI NO: 18424559 NR Description: MADS-box protein; protein id: At5g62165.1, by cDNA: gi_15809904, supported by cDNA: gi_17528943, supported cDNA: gi_17978860, supported by cDNA: gi_20465946 [Arabidopsis
  misc_feature (1)..(144): Homolog of NCBI NO: 13384058 NR Description: MADS-box transcription factor FBP22 [Petunia x
  misc_feature (1)..(145): Homolog of NCBI NO: 7446552 NR Description: MADS box protein A - white mustard
  misc_feature (1)..(145): Homolog of NCBI NO: 30171307 NR Description: MADS-box protein [Brassica rapa subsp. pekinensis]
  misc_feature (1)..(145): Homolog of NCBI NO: 15225534 NR Description: MADS-box protein (AGL20); protein id: supported by cDNA: 5467., supported by cDNA: gi_11496164, by cDNA: gi_14326553, supported by cDNA: gi_20334733 [Arabidopsis
  misc_feature (1)..(145): Homolog of NCBI NO: 30171309 NR Description: MADS-box protein [Cardamine flexuosa]
  misc_feature (1)..(145): Homolog of NCBI NO: 33771690 NR Description: MADS-box protein [Brassica rapa]
  misc_feature (1)..(145): Homolog of NCBI NO: 31295609 NR Description: MADS-box protein PTM5 [Populus tremuloides]
  misc_feature (1)..(147): Homolog of NCBI NO: 3493647 NR Description: transcription activator [Pimpinella brachycarpa]
  misc_feature (1)..(145): Homolog of NCBI NO: 1076646 NR Description: MADS box protein mads1 - common tobacco
MQKTIERYRKYTKDHETSNHDSQIHLQQLKQEASHMITKIELLEFHKRKLLGQGIASCSLEELQEIDSQLQRSLGKVRERKAQLFKEQLEKLKAKEKQLLEENVKLHQKNVINPWRGSSTDQQQEKYKVIDLNLEVETDLFIGLPNRNC

SEQ ID NO: 96041 - DNA, 1911 bp, Arabidopsis thaliana
  misc_feature (1)..(1911): Ceres Seq. ID no. 12731598
  misc_feature: MA Experiment ID: 20000180 Result: Down-regulated in Transcription
  misc_feature: MA Experiment 20000180 PARAMETER Experiment Name: At_Germinating_Seeds_P Parameter: Age (hr) Value: 24 vs. 0
  misc_feature: MA Experiment 20000180 PARAMETER Experiment Name: At_Germinating_Seeds_P Parameter: Tissue Value: Germinating Seeds
  misc_feature: MA Experiment ID: 20000185 Result: Up-regulated in Transcription
  misc_feature: MA Experiment 20000185 PARAMETER Experiment Name: At_Roots__P Parameter: Age (day) Value: 7 vs. 21
  misc_feature: MA Experiment 20000185 PARAMETER Experiment Name: At_Roots__P Parameter: Organism Value: A. thaliana
  misc_feature: MA Experiment 20000185 PARAMETER Experiment Name: At_Roots__P Parameter: Tissue Value: Roots vs. Whole Plant
  misc_feature: MA Experiment ID: 20000234 Result: Up-regulated in Transcription
  misc_feature: MA Experiment 20000234 PARAMETER Experiment Name: At_Siliques_P Parameter: Age (day) Value: 21
  misc_feature: MA Experiment 20000234 PARAMETER Experiment Name: At_Siliques_P Parameter: Organism Value: A. thaliana
  misc_feature: MA Experiment 20000234 PARAMETER Experiment Name: At_Siliques_P Parameter: Plant Line Value: WS
  misc_feature: MA Experiment 20000234 PARAMETER Experiment Name: At_Siliques_P Parameter: Tissue Value: Less Than 5mm Siliques vs. Whole Plant
  misc_feature: MA Experiment ID: 20000264 Result: Up-regulated in Transcription
  misc_feature: MA Experiment 20000264 PARAMETER Experiment Name: At_Open_Flower_P Parameter: Age (day) Value: 21
  misc_feature: MA Experiment 20000264 PARAMETER Experiment Name: At_Open_Flower_P Parameter: Plant Line Value: WS
  misc_feature: MA Experiment 20000264 PARAMETER Experiment Name: At_Open_Flower_P Parameter: Tissue Value: Open Flower vs. Whole Plant
  misc_feature: MA Experiment ID: 20000437 Result: Up-regulated in Transcription
  misc_feature: MA Experiment 20000437 PARAMETER Experiment Name: At_Drought_P Parameter: Age (day) Value: 8
  misc_feature: MA Experiment 20000437 PARAMETER Experiment Name: At_Drought_P Parameter: Organism Value: A. thaliana
  misc_feature: MA Experiment 20000437 PARAMETER Experiment Name: At_Drought_P Parameter: Plant Line Value: WS
  misc_feature: MA Experiment 20000437 PARAMETER Experiment Name: At_Drought_P Parameter: Timepoint (hr) Value: 24
  misc_feature: MA Experiment 20000437 PARAMETER Experiment Name: At_Drought_P Parameter: Tissue Value: Whole Plant
  misc_feature: MA Experiment 20000437 PARAMETER Experiment Name: At_Drought_P Parameter: Treatment Value: Drought vs. No Drought
  misc_feature: MA Experiment ID: 20000439 Result: Up-regulated in Transcription
  misc_feature: MA Experiment 20000439 PARAMETER Experiment Name: At_Roots__P Parameter: Age (day) Value: 14 vs. 21
  misc_feature: MA Experiment 20000439 PARAMETER Experiment Name: At_Roots__P Parameter: Organism Value: A. thaliana
  misc_feature: MA Experiment 20000439 PARAMETER Experiment Name: At_Roots__P Parameter: Tissue Value: Roots vs. Whole Plant
  misc_feature: MA Experiment ID: 20000456 Result: Up-regulated in Transcription
  misc_feature: MA Experiment 20000456 PARAMETER Experiment Name: At_100uM_BA_P Parameter: Age (day) Value: 14
  misc_feature: MA Experiment 20000456 PARAMETER Experiment Name: At_100uM_BA_P Parameter: Organism Value: A. thaliana
  misc_feature: MA Experiment 20000456 PARAMETER Experiment Name: At_100uM_BA_P Parameter: Plant Line Value: WS
  misc_feature: MA Experiment 20000456 PARAMETER Experiment Name: At_100uM_BA_P Parameter: Timepoint (hr) Value: 6
  misc_feature: MA Experiment 20000456 PARAMETER Experiment Name: At_100uM_BA_P Parameter: Tissue Value: Aerial
  misc_feature: MA Experiment 20000456 PARAMETER Experiment Name: At_100uM_BA_P Parameter: Treatment Value: 100uM BA vs. No Treatment
  misc_feature: MA Experiment ID: 20001555 Result: Up-regulated in Transcription
  misc_feature: MA Experiment 20001555 PARAMETER Experiment Name: At_Drought_Soil_Dry_P Parameter: Age (day) Value: 24
  misc_feature: MA Experiment 20001555 PARAMETER Experiment Name: At_Drought_Soil_Dry_P Parameter: Organism Value: A. thaliana
  misc_feature: MA Experiment 20001555 PARAMETER Experiment Name: At_Drought_Soil_Dry_P Parameter: Plant Line Value: WS
  misc_feature: MA Experiment 20001555 PARAMETER Experiment Name: At_Drought_Soil_Dry_P Parameter: Post Timepoint (hr) Value: None
  misc_feature: MA Experiment 20001555 PARAMETER Experiment Name: At_Drought_Soil_Dry_P Parameter: Post-Treatment Value: None
  misc_feature: MA Experiment 20001555 PARAMETER Experiment Name: At_Drought_Soil_Dry_P Parameter: Timepoint (day) Value: 10
  misc_feature: MA Experiment 20001555 PARAMETER Experiment Name: At_Drought_Soil_Dry_P Parameter: Treatment Value: Drought vs. No Drought
  misc_feature: MA Experiment ID: 20001557 Result: Up-regulated in Transcription
  misc_feature: MA Experiment 20001557 PARAMETER Experiment Name: At_Drought_Soil_Dry_P Parameter: Age (day) Value: 27
  misc_feature: MA Experiment 20001557 PARAMETER Experiment Name: At_Drought_Soil_Dry_P Parameter: Organism Value: A. thaliana
  misc_feature: MA Experiment 20001557 PARAMETER Experiment Name: At_Drought_Soil_Dry_P Parameter: Plant Line Value: WS
  misc_feature: MA Experiment 20001557 PARAMETER Experiment Name: At_Drought_Soil_Dry_P Parameter: Post Timepoint (hr) Value: 3
  misc_feature: MA Experiment 20001557 PARAMETER Experiment Name: At_Drought_Soil_Dry_P Parameter: Post-Treatment Value: Re-Water vs. No Drought
  misc_feature: MA Experiment 20001557 PARAMETER Experiment Name: At_Drought_Soil_Dry_P Parameter: Timepoint (day) Value: 13
  misc_feature: MA Experiment 20001557 PARAMETER Experiment Name: At_Drought_Soil_Dry_P Parameter: Treatment Value: Drought vs. No Drought
  misc_feature: MA Experiment ID: 20001558 Result: Up-regulated in Transcription
  misc_feature: MA Experiment 20001558 PARAMETER Experiment Name: At_Drought_Soil_Dry_P Parameter: Age (day) Value: 27
  misc_feature: MA Experiment 20001558 PARAMETER Experiment Name: At_Drought_Soil_Dry_P Parameter: Organism Value: A. thaliana
  misc_feature: MA Experiment 20001558 PARAMETER Experiment Name: At_Drought_Soil_Dry_P Parameter: Plant Line Value: WS
  misc_feature: MA Experiment 20001558 PARAMETER Experiment Name: At_Drought_Soil_Dry_P Parameter: Post Timepoint (hr) Value: 6
  misc_feature: MA Experiment 20001558 PARAMETER Experiment Name: At_Drought_Soil_Dry_P Parameter: Post-Treatment Value: Re-Water vs. No Drought
  misc_feature: MA Experiment 20001558 PARAMETER Experiment Name: At_Drought_Soil_Dry_P Parameter: Timepoint (day) Value: 13
  misc_feature: MA Experiment 20001558 PARAMETER Experiment Name: At_Drought_Soil_Dry_P Parameter: Treatment Value: Drought vs. No Drought
  misc_feature: MA Experiment ID: 20001911 Result: Up-regulated in Transcription
  misc_feature: MA Experiment 20001911 PARAMETER Experiment Name: At_Drought_Reproduction_P Parameter: Age (day) Value: 40
  misc_feature: MA Experiment 20001911 PARAMETER Experiment Name: At_Drought_Reproduction_P Parameter: Organism Value: A. thaliana
  misc_feature: MA Experiment 20001911 PARAMETER Experiment Name: At_Drought_Reproduction_P Parameter: Plant Line Value: WS
  misc_feature: MA Experiment 20001911 PARAMETER Experiment Name: At_Drought_Reproduction_P Parameter: Timepoint (day) Value: 10
  misc_feature: MA Experiment 20001911 PARAMETER Experiment Name: At_Drought_Reproduction_P Parameter: Tissue Value: Flowers
  misc_feature: MA Experiment 20001911 PARAMETER Experiment Name: At_Drought_Reproduction_P Parameter: Treatment Value: Drought vs. No Drought
atgggcaagtctagtaagaaatccgtcaccgaagttgaaacacctgcttcaatgacaaagccactcaagaaaggtaagagagatgcggaagaggatttggacatgcaagttacgaagaagcagaagaaagagttgattgatgttgttcagaaggagaaagctgagaaaacggtacctaagaaggtagagagtagcagttctgacgcttctgattctgatgaagaggagaagactaaggaaactccatctaagttgaaggatgagtcttcttctgaagaggaggatgactcttcttcagatgaggaaattgcgcctgcgaagaagcgaccagaacctattaagaaggctaaggtagagagcagctcatctgatgatgattctacttcagacgaggaaactgcccctgtgaagaagcaaccagcagtccttgagaaggctaaggtagagagcagctcatctgatgatgattcttcttcagacgaggaaactgtccctgtgaagaagcaaccagcagtccttgagaaggctaagatagagagcagctcatctgatgatgattcttcttcagacgaggaaactgtccctatgaagaagcaaacagcagtccttgagaaggctaaggcagagagcagttcatccgacgatggatcttcttcggacgaggaacccacccctgcaaagaaagaaccaatcgttgttaagaaagacagctcagatgaatcttcttcagatgaggaaacccccgttgtgaagaagaagccaacaacagttgttaaggatgccaaggcagaaagcagttcatcagaggaggaatcttcttcggacgatgaaccaacacctgccaagaagccaacagttgttaagaatgctaaaccagctgcaaaagattcatcatcctcagaggaagattctgatgaggaggaaagtgatgatgaaaaacctcctacgaagaaggctaaagtttcatcaaaaacttctaaacaagaaagctctagtgatgaatctagtgatgaatctgataaggaggagagtaaagatgagaaagtgacaccaaagaaaaaggattctgatgttgaaatggtggatgcagagcagaaatctaatgcaaagcagccgaagacacctactaatcagactcagggaggatcaaagacgctatttgctggaaatctttcctatcaaattgcgagatctgacatagagaatttcttcaaagaagctggtgaagttgtcgatgttagactttcttcatttgatgatgggagttttaagggatatgggcatattgaatttgcttctccagaagaagctcagaaggcattggaaatgaacggtaaattgttactaggccgcgatgttcgtcttgatcttgctaacgagaggggtactccacgaaacagcaatcctggtcgcaaaggagaaggaagccaaagtcgaacgatttacgttagaggattcagttcttctcttggcgaagatgaaatcaagaaagagttgagaagtcattttagcaagtgtggagaggtgacaagggttcatgttccaacagatcgtgagactggtgcttccaggggctttgcttacatagatttgacgagtggattcgatgaggcgttgcaactgagcggaagtgaaattggaggagggaacatacatgtggaagagtctagaccaagagatagtgatgagggccgttcctcaaacagagcacctgctagaggagcacctcgtggccgtcactcagatagagcacctcgtggaggacgtttctcggatagagcaccacgtggacgtcactcagatagaggagcacctcgtggccgtttcagtacgcgtggaagaggacccagcaaaccaagtgtaatggaatcatccaaagggacgaagacggtctttaatgatgaagagtag

SEQ ID NO: 96042 - protein, 636 aa, Arabidopsis thaliana
  peptide (1)..(636): Ceres Seq. ID no. 12731599
  misc_feature (481)..(553): Pfam Name: RNA recognition motif. (a.k.a. RRM, RBD, or RNP domain) Pfam Description: RNA recognition motif. (a.k.a. RRM, RBD, or RNP
  misc_feature (18)..(636): Homolog of NCBI NO: 9294322 NR Description: contains similarity to nucleolin, protein
  misc_feature (97)..(635): Homolog of NCBI NO: 15222009 NR Description: nucleolin, putative; protein id: At1g48920.1
  misc_feature (1)..(635): Homolog of NCBI NO: 7440063 NR Description: nucleolin homolog nuM1 - alfalfa
  misc_feature (51)..(635): Homolog of NCBI NO: 7440062 NR Description: nucleolin homolog - garden pea
  misc_feature (18)..(635): Homolog of NCBI NO: 21700195 NR Description: tobacco nucleolin [Nicotiana tabacum]
  misc_feature (3)..(636): Homolog of NCBI NO: 38344339 NR Description: OSJNBa0058K23.21 [Oryza sativa (japonica
  misc_feature (82)..(635): Homolog of NCBI NO: 40253662 NR Description: putative nucleolin [Oryza sativa (japonica
  misc_feature (3)..(325): Homolog of NCBI NO: 9294322 NR Description: contains similarity to nucleolin, protein
  misc_feature (1)..(307): Homolog of NCBI NO: 15222009 NR Description: nucleolin, putative; protein id: At1g48920.1
  misc_feature (108)..(632): Homolog of NCBI NO: 40741753 NR Description: hypothetical protein AN4865.2 [Aspergillus
MGKSSKKSVTEVETPASMTKPLKKGKRDAEEDLDMQVTKKQKKELIDVVQKEKAEKTVPKKVESSSSDASDSDEEEKTKETPSKLKDESSSEEEDDSSSDEEIAPAKKRPEPIKKAKVESSSSDDDSTSDEETAPVKKQPAVLEKAKVESSSSDDDSSSDEETVPVKKQPAVLEKAKIESSSSDDDSSSDEETVPMKKQTAVLEKAKAESSSSDDGSSSDEEPTPAKKEPIVVKKDSSDESSSDEETPVVKKKPTTVVKDAKAESSSSEEESSSDDEPTPAKKPTVVKNAKPAAKDSSSSEEDSDEEESDDEKPPTKKAKVSSKTSKQESSSDESSDESDKEESKDEKVTPKKKDSDVEMVDAEQKSNAKQPKTPTNQTQGGSKTLFAGNLSYQIARSDIENFFKEAGEVVDVRLSSFDDGSFKGYGHIEFASPEEAQKALEMNGKLLLGRDVRLDLANERGTPRNSNPGRKGEGSQSRTIYVRGFSSSLGEDEIKKELRSHFSKCGEVTRVHVPTDRETGASRGFAYIDLTSGFDEALQLSGSEIGGGNIHVEESRPRDSDEGRSSNRAPARGAPRGRHSDRAPRGGRFSDRAPRGRHSDRGAPRGRFSTRGRGPSKPSVMESSKGTKTVFNDEE

SEQ ID NO: 96043 - protein, 619 aa, Arabidopsis thaliana
  peptide (1)..(619): Ceres Seq. ID no. 12731600
  misc_feature (464)..(536): Pfam Name: RNA recognition motif. (a.k.a. RRM, RBD, or RNP domain) Pfam Description: RNA recognition motif. (a.k.a. RRM, RBD, or RNP
  misc_feature (1)..(619): Homolog of NCBI NO: 9294322 NR Description: contains similarity to nucleolin, protein
  misc_feature (80)..(618): Homolog of NCBI NO: 15222009 NR Description: nucleolin, putative; protein id: At1g48920.1
  misc_feature (1)..(618): Homolog of NCBI NO: 7440063 NR Description: nucleolin homolog nuM1 - alfalfa
  misc_feature (34)..(618): Homolog of NCBI NO: 7440062 NR Description: nucleolin homolog - garden pea
  misc_feature (1)..(618): Homolog of NCBI NO: 21700195 NR Description: tobacco nucleolin [Nicotiana tabacum]
  misc_feature (1)..(619): Homolog of NCBI NO: 38344339 NR Description: OSJNBa0058K23.21 [Oryza sativa (japonica
  misc_feature (65)..(618): Homolog of NCBI NO: 40253662 NR Description: putative nucleolin [Oryza sativa (japonica
  misc_feature (1)..(308): Homolog of NCBI NO: 9294322 NR Description: contains similarity to nucleolin, protein
  misc_feature (1)..(290): Homolog of NCBI NO: 15222009 NR Description: nucleolin, putative; protein id: At1g48920.1
  misc_feature (91)..(615): Homolog of NCBI NO: 40741753 NR Description: hypothetical protein AN4865.2 [Aspergillus
MTKPLKKGKRDAEEDLDMQVTKKQKKELIDVVQKEKAEKTVPKKVESSSSDASDSDEEEKTKETPSKLKDESSSEEEDDSSSDEEIAPAKKRPEPIKKAKVESSSSDDDSTSDEETAPVKKQPAVLEKAKVESSSSDDDSSSDEETVPVKKQPAVLEKAKIESSSSDDDSSSDEETVPMKKQTAVLEKAKAESSSSDDGSSSDEEPTPAKKEPIVVKKDSSDESSSDEETPVVKKKPTTVVKDAKAESSSSEEESSSDDEPTPAKKPTVVKNAKPAAKDSSSSEEDSDEEESDDEKPPTKKAKVSSKTSKQESSSDESSDESDKEESKDEKVTPKKKDSDVEMVDAEQKSNAKQPKTPTNQTQGGSKTLFAGNLSYQIARSDIENFFKEAGEVVDVRLSSFDDGSFKGYGHIEFASPEEAQKALEMNGKLLLGRDVRLDLANERGTPRNSNPGRKGEGSQSRTIYVRGFSSSLGEDEIKKELRSHFSKCGEVTRVHVPTDRETGASRGFAYIDLTSGFDEALQLSGSEIGGGNIHVEESRPRDSDEGRSSNRAPARGAPRGRHSDRAPRGGRFSDRAPRGRHSDRGAPRGRFSTRGRGPSKPSVMESSKGTKTVFNDEE

SEQ ID NO: 96044 - protein, 602 aa, Arabidopsis thaliana
  peptide (1)..(602): Ceres Seq. ID no. 12731601
  misc_feature (447)..(519): Pfam Name: RNA recognition motif. (a.k.a. RRM, RBD, or RNP domain) Pfam Description: RNA recognition motif. (a.k.a. RRM, RBD, or RNP
  misc_feature (1)..(602): Homolog of NCBI NO: 9294322 NR Description: contains similarity to nucleolin, protein
  misc_feature (63)..(601): Homolog of NCBI NO: 15222009 NR Description: nucleolin, putative; protein id: At1g48920.1
  misc_feature (1)..(601): Homolog of NCBI NO: 7440063 NR Description: nucleolin homolog nuM1 - alfalfa
  misc_feature (17)..(601): Homolog of NCBI NO: 7440062 NR Description: nucleolin homolog - garden pea
  misc_feature (1)..(601): Homolog of NCBI NO: 21700195 NR Description: tobacco nucleolin [Nicotiana tabacum]
  misc_feature (1)..(602): Homolog of NCBI NO: 38344339 NR Description: OSJNBa0058K23.21 [Oryza sativa (japonica
  misc_feature (48)..(601): Homolog of NCBI NO: 40253662 NR Description: putative nucleolin [Oryza sativa (japonica
  misc_feature (1)..(291): Homolog of NCBI NO: 9294322 NR Description: contains similarity to nucleolin, protein
  misc_feature (1)..(273): Homolog of NCBI NO: 15222009 NR Description: nucleolin, putative; protein id: At1g48920.1
  misc_feature (74)..(598): Homolog of NCBI NO: 40741753 NR Description: hypothetical protein AN4865.2 [Aspergillus
MQVTKKQKKELIDVVQKEKAEKTVPKKVESSSSDASDSDEEEKTKETPSKLKDESSSEEEDDSSSDEEIAPAKKRPEPIKKAKVESSSSDDDSTSDEETAPVKKQPAVLEKAKVESSSSDDDSSSDEETVPVKKQPAVLEKAKIESSSSDDDSSSDEETVPMKKQTAVLEKAKAESSSSDDGSSSDEEPTPAKKEPIVVKKDSSDESSSDEETPVVKKKPTTVVKDAKAESSSSEEESSSDDEPTPAKKPTVVKNAKPAAKDSSSSEEDSDEEESDDEKPPTKKAKVSSKTSKQESSSDESSDESDKEESKDEKVTPKKKDSDVEMVDAEQKSNAKQPKTPTNQTQGGSKTLFAGNLSYQIARSDIENFFKEAGEVVDVRLSSFDDGSFKGYGHIEFASPEEAQKALEMNGKLLLGRDVRLDLANERGTPRNSNPGRKGEGSQSRTIYVRGFSSSLGEDEIKKELRSHFSKCGEVTRVHVPTDRETGASRGFAYIDLTSGFDEALQLSGSEIGGGNIHVEESRPRDSDEGRSSNRAPARGAPRGRHSDRAPRGGRFSDRAPRGRHSDRGAPRGRFSTRGRGPSKPSVMESSKGTKTVFNDEE

SEQ ID NO: 96045 - DNA, 1425 bp, Arabidopsis thaliana
  misc_feature (1)..(1425): Ceres Seq. ID no. 12731630
  misc_feature: MA Experiment ID: 20001247 Result: Down-regulated in Transcription
  misc_feature: MA Experiment 20001247 PARAMETER Experiment Name: At_Far-red-induction_P Parameter: Age (day) Value: 7
  misc_feature: MA Experiment 20001247 PARAMETER Experiment Name: At_Far-red-induction_P Parameter: Light Value: Far-red vs. White
  misc_feature: MA Experiment 20001247 PARAMETER Experiment Name: At_Far-red-induction_P Parameter: Organism Value: A. thaliana
  misc_feature: MA Experiment 20001247 PARAMETER Experiment Name: At_Far-red-induction_P Parameter: Plant Line Value: Columbia
  misc_feature: MA Experiment 20001247 PARAMETER Experiment Name: At_Far-red-induction_P Parameter: Timepoint (hr) Value: 1
  misc_feature: MA Experiment 20001247 PARAMETER Experiment Name: At_Far-red-induction_P Parameter: Tissue Value: Whole Plant
atgatgatgattatgatgaagatgggaccaagatttttgtccttgttgcaacagaattcgaaaaccctaattcaagctaagcaaatccatgctcaattagtcatcaatggctgccatgataattctctatttggcaaactcataggccattactgttcaaagccatcaaccgaaagcagctcaaagcttgctcatttactagtgtttcctcgatttggtcatcctgataagtttctcttcaacacattgcttaaatgtagcaaaccagaggactcgattcggatttttgccaattatgcatcaaaaagttcgttgctttatctcaatgagcgcacttttgtcttcgtccttggcgcttgtgctaggtcagcttcgtcgtcggcgttacgggttggtagaattgttcatgggatggtgaaaaagcttggctttctatatgaatctgaattgattggaaccactttactccatttctacgctaagaatggagatttacgttatgcaaggaaggtgtttgacgaaatgcctgagagaacctctgttacatggaacgcaatgataggtggatattgttcacataaggataaaggcaatcacaatgcgagaaaggctatggttttgtttaggagattctcttgctgtggtagtggagttagacctactgatacaaccatggtttgtgttctttcagccatttctcagacgggtttgctcgaaattggttctctcgttcatggttacatagaaaagctcgggttcacacccgaagttgatgtctttatcggtactgcacttgtcgacatgtactcaaaatgcggctgcttgaacaacgcattctccgtgttcgagctaatgaaagtgaaaaatgtctttacatggacttcaatggcaacggggctagctctcaacggtagaggaaacgaaacaccgaatcttctaaaccgaatggcggaatctgggatcaaaccaaacgaaataactttcactagcttgctttcggcttatcgtcatataggtcttgttgaagaaggaatcgagctgttcaagagcatgaagacaagatttggtgtcacaccggttatcgaacactatggttgcatagtagatcttcttggtaaggcagggcggatacaagaggcttatcagtttatattagctatgcctataaagcctgacgctatcttgttaagaagcctctgcaatgcctgcagcatttatggagagactgtaatgggtgaagagatcggaaaggctcttctcgagatagaacgagaggacgagaagctttcgggttctgagtgcgaagattatgtcgctttatcgaatgtgttagctcataaagggaaatgggtagaggtagagaagctgaggaaggagatgaaagaaagaagaatcaaaacaagacctggttacagttttgtttaa

SEQ ID NO: 96046 - protein, 474 aa, Arabidopsis thaliana
  peptide (1)..(474): Ceres Seq. ID no. 12731631
  misc_feature (150)..(184): Pfam Name: PPR repeat Pfam Description: PPR repeat
  misc_feature (1)..(474): Homolog of NCBI NO: 15230249 NR Description: hypothetical protein; protein id: At3g18970.1
  misc_feature (9)..(474): Homolog of NCBI NO: 9280314 NR Description: gb|AAF15933.1~gene_id:K13E13.8~similar to unknown
  misc_feature (155)..(474): Homolog of NCBI NO: 15221306 NR Description: hypothetical protein; protein id: At1g74630.1
  misc_feature (13)..(187): Homolog of NCBI NO: 15221306 NR Description: hypothetical protein; protein id: At1g74630.1
  misc_feature (159)..(465): Homolog of NCBI NO: 15234044 NR Description: putative protein; protein id: At4g18840.1
  misc_feature (18)..(190): Homolog of NCBI NO: 15234044 NR Description: putative protein; protein id: At4g18840.1
  misc_feature (148)..(474): Homolog of NCBI NO: 38345581 NR Description: OSJNBa0027H06.17 [Oryza sativa (japonica
  misc_feature (24)..(193): Homolog of NCBI NO: 38345581 NR Description: OSJNBa0027H06.17 [Oryza sativa (japonica
  misc_feature (3)..(474): Homolog of NCBI NO: 7486979 NR Description: hypothetical protein T13K14.230 - Arabidopsis
  misc_feature (15)..(474): Homolog of NCBI NO: 15227067 NR Description: hypothetical protein; protein id: At2g02980.1
MMMIMMKMGPRFLSLLQQNSKTLIQAKQIHAQLVINGCHDNSLFGKLIGHYCSKPSTESSSKLAHLLVFPRFGHPDKFLFNTLLKCSKPEDSIRIFANYASKSSLLYLNERTFVFVLGACARSASSSALRVGRIVHGMVKKLGFLYESELIGTTLLHFYAKNGDLRYARKVFDEMPERTSVTWNAMIGGYCSHKDKGNHNARKAMVLFRRFSCCGSGVRPTDTTMVCVLSAISQTGLLEIGSLVHGYIEKLGFTPEVDVFIGTALVDMYSKCGCLNNAFSVFELMKVKNVFTWTSMATGLALNGRGNETPNLLNRMAESGIKPNEITFTSLLSAYRHIGLVEEGIELFKSMKTRFGVTPVIEHYGCIVDLLGKAGRIQEAYQFILAMPIKPDAILLRSLCNACSIYGETVMGEEIGKALLEIEREDEKLSGSECEDYVALSNVLAHKGKWVEVEKLRKEMKERRIKTRPGYSFV

SEQ ID NO: 96047 - protein, 473 aa, Arabidopsis thaliana
  peptide (1)..(473): Ceres Seq. ID no. 12731632
  misc_feature (149)..(183): Pfam Name: PPR repeat Pfam Description: PPR repeat
  misc_feature (1)..(473): Homolog of NCBI NO: 15230249 NR Description: hypothetical protein; protein id: At3g18970.1
  misc_feature (8)..(473): Homolog of NCBI NO: 9280314 NR Description: gb|AAF15933.1~gene_id:K13E13.8~similar to unknown
  misc_feature (154)..(473): Homolog of NCBI NO: 15221306 NR Description: hypothetical protein; protein id: At1g74630.1
  misc_feature (12)..(186): Homolog of NCBI NO: 15221306 NR Description: hypothetical protein; protein id: At1g74630.1
  misc_feature (158)..(464): Homolog of NCBI NO: 15234044 NR Description: putative protein; protein id: At4g18840.1
  misc_feature (17)..(189): Homolog of NCBI NO: 15234044 NR Description: putative protein; protein id: At4g18840.1
  misc_feature (147)..(473): Homolog of NCBI NO: 38345581 NR Description: OSJNBa0027H06.17 [Oryza sativa (japonica
  misc_feature (23)..(192): Homolog of NCBI NO: 38345581 NR Description: OSJNBa0027H06.17 [Oryza sativa (japonica
  misc_feature (2)..(473): Homolog of NCBI NO: 7486979 NR Description: hypothetical protein T13K14.230 - Arabidopsis
  misc_feature (14)..(473): Homolog of NCBI NO: 15227067 NR Description: hypothetical protein; protein id: At2g02980.1
MMIMMKMGPRFLSLLQQNSKTLIQAKQIHAQLVINGCHDNSLFGKLIGHYCSKPSTESSSKLAHLLVFPRFGHPDKFLFNTLLKCSKPEDSIRIFANYASKSSLLYLNERTFVFVLGACARSASSSALRVGRIVHGMVKKLGFLYESELIGTTLLHFYAKNGDLRYARKVFDEMPERTSVTWNAMIGGYCSHKDKGNHNARKAMVLFRRFSCCGSGVRPTDTTMVCVLSAISQTGLLEIGSLVHGYIEKLGFTPEVDVFIGTALVDMYSKCGCLNNAFSVFELMKVKNVFTWTSMATGLALNGRGNETPNLLNRMAESGIKPNEITFTSLLSAYRHIGLVEEGIELFKSMKTRFGVTPVIEHYGCIVDLLGKAGRIQEAYQFILAMPIKPDAILLRSLCNACSIYGETVMGEEIGKALLEIEREDEKLSGSECEDYVALSNVLAHKGKWVEVEKLRKEMKERRIKTRPGYSFV

SEQ ID NO: 96048 - protein, 472 aa, Arabidopsis thaliana
  peptide (1)..(472): Ceres Seq. ID no. 12731633
  misc_feature (148)..(182): Pfam Name: PPR repeat Pfam Description: PPR repeat
  misc_feature (1)..(472): Homolog of NCBI NO: 15230249 NR Description: hypothetical protein; protein id: At3g18970.1
  misc_feature (7)..(472): Homolog of NCBI NO: 9280314 NR Description: gb|AAF15933.1~gene_id:K13E13.8~similar to unknown
  misc_feature (153)..(472): Homolog of NCBI NO: 15221306 NR Description: hypothetical protein; protein id: At1g74630.1
  misc_feature (11)..(185): Homolog of NCBI NO: 15221306 NR Description: hypothetical protein; protein id: At1g74630.1
  misc_feature (157)..(463): Homolog of NCBI NO: 15234044 NR Description: putative protein; protein id: At4g18840.1
  misc_feature (16)..(188): Homolog of NCBI NO: 15234044 NR Description: putative protein; protein id: At4g18840.1
  misc_feature (146)..(472): Homolog of NCBI NO: 38345581 NR Description: OSJNBa0027H06.17 [Oryza sativa (japonica
  misc_feature (22)..(191): Homolog of NCBI NO: 38345581 NR Description: OSJNBa0027H06.17 [Oryza sativa (japonica
  misc_feature (1)..(472): Homolog of NCBI NO: 7486979 NR Description: hypothetical protein T13K14.230 - Arabidopsis
  misc_feature (13)..(472): Homolog of NCBI NO: 15227067 NR Description: hypothetical protein; protein id: At2g02980.1
MIMMKMGPRFLSLLQQNSKTLIQAKQIHAQLVINGCHDNSLFGKLIGHYCSKPSTESSSKLAHLLVFPRFGHPDKFLFNTLLKCSKPEDSIRIFANYASKSSLLYLNERTFVFVLGACARSASSSALRVGRIVHGMVKKLGFLYESELIGTTLLHFYAKNGDLRYARKVFDEMPERTSVTWNAMIGGYCSHKDKGNHNARKAMVLFRRFSCCGSGVRPTDTTMVCVLSAISQTGLLEIGSLVHGYIEKLGFTPEVDVFIGTALVDMYSKCGCLNNAFSVFELMKVKNVFTWTSMATGLALNGRGNETPNLLNRMAESGIKPNEITFTSLLSAYRHIGLVEEGIELFKSMKTRFGVTPVIEHYGCIVDLLGKAGRIQEAYQFILAMPIKPDAILLRSLCNACSIYGETVMGEEIGKALLEIEREDEKLSGSECEDYVALSNVLAHKGKWVEVEKLRKEMKERRIKTRPGYSFV

SEQ ID NO: 96049 - DNA, 1389 bp, Arabidopsis thaliana
  misc_feature (1)..(1389): Ceres Seq. ID no. 12731648
  misc_feature: MA Experiment ID: 20000439 Result: Up-regulated in Transcription
  misc_feature: MA Experiment 20000439 PARAMETER Experiment Name: At_Roots__P Parameter: Age (day) Value: 14 vs. 21
  misc_feature: MA Experiment 20000439 PARAMETER Experiment Name: At_Roots__P Parameter: Organism Value: A. thaliana
  misc_feature: MA Experiment 20000439 PARAMETER Experiment Name: At_Roots__P Parameter: Tissue Value: Roots vs. Whole Plant
  misc_feature: MA Experiment ID: 20001451 Result: Down-regulated in Transcription
  misc_feature: MA Experiment 20001451 PARAMETER Experiment Name: At_Far-red-induction_P Parameter: Age (day) Value: 7
  misc_feature: MA Experiment 20001451 PARAMETER Experiment Name: At_Far-red-induction_P Parameter: Light Value: Far-red vs. White
  misc_feature: MA Experiment 20001451 PARAMETER Experiment Name: At_Far-red-induction_P Parameter: Organism Value: A. thaliana
  misc_feature: MA Experiment 20001451 PARAMETER Experiment Name: At_Far-red-induction_P Parameter: Plant Line Value: Columbia
  misc_feature: MA Experiment 20001451 PARAMETER Experiment Name: At_Far-red-induction_P Parameter: Timepoint (hr) Value: 24
  misc_feature: MA Experiment 20001451 PARAMETER Experiment Name: At_Far-red-induction_P Parameter: Tissue Value: Whole Plant
atggtttccgacttggacctcgtgacccgactccgtgagattctcggtagctccgacctgaacacggcgactccggcaagcgtccgtcgtcagttggaggcggatttcggtgtggacttgacagataaaaaagcgtatattagggatcaaatcgatacttttctcgagagcaatggcgcggtagaagacaaacctgagagtcccaaggtagaagaatacattaatgccgacgaaatcaaggcggaaattgaaggaggcgatggagaagacctcgacggagatggaagtggaagtgaggaagagaaggaagaacggccagtaaaggccaagaagcgaggtggtggcattaccaaagtatctcagttatctccacaacttgagaaagttgttggagcatctcagttaggtcgaaccgaggttgtgaagaaaatgtgggcatatatccgagagaaggatttgcaagacccaaaggataggaggaagatagtgtgtgacgagttgttgcattccttgttccgtgttaagaccattaatatgtttcaaatgaacaaggcattaaccaagcatatttggcccttaggtgatggagatgggtgtgctaacgatgtgaaagaagaagatgaagatgaggcatcagagggaacagataagaaaggggagcagagcgaagaagtggaagagaataaggaagaagaaagtgaagagcaggaagttaggagtttgcggaaacgcaagagaaaaaagccagccaagtcggtagagaagcccaagagaaaaggaggaggcggctttgctaaagtttgcagcctctcgccagagcttcaggcgtttactggggtgacagaattagccaggacagaggttgtgaaattgctttggaagtacataaaggagaacaatttacaagatccgaatgataaacgctctataatatgcgacgaatcatttcgatctctgttccctgtcgagtccatcaatatgtttcaaatgaataaacagctaacaaagcacatatggcctttagaggataatgcaggagaatcagttagctctaagtctccaaagaatggaaagcaaaaaatggaatcagatggagatagtgaggaaccaaatgagaaagataaaaagcagaagaaagaagttcttgctccccttccactttcagatgctcttgtcaagttcttgggtgatggagaaaactcgctgtcgagggcggatgtggtaaagagattgtgggagtacataaatcataatgatcttcaggatccttctgacaagaggagagtcatatgcgatgagaagctgaaagaactctttgaagttgattcattcgaagacacatcagtctcaaaacttctgaccaaccacttcatcaaggccgaacaatga

SEQ ID NO: 96050 - protein, 462 aa, Arabidopsis thaliana
  peptide (1)..(462): Ceres Seq. ID no. 12731649
  misc_feature (1)..(462): Homolog of NCBI NO: 15230276 NR Description: hypothetical protein; protein id: At3g19080.1
  misc_feature (1)..(462): Homolog of NCBI NO: 9280327 NR Description: gb|AAD43149.1~gene_id:K13E13.21~strong similarity
  misc_feature (1)..(373): Homolog of NCBI NO: 25405318 NR Description: hypothetical protein F13F21.4 [imported] - thaliana >gi|5430749|gb|AAD43149.1|AC007504_4 Hypothetical
  misc_feature (1)..(366): Homolog of NCBI NO: 15222765 NR Description: hypothetical protein; protein id: At1g49520.1
  misc_feature (257)..(459): Homolog of NCBI NO: 21537175 NR Description: unknown [Arabidopsis thaliana]
  misc_feature (1)..(58): Homolog of NCBI NO: 21537175 NR Description: unknown [Arabidopsis thaliana]
  misc_feature (257)..(459): Homolog of NCBI NO: 18415906 NR Description: putative protein; protein id: At4g22360.1, by cDNA: 12272., supported by cDNA: gi_16604704, supported by gi_20258978 [Arabidopsis thaliana] >gi|16604705|gb|AAL24145.1|
  misc_feature (1)..(58): Homolog of NCBI NO: 18415906 NR Description: putative protein; protein id: At4g22360.1, by cDNA: 12272., supported by cDNA: gi_16604704, supported by gi_20258978 [Arabidopsis thaliana] >gi|16604705|gb|AAL24145.1|
  misc_feature (257)..(421): Homolog of NCBI NO: 7486830 NR Description: hypothetical protein T10I14.190 - Arabidopsis >gi|2832686|emb|CAA16786.1| putative protein [Arabidopsis >gi|7269082|emb|CAB79191.1| putative protein [Arabidopsis
  misc_feature (1)..(58): Homolog of NCBI NO: 7486830 NR Description: hypothetical protein T10I14.190 - Arabidopsis >gi|2832686|emb|CAA16786.1| putative protein [Arabidopsis >gi|7269082|emb|CAB79191.1| putative protein [Arabidopsis
MVSDLDLVTRLREILGSSDLNTATPASVRRQLEADFGVDLTDKKAYIRDQIDTFLESNGAVEDKPESPKVEEYINADEIKAEIEGGDGEDLDGDGSGSEEEKEERPVKAKKRGGGITKVSQLSPQLEKVVGASQLGRTEVVKKMWAYIREKDLQDPKDRRKIVCDELLHSLFRVKTINMFQMNKALTKHIWPLGDGDGCANDVKEEDEDEASEGTDKKGEQSEEVEENKEEESEEQEVRSLRKRKRKKPAKSVEKPKRKGGGGFAKVCSLSPELQAFTGVTELARTEVVKLLWKYIKENNLQDPNDKRSIICDESFRSLFPVESINMFQMNKQLTKHIWPLEDNAGESVSSKSPKNGKQKMESDGDSEEPNEKDKKQKKEVLAPLPLSDALVKFLGDGENSLSRADVVKRLWEYINHNDLQDPSDKRRVICDEKLKELFEVDSFEDTSVSKLLTNHFIKAEQ

SEQ ID NO: 96051 - protein, 319 aa, Arabidopsis thaliana
  peptide (1)..(319): Ceres Seq. ID no. 12731650
  misc_feature (1)..(319): Homolog of NCBI NO: 15230276 NR Description: hypothetical protein; protein id: At3g19080.1
  misc_feature (1)..(319): Homolog of NCBI NO: 9280327 NR Description: gb|AAD43149.1~gene_id:K13E13.21~strong similarity
  misc_feature (1)..(230): Homolog of NCBI NO: 25405318 NR Description: hypothetical protein F13F21.4 [imported] - thaliana >gi|5430749|gb|AAD43149.1|AC007504_4 Hypothetical
  misc_feature (1)..(223): Homolog of NCBI NO: 15222765 NR Description: hypothetical protein; protein id: At1g49520.1
  misc_feature (114)..(316): Homolog of NCBI NO: 21537175 NR Description: unknown [Arabidopsis thaliana]
  misc_feature (114)..(316): Homolog of NCBI NO: 18415906 NR Description: putative protein; protein id: At4g22360.1, by cDNA: 12272., supported by cDNA: gi_16604704, supported by gi_20258978 [Arabidopsis thaliana] >gi|16604705|gb|AAL24145.1|
  misc_feature (114)..(278): Homolog of NCBI NO: 7486830 NR Description: hypothetical protein T10I14.190 - Arabidopsis >gi|2832686|emb|CAA16786.1| putative protein [Arabidopsis >gi|7269082|emb|CAB79191.1| putative protein [Arabidopsis
  misc_feature (61)..(283): Homolog of NCBI NO: 17027265 NR Description: putative parathymosin [Oryza sativa (japonica
  misc_feature (199)..(287): Homolog of NCBI NO: 17027265 NR Description: putative parathymosin [Oryza sativa (japonica
  misc_feature (1)..(73): Homolog of NCBI NO: 7486830 NR Description: hypothetical protein T10I14.190 - Arabidopsis >gi|2832686|emb|CAA16786.1| putative protein [Arabidopsis >gi|7269082|emb|CAB79191.1| putative protein [Arabidopsis
MWAYIREKDLQDPKDRRKIVCDELLHSLFRVKTINMFQMNKALTKHIWPLGDGDGCANDVKEEDEDEASEGTDKKGEQSEEVEENKEEESEEQEVRSLRKRKRKKPAKSVEKPKRKGGGGFAKVCSLSPELQAFTGVTELARTEVVKLLWKYIKENNLQDPNDKRSIICDESFRSLFPVESINMFQMNKQLTKHIWPLEDNAGESVSSKSPKNGKQKMESDGDSEEPNEKDKKQKKEVLAPLPLSDALVKFLGDGENSLSRADVVKRLWEYINHNDLQDPSDKRRVICDEKLKELFEVDSFEDTSVSKLLTNHFIKAEQ

SEQ ID NO: 96052 - protein, 284 aa, Arabidopsis thaliana
  peptide (1)..(284): Ceres Seq. ID no. 12731651
  misc_feature (1)..(284): Homolog of NCBI NO: 15230276 NR Description: hypothetical protein; protein id: At3g19080.1
  misc_feature (1)..(284): Homolog of NCBI NO: 9280327 NR Description: gb|AAD43149.1~gene_id:K13E13.21~strong similarity
  misc_feature (1)..(195): Homolog of NCBI NO: 25405318 NR Description: hypothetical protein F13F21.4 [imported] - thaliana >gi|5430749|gb|AAD43149.1|AC007504_4 Hypothetical
  misc_feature (1)..(188): Homolog of NCBI NO: 15222765 NR Description: hypothetical protein; protein id: At1g49520.1
  misc_feature (79)..(281): Homolog of NCBI NO: 21537175 NR Description: unknown [Arabidopsis thaliana]
  misc_feature (79)..(281): Homolog of NCBI NO: 18415906 NR Description: putative protein; protein id: At4g22360.1, by cDNA: 12272., supported by cDNA: gi_16604704, supported by gi_20258978 [Arabidopsis thaliana] >gi|16604705|gb|AAL24145.1|
  misc_feature (79)..(243): Homolog of NCBI NO: 7486830 NR Description: hypothetical protein T10I14.190 - Arabidopsis >gi|2832686|emb|CAA16786.1| putative protein [Arabidopsis >gi|7269082|emb|CAB79191.1| putative protein [Arabidopsis
  misc_feature (26)..(248): Homolog of NCBI NO: 17027265 NR Description: putative parathymosin [Oryza sativa (japonica
  misc_feature (164)..(252): Homolog of NCBI NO: 17027265 NR Description: putative parathymosin [Oryza sativa (japonica
  misc_feature (1)..(38): Homolog of NCBI NO: 7486830 NR Description: hypothetical protein T10I14.190 - Arabidopsis >gi|2832686|emb|CAA16786.1| putative protein [Arabidopsis >gi|7269082|emb|CAB79191.1| putative protein [Arabidopsis
MFQMNKALTKHIWPLGDGDGCANDVKEEDEDEASEGTDKKGEQSEEVEENKEEESEEQEVRSLRKRKRKKPAKSVEKPKRKGGGGFAKVCSLSPELQAFTGVTELARTEVVKLLWKYIKENNLQDPNDKRSIICDESFRSLFPVESINMFQMNKQLTKHIWPLEDNAGESVSSKSPKNGKQKMESDGDSEEPNEKDKKQKKEVLAPLPLSDALVKFLGDGENSLSRADVVKRLWEYINHNDLQDPSDKRRVICDEKLKELFEVDSFEDTSVSKLLTNHFIKAEQ

SEQ ID NO: 96053 - DNA, 1368 bp, Arabidopsis thaliana
  misc_feature (1)..(1368): Ceres Seq. ID no. 12731652
  misc_feature: MA Experiment ID: 20000265 Result: Up-regulated in Transcription
  misc_feature: MA Experiment 20000265 PARAMETER Experiment Name: At_Open_Flower_P Parameter: Age (day) Value: 21
  misc_feature: MA Experiment 20000265 PARAMETER Experiment Name: At_Open_Flower_P Parameter: Plant Line Value: WS
  misc_feature: MA Experiment 20000265 PARAMETER Experiment Name: At_Open_Flower_P Parameter: Tissue Value: Closed Flower vs. Whole Plant
atggcgcagatgcagcgagaagaagtagagtccgtcacgacggagaagaaaagattagacggaggcggtggatcttccggcgctcaggcaacggcgttcaaattcaacgctcaagcgccggaatttgtaccgcgatcacataccaccgcaccagcaccgcaggtttctcctgtctccggttacttttatccttgttttcattacaacggtggttgcataggaggatgtggcggcggagtctgcggtggtggagggaccggcgttggtactcagtcgtcggattggatctacgtgggaggaggagatcctactgctcagcatcaacatgttcatgatccagcggctgcgttttacatttcgaatccggcggttcagtttccggctagtcagaactcgtcttcttcgtcgaagaatctgctttccgatgatctccgccttaagatcgtcaaacaggttgagtaccagtttacggacatgagtctcctagccaacgagtccatttcaaagcatataagcaaagaccctgaaggttatgtgcccgtatcctatatcgcttcgaccaagaagatcaaggctttaacgagtaatcaccacctagtttcacttgctctacgctcctcttcaaaacttgttgtgagtgaagacggcaagaaagttaagcgtacaagtcaatttactgatagagacagagaggaattgcagggccggactgtcgttgcagagaatttgccagatgatcattcttaccagaaccttgagaagatctttggagttgttggaaacgtcaaagcgattcgtatatgtcatcctccagaatccaactcgtctcgtccaaaaggcgatttcttgatgagcaacaaaattcacgcccttatcgagtatgacaacactgttatcgcggacaaagcagtagagaagctaaacgatgaaagaaactggaggaaagggcttcgtgtgaggctgcttcttagatgctcgccaaaatcggtgctcaagaaccgaagaaacttcgatggaatcctcatcgatgatgaactcccttcttatgaatcaggagaagactctccgcgtctccatttaaccgaatcacagcttgataacgatggtgatgacaacaatgttggtggactgtggggtaaagggagaggaaaaggacgaggacgatccccaagaagctacgcagtaggaggaggaggacgtagcttcgggattgggctcggagtcagcctcgggatacccagcctggggtcacacgaatcttcgtctcctaaaacagcaacaaagggaccaagaatgcctgatggaaccagaggcttcaccatgggacgtggcaaaccttccatctcactctcacctaacaatctctaa

SEQ ID NO: 96054 - protein, 455 aa, Arabidopsis thaliana
  peptide (1)..(455): Ceres Seq. ID no. 12731653
  misc_feature (238)..(308): Pfam Name: RNA recognition motif. (a.k.a. RRM, RBD, or RNP domain) Pfam Description: RNA recognition motif. (a.k.a. RRM, RBD, or RNP
  misc_feature (1)..(455): Homolog of NCBI NO: 15230287 NR Description: RNA-binding protein, putative; protein id:
  misc_feature (1)..(363): Homolog of NCBI NO: 6449448 NR Description: RNA-binding protein homolog [Brassica napus]
  misc_feature (109)..(399): Homolog of NCBI NO: 34394175 NR Description: putative RNA-binding protein homolog [Oryza
  misc_feature (30)..(66): Homolog of NCBI NO: 34394175 NR Description: putative RNA-binding protein homolog [Oryza
  misc_feature (112)..(367): Homolog of NCBI NO: 34896588 NR Description: putative RNA-binding protein [Oryza sativa]
  misc_feature (133)..(422): Homolog of NCBI NO: 18406414 NR Description: VirF-interacting protein FIP1; protein id: supported by cDNA: gi_12744918, supported by cDNA: gi_14030638,
  misc_feature (424)..(446): Homolog of NCBI NO: 18406414 NR Description: VirF-interacting protein FIP1; protein id: supported by cDNA: gi_12744918, supported by cDNA: gi_14030638,
  misc_feature (133)..(388): Homolog of NCBI NO: 30689565 NR Description: VirF-interacting protein FIP1 [Arabidopsis
  misc_feature (424)..(446): Homolog of NCBI NO: 30689565 NR Description: VirF-interacting protein FIP1 [Arabidopsis
  misc_feature (169)..(422): Homolog of NCBI NO: 15724224 NR Description: At2g43970/F6E13.10 [Arabidopsis thaliana]
MAQMQREEVESVTTEKKRLDGGGGSSGAQATAFKFNAQAPEFVPRSHTTAPAPQVSPVSGYFYPCFHYNGGCIGGCGGGVCGGGGTGVGTQSSDWIYVGGGDPTAQHQHVHDPAAAFYISNPAVQFPASQNSSSSSKNLLSDDLRLKIVKQVEYQFTDMSLLANESISKHISKDPEGYVPVSYIASTKKIKALTSNHHLVSLALRSSSKLVVSEDGKKVKRTSQFTDRDREELQGRTVVAENLPDDHSYQNLEKIFGVVGNVKAIRICHPPESNSSRPKGDFLMSNKIHALIEYDNTVIADKAVEKLNDERNWRKGLRVRLLLRCSPKSVLKNRRNFDGILIDDELPSYESGEDSPRLHLTESQLDNDGDDNNVGGLWGKGRGKGRGRSPRSYAVGGGGRSFGIGLGVSLGIPSLGSHESSSPKTATKGPRMPDGTRGFTMGRGKPSISLSPNNL

SEQ ID NO: 96055 - protein, 452 aa, Arabidopsis thaliana
  peptide (1)..(452): Ceres Seq. ID no. 12731654
  misc_feature (235)..(305): Pfam Name: RNA recognition motif. (a.k.a. RRM, RBD, or RNP domain) Pfam Description: RNA recognition motif. (a.k.a. RRM, RBD, or RNP
  misc_feature (1)..(452): Homolog of NCBI NO: 15230287 NR Description: RNA-binding protein, putative; protein id:
  misc_feature (1)..(360): Homolog of NCBI NO: 6449448 NR Description: RNA-binding protein homolog [Brassica napus]
  misc_feature (106)..(396): Homolog of NCBI NO: 34394175 NR Description: putative RNA-binding protein homolog [Oryza
  misc_feature (27)..(63): Homolog of NCBI NO: 34394175 NR Description: putative RNA-binding protein homolog [Oryza
  misc_feature (109)..(364): Homolog of NCBI NO: 34896588 NR Description: putative RNA-binding protein [Oryza sativa]
  misc_feature (130)..(419): Homolog of NCBI NO: 18406414 NR Description: VirF-interacting protein FIP1; protein id: supported by cDNA: gi_12744918, supported by cDNA: gi_14030638,
  misc_feature (421)..(443): Homolog of NCBI NO: 18406414 NR Description: VirF-interacting protein FIP1; protein id: supported by cDNA: gi_12744918, supported by cDNA: gi_14030638,
  misc_feature (130)..(385): Homolog of NCBI NO: 30689565 NR Description: VirF-interacting protein FIP1 [Arabidopsis
  misc_feature (421)..(443): Homolog of NCBI NO: 30689565 NR Description: VirF-interacting protein FIP1 [Arabidopsis
  misc_feature (166)..(419): Homolog of NCBI NO: 15724224 NR Description: At2g43970/F6E13.10 [Arabidopsis thaliana]
MQREEVESVTTEKKRLDGGGGSSGAQATAFKFNAQAPEFVPRSHTTAPAPQVSPVSGYFYPCFHYNGGCIGGCGGGVCGGGGTGVGTQSSDWIYVGGGDPTAQHQHVHDPAAAFYISNPAVQFPASQNSSSSSKNLLSDDLRLKIVKQVEYQFTDMSLLANESISKHISKDPEGYVPVSYIASTKKIKALTSNHHLVSLALRSSSKLVVSEDGKKVKRTSQFTDRDREELQGRTVVAENLPDDHSYQNLEKIFGVVGNVKAIRICHPPESNSSRPKGDFLMSNKIHALIEYDNTVIADKAVEKLNDERNWRKGLRVRLLLRCSPKSVLKNRRNFDGILIDDELPSYESGEDSPRLHLTESQLDNDGDDNNVGGLWGKGRGKGRGRSPRSYAVGGGGRSFGIGLGVSLGIPSLGSHESSSPKTATKGPRMPDGTRGFTMGRGKPSISLSPNNL

SEQ ID NO: 96056 - protein, 297 aa, Arabidopsis thaliana
  peptide (1)..(297): Ceres Seq. ID no. 12731655
  misc_feature (80)..(150): Pfam Name: RNA recognition motif. (a.k.a. RRM, RBD, or RNP domain) Pfam Description: RNA recognition motif. (a.k.a. RRM, RBD, or RNP
  misc_feature (1)..(297): Homolog of NCBI NO: 15230287 NR Description: RNA-binding protein, putative; protein id:
  misc_feature (1)..(205): Homolog of NCBI NO: 6449448 NR Description: RNA-binding protein homolog [Brassica napus]
  misc_feature (1)..(241): Homolog of NCBI NO: 34394175 NR Description: putative RNA-binding protein homolog [Oryza
  misc_feature (1)..(209): Homolog of NCBI NO: 34896588 NR Description: putative RNA-binding protein [Oryza sativa]
  misc_feature (1)..(264): Homolog of NCBI NO: 18406414 NR Description: VirF-interacting protein FIP1; protein id: supported by cDNA: gi_12744918, supported by cDNA: gi_14030638,
  misc_feature (266)..(288): Homolog of NCBI NO: 18406414 NR Description: VirF-interacting protein FIP1; protein id: supported by cDNA: gi_12744918, supported by cDNA: gi_14030638,
  misc_feature (1)..(230): Homolog of NCBI NO: 30689565 NR Description: VirF-interacting protein FIP1 [Arabidopsis
  misc_feature (266)..(288): Homolog of NCBI NO: 30689565 NR Description: VirF-interacting protein FIP1 [Arabidopsis
  misc_feature (11)..(264): Homolog of NCBI NO: 15724224 NR Description: At2g43970/F6E13.10 [Arabidopsis thaliana]
  misc_feature (266)..(288): Homolog of NCBI NO: 15724224 NR Description: At2g43970/F6E13.10 [Arabidopsis thaliana]
MSLLANESISKHISKDPEGYVPVSYIASTKKIKALTSNHHLVSLALRSSSKLVVSEDGKKVKRTSQFTDRDREELQGRTVVAENLPDDHSYQNLEKIFGVVGNVKAIRICHPPESNSSRPKGDFLMSNKIHALIEYDNTVIADKAVEKLNDERNWRKGLRVRLLLRCSPKSVLKNRRNFDGILIDDELPSYESGEDSPRLHLTESQLDNDGDDNNVGGLWGKGRGKGRGRSPRSYAVGGGGRSFGIGLGVSLGIPSLGSHESSSPKTATKGPRMPDGTRGFTMGRGKPSISLSPNNL

SEQ ID NO: 96057 - DNA, 2275 bp, Arabidopsis thaliana
  misc_feature (1)..(2275): Ceres Seq. ID no. 12731656
  misc_feature: MA Experiment ID: 20000166 Result: Up-regulated in Transcription
  misc_feature: MA Experiment 20000166 PARAMETER Experiment Name: At_100uM_ABA_P Parameter: Age (day) Value: 14
  misc_feature: MA Experiment 20000166 PARAMETER Experiment Name: At_100uM_ABA_P Parameter: Organism Value: A. thaliana
  misc_feature: MA Experiment 20000166 PARAMETER Experiment Name: At_100uM_ABA_P Parameter: Plant Line Value: WS
  misc_feature: MA Experiment 20000166 PARAMETER Experiment Name: At_100uM_ABA_P Parameter: Timepoint (hr) Value: 1
  misc_feature: MA Experiment 20000166 PARAMETER Experiment Name: At_100uM_ABA_P Parameter: Tissue Value: Aerial
  misc_feature: MA Experiment 20000166 PARAMETER Experiment Name: At_100uM_ABA_P Parameter: Treatment Value: 100uM ABA vs. No Treatment
  misc_feature: MA Experiment ID: 20000169 Result: Up-regulated in Transcription
  misc_feature: MA Experiment 20000169 PARAMETER Experiment Name: At_100uM_ABA_P Parameter: Age (day) Value: 14
  misc_feature: MA Experiment 20000169 PARAMETER Experiment Name: At_100uM_ABA_P Parameter: Organism Value: A. thaliana
  misc_feature: MA Experiment 20000169 PARAMETER Experiment Name: At_100uM_ABA_P Parameter: Plant Line Value: WS
  misc_feature: MA Experiment 20000169 PARAMETER Experiment Name: At_100uM_ABA_P Parameter: Timepoint (hr) Value: 6
  misc_feature: MA Experiment 20000169 PARAMETER Experiment Name: At_100uM_ABA_P Parameter: Tissue Value: Aerial
  misc_feature: MA Experiment 20000169 PARAMETER Experiment Name: At_100uM_ABA_P Parameter: Treatment Value: 100uM ABA vs. No Treatment
  misc_feature: MA Experiment ID: 20000179 Result: Up-regulated in Transcription
  misc_feature: MA Experiment 20000179 PARAMETER Experiment Name: At_Germinating_Seeds_P Parameter: Age (hr) Value: 6 vs. 0
  misc_feature: MA Experiment 20000179 PARAMETER Experiment Name: At_Germinating_Seeds_P Parameter: Tissue Value: Germinating Seeds
  misc_feature: MA Experiment ID: 20000180 Result: Up-regulated in Transcription
  misc_feature: MA Experiment 20000180 PARAMETER Experiment Name: At_Germinating_Seeds_P Parameter: Age (hr) Value: 24 vs. 0
  misc_feature: MA Experiment 20000180 PARAMETER Experiment Name: At_Germinating_Seeds_P Parameter: Tissue Value: Germinating Seeds
  misc_feature: MA Experiment ID: 20000185 Result: Up-regulated in Transcription
  misc_feature: MA Experiment 20000185 PARAMETER Experiment Name: At_Roots__P Parameter: Age (day) Value: 7 vs. 21
  misc_feature: MA Experiment 20000185 PARAMETER Experiment Name: At_Roots__P Parameter: Organism Value: A. thaliana
  misc_feature: MA Experiment 20000185 PARAMETER Experiment Name: At_Roots__P Parameter: Tissue Value: Roots vs. Whole Plant
  misc_feature: MA Experiment ID: 20000265 Result: Up-regulated in Transcription
  misc_feature: MA Experiment 20000265 PARAMETER Experiment Name: At_Open_Flower_P Parameter: Age (day) Value: 21
  misc_feature: MA Experiment 20000265 PARAMETER Experiment Name: At_Open_Flower_P Parameter: Plant Line Value: WS
  misc_feature: MA Experiment 20000265 PARAMETER Experiment Name: At_Open_Flower_P Parameter: Tissue Value: Closed Flower vs. Whole Plant
  misc_feature: MA Experiment ID: 20000286 Result: Up-regulated in Transcription
  misc_feature: MA Experiment 20000286 PARAMETER Experiment Name: At_Open_Flower_P Parameter: Age (day) Value: 21
  misc_feature: MA Experiment 20000286 PARAMETER Experiment Name: At_Open_Flower_P Parameter: Plant Line Value: WS
  misc_feature: MA Experiment 20000286 PARAMETER Experiment Name: At_Open_Flower_P Parameter: Tissue Value: Half Open vs. Whole Plant
  misc_feature: MA Experiment ID: 20000436 Result: Up-regulated in Transcription
  misc_feature: MA Experiment 20000436 PARAMETER Experiment Name: At_Drought_P Parameter: Age (day) Value: 7
  misc_feature: MA Experiment 20000436 PARAMETER Experiment Name: At_Drought_P Parameter: Organism Value: A. thaliana
  misc_feature: MA Experiment 20000436 PARAMETER Experiment Name: At_Drought_P Parameter: Plant Line Value: WS
  misc_feature: MA Experiment 20000436 PARAMETER Experiment Name: At_Drought_P Parameter: Timepoint (hr) Value: 12
  misc_feature: MA Experiment 20000436 PARAMETER Experiment Name: At_Drought_P Parameter: Tissue Value: Whole Plant
  misc_feature: MA Experiment 20000436 PARAMETER Experiment Name: At_Drought_P Parameter: Treatment Value: Drought vs. No Drought
  misc_feature: MA Experiment ID: 20000437 Result: Up-regulated in Transcription
  misc_feature: MA Experiment 20000437 PARAMETER Experiment Name: At_Drought_P Parameter: Age (day) Value: 8
  misc_feature: MA Experiment 20000437 PARAMETER Experiment Name: At_Drought_P Parameter: Organism Value: A. thaliana
  misc_feature: MA Experiment 20000437 PARAMETER Experiment Name: At_Drought_P Parameter: Plant Line Value: WS
  misc_feature: MA Experiment 20000437 PARAMETER Experiment Name: At_Drought_P Parameter: Timepoint (hr) Value: 24
  misc_feature: MA Experiment 20000437 PARAMETER Experiment Name: At_Drought_P Parameter: Tissue Value: Whole Plant
  misc_feature: MA Experiment 20000437 PARAMETER Experiment Name: At_Drought_P Parameter: Treatment Value: Drought vs. No Drought
  misc_feature: MA Experiment ID: 20000439 Result: Up-regulated in Transcription
  misc_feature: MA Experiment 20000439 PARAMETER Experiment Name: At_Roots__P Parameter: Age (day) Value: 14 vs. 21
  misc_feature: MA Experiment 20000439 PARAMETER Experiment Name: At_Roots__P Parameter: Organism Value: A. thaliana
  misc_feature: MA Experiment 20000439 PARAMETER Experiment Name: At_Roots__P Parameter: Tissue Value: Roots vs. Whole Plant
  misc_feature: MA Experiment ID: 20000794 Result: Up-regulated in Transcription
  misc_feature: MA Experiment 20000794 PARAMETER Experiment Name: At_Petals_P Parameter: Age (day) Value: 23-25 days
  misc_feature: MA Experiment 20000794 PARAMETER Experiment Name: At_Petals_P Parameter: Plant Line Value: WS
  misc_feature: MA Experiment 20000794 PARAMETER Experiment Name: At_Petals_P Parameter: Tissue Value: Petals vs. Whole plant
  misc_feature: MA Experiment ID: 20001451 Result: Up-regulated in Transcription
  misc_feature: MA Experiment 20001451 PARAMETER Experiment Name: At_Far-red-induction_P Parameter: Age (day) Value: 7
  misc_feature: MA Experiment 20001451 PARAMETER Experiment Name: At_Far-red-induction_P Parameter: Light Value: Far-red vs. White
  misc_feature: MA Experiment 20001451 PARAMETER Experiment Name: At_Far-red-induction_P Parameter: Organism Value: A. thaliana
  misc_feature: MA Experiment 20001451 PARAMETER Experiment Name: At_Far-red-induction_P Parameter: Plant Line Value: Columbia
  misc_feature: MA Experiment 20001451 PARAMETER Experiment Name: At_Far-red-induction_P Parameter: Timepoint (hr) Value: 24
  misc_feature: MA Experiment 20001451 PARAMETER Experiment Name: At_Far-red-induction_P Parameter: Tissue Value: Whole Plant
  misc_feature: MA Experiment ID: 20001554 Result: Up-regulated in Transcription
  misc_feature: MA Experiment 20001554 PARAMETER Experiment Name: At_Drought_Soil_Dry_P Parameter: Age (day) Value: 21
  misc_feature: MA Experiment 20001554 PARAMETER Experiment Name: At_Drought_Soil_Dry_P Parameter: Organism Value: A. thaliana
  misc_feature: MA Experiment 20001554 PARAMETER Experiment Name: At_Drought_Soil_Dry_P Parameter: Plant Line Value: WS
  misc_feature: MA Experiment 20001554 PARAMETER Experiment Name: At_Drought_Soil_Dry_P Parameter: Post Timepoint (hr) Value: None
  misc_feature: MA Experiment 20001554 PARAMETER Experiment Name: At_Drought_Soil_Dry_P Parameter: Post-Treatment Value: None
  misc_feature: MA Experiment 20001554 PARAMETER Experiment Name: At_Drought_Soil_Dry_P Parameter: Timepoint (day) Value: 7
  misc_feature: MA Experiment 20001554 PARAMETER Experiment Name: At_Drought_Soil_Dry_P Parameter: Treatment Value: Drought vs. No Drought
  misc_feature: MA Experiment ID: 20001555 Result: Up-regulated in Transcription
  misc_feature: MA Experiment 20001555 PARAMETER Experiment Name: At_Drought_Soil_Dry_P Parameter: Age (day) Value: 24
  misc_feature: MA Experiment 20001555 PARAMETER Experiment Name: At_Drought_Soil_Dry_P Parameter: Organism Value: A. thaliana
  misc_feature: MA Experiment 20001555 PARAMETER Experiment Name: At_Drought_Soil_Dry_P Parameter: Plant Line Value: WS
  misc_feature: MA Experiment 20001555 PARAMETER Experiment Name: At_Drought_Soil_Dry_P Parameter: Post Timepoint (hr) Value: None
  misc_feature: MA Experiment 20001555 PARAMETER Experiment Name: At_Drought_Soil_Dry_P Parameter: Post-Treatment Value: None
  misc_feature: MA Experiment 20001555 PARAMETER Experiment Name: At_Drought_Soil_Dry_P Parameter: Timepoint (day) Value: 10
  misc_feature: MA Experiment 20001555 PARAMETER Experiment Name: At_Drought_Soil_Dry_P Parameter: Treatment Value: Drought vs. No Drought
  misc_feature: MA Experiment ID: 20001556 Result: Up-regulated in Transcription
  misc_feature: MA Experiment 20001556 PARAMETER Experiment Name: At_Drought_Soil_Dry_P Parameter: Age (day) Value: 26
  misc_feature: MA Experiment 20001556 PARAMETER Experiment Name: At_Drought_Soil_Dry_P Parameter: Organism Value: A. thaliana
  misc_feature: MA Experiment 20001556 PARAMETER Experiment Name: At_Drought_Soil_Dry_P Parameter: Plant Line Value: WS
  misc_feature: MA Experiment 20001556 PARAMETER Experiment Name: At_Drought_Soil_Dry_P Parameter: Post Timepoint (hr) Value: None
  misc_feature: MA Experiment 20001556 PARAMETER Experiment Name: At_Drought_Soil_Dry_P Parameter: Post-Treatment Value: None
  misc_feature: MA Experiment 20001556 PARAMETER Experiment Name: At_Drought_Soil_Dry_P Parameter: Timepoint (day) Value: 12
  misc_feature: MA Experiment 20001556 PARAMETER Experiment Name: At_Drought_Soil_Dry_P Parameter: Treatment Value: Drought vs. No Drought
  misc_feature: MA Experiment ID: 20001560 Result: Up-regulated in Transcription
  misc_feature: MA Experiment 20001560 PARAMETER Experiment Name: At_Drought_Soil_Dry_P Parameter: Age (day) Value: 28
  misc_feature: MA Experiment 20001560 PARAMETER Experiment Name: At_Drought_Soil_Dry_P Parameter: Organism Value: A. thaliana
  misc_feature: MA Experiment 20001560 PARAMETER Experiment Name: At_Drought_Soil_Dry_P Parameter: Plant Line Value: WS
  misc_feature: MA Experiment 20001560 PARAMETER Experiment Name: At_Drought_Soil_Dry_P Parameter: Post Timepoint (hr) Value: None
  misc_feature: MA Experiment 20001560 PARAMETER Experiment Name: At_Drought_Soil_Dry_P Parameter: Post-Treatment Value: None
  misc_feature: MA Experiment 20001560 PARAMETER Experiment Name: At_Drought_Soil_Dry_P Parameter: Timepoint (day) Value: 14
  misc_feature: MA Experiment 20001560 PARAMETER Experiment Name: At_Drought_Soil_Dry_P Parameter: Treatment Value: Drought vs. No Drought
  misc_feature: MA Experiment ID: 20001904 Result: Up-regulated in Transcription
  misc_feature: MA Experiment 20001904 PARAMETER Experiment Name: At_Drought_Reproduction_P Parameter: Age (day) Value: 37
  misc_feature: MA Experiment 20001904 PARAMETER Experiment Name: At_Drought_Reproduction_P Parameter: Organism Value: A. thaliana
  misc_feature: MA Experiment 20001904 PARAMETER Experiment Name: At_Drought_Reproduction_P Parameter: Plant Line Value: WS
  misc_feature: MA Experiment 20001904 PARAMETER Experiment Name: At_Drought_Reproduction_P Parameter: Timepoint (day) Value: 7
  misc_feature: MA Experiment 20001904 PARAMETER Experiment Name: At_Drought_Reproduction_P Parameter: Tissue Value: Rosettes
  misc_feature: MA Experiment 20001904 PARAMETER Experiment Name: At_Drought_Reproduction_P Parameter: Treatment Value: Drought vs. No Drought
  misc_feature: MA Experiment ID: 20001905 Result: Up-regulated in Transcription
  misc_feature: MA Experiment 20001905 PARAMETER Experiment Name: At_Drought_Reproduction_P Parameter: Age (day) Value: 40
  misc_feature: MA Experiment 20001905 PARAMETER Experiment Name: At_Drought_Reproduction_P Parameter: Organism Value: A. thaliana
  misc_feature: MA Experiment 20001905 PARAMETER Experiment Name: At_Drought_Reproduction_P Parameter: Plant Line Value: WS
  misc_feature: MA Experiment 20001905 PARAMETER Experiment Name: At_Drought_Reproduction_P Parameter: Timepoint (day) Value: 10
  misc_feature: MA Experiment 20001905 PARAMETER Experiment Name: At_Drought_Reproduction_P Parameter: Tissue Value: Rosettes
  misc_feature: MA Experiment 20001905 PARAMETER Experiment Name: At_Drought_Reproduction_P Parameter: Treatment Value: Drought vs. No Drought
gcagattctgccatgtggcttctctctcttctacagctcacttcttctctctctgtctctctctaactacattgaaaccaaaccagagtgcttcaatgtcattgctgtgattctctttaagtccagacataactcccatatcttcttcttctgtctttttttatttctttgaaccggagaagaagaagaagaaggagaaggatatatgggaggctgtacttccaaaccttcctcctccgtcaaacctaatccttacgcacccaaagacgcggttctccaaaatgacgattctacccctgctcatcccgggaaatcaccggttcgttcatctcccgccgtaaaggcctctccttttttccctttttacacgcctagtcccgcccggcaccgccgtaacaagagccgcgacggcggaggaggagagagtaagagcgttaccagcactcctctccgtcagctcgcgcgtgctttccaccctccgtcaccggcgagacatatacgggatgttctgcggcggaggaaggagaagaaggaggctgctctgccggcggcgaggcagcagaaggaggaggaggagagggaagaggtagggctggataaaagatttgggttttccaaggagttacagagtaggattgagctaggggaagagattgggagagggcattttgggtatacttgctctgctaagttcaagaaaggagagctcaaagatcaggaggttgctgttaaagtcatcccaaaatctaagatgacatctgcaatatctatagaggatgtgagaagagaagtgaaaatactgcgggcgttatctggacatcaaaatttggtacaattctatgatgcgttcgaggacaatgccaacgtttacatcgttatggagttatgtggaggtggtgaacttcttgacaggatactagcaaggggaggaaaatactctgaagatgatgcaaaagcagtgcttatacagatccttaacgtcgtagctttctgtcatctccaaggagttgttcatcgagatctaaaaccagagaacttcttgtacacttccaaggaggagaattctatgttgaaagtcatagattttggcttatcggactttgtcagaccagacgaaagactaaatgatatagtgggaagtgcatattacgtagcccctgaagttctacacagatcttataccacagaagcggatgtatggagcataggagtcatagcatacattctcctatgtggaagccgtcctttttgggcaagaactgaatcaggaattttcagagcagttctaaaagctgatcccagttttgatgaacctccttggccttcgttatcctttgaggcaaaagattttgttaagagattattgtacaaggaccctcggaaaagaatgactgcatctcaagctttgatgcatccttggatcgcgggttataagaaaatagatatcccatttgatattctgatcttcaagcagatcaaagcatacttgagatcttcgtctttgcgcaaagctgctttgatggctctgtccaagacattaactaccgatgaacttctttatctgaaagcgcagtttgcacacttagcacccaacaaaaatggcctcatcactttagatagcatcagactggcacttgcgacaaatgcaacagaagcaatgaaggaatcacggatcccggactttcttgcattgttaaatggacttcaatacaaagggatggattttgaagagttttgtgcagcttccattagcgttcatcagcatgagtctcttgattgttgggagcagagcattcgtcatgcttatgagctatttgaaatgaatggaaaccgagttatcgtcatcgaagaactcgcttctgaacttggtgttggatcatccatcccggttcataccattctaaatgactggataagacatactgacgggaagctgagtttcttgggttttgtcaaactgctgcacggtgtctcgactcgacaatctttagcgaaaacgcgatgaggaaagtgactcggtgttataacggattcgaaagaggaagaacatacaactgcaagaagcaaatgggtggattggggttgggaattggaatttttttcaggacccattcctatgtttatagtgttagaaaaagaatgctaagttccgacaaagaaagagagtatccagaaaaatccgacaggcctggagagttgtataataagatgataatccacagtcgtgttcttccaaatcatggaagacagatattaagaacatccctttctcttt

SEQ ID NO: 96058 - protein, 599 aa, Arabidopsis thaliana
  peptide (1)..(599): Ceres Seq. ID no. 12731657
  misc_feature (144)..(406): Pfam Name: Protein kinase domain Pfam Description: Protein kinase domain
  misc_feature (1)..(599): Homolog of NCBI NO: 15222781 NR Description: CDPK-related protein kinase, putative; protein id:
  misc_feature (1)..(599): Homolog of NCBI NO: 16904226 NR Description: calcium/calmodulin-dependent protein kinase CaMK3
  misc_feature (1)..(592): Homolog of NCBI NO: 15229785 NR Description: CDPK-related protein kinase; protein id: supported by cDNA: gi_16904213 [Arabidopsis thaliana]
  misc_feature (1)..(592): Homolog of NCBI NO: 2154715 NR Description: CDPK-related protein kinase [Arabidopsis thaliana]
  misc_feature (1)..(599): Homolog of NCBI NO: 1706130 NR Description: CDPK-related protein kinase (PK421)
  misc_feature (1)..(597): Homolog of NCBI NO: 23237898 NR Description: putative calcium/calmodulin-dependent protein
  misc_feature (23)..(592): Homolog of NCBI NO: 15226841 NR Description: CPDK-related protein kinase; protein id: supported by cDNA: gi_16904217, supported by cDNA: gi_5020365
  misc_feature (36)..(592): Homolog of NCBI NO: 15229002 NR Description: calcium-dependent protein kinase-like; protein id:
  misc_feature (1)..(594): Homolog of NCBI NO: 7446431 NR Description: calcium-dependent protein kinase-related protein
  misc_feature (1)..(597): Homolog of NCBI NO: 37535966 NR Description: putative kinase [Oryza sativa (japonica
MGGCTSKPSSSVKPNPYAPKDAVLQNDDSTPAHPGKSPVRSSPAVKASPFFPFYTPSPARHRRNKSRDGGGGESKSVTSTPLRQLARAFHPPSPARHIRDVLRRRKEKKEAALPAARQQKEEEEREEVGLDKRFGFSKELQSRIELGEEIGRGHFGYTCSAKFKKGELKDQEVAVKVIPKSKMTSAISIEDVRREVKILRALSGHQNLVQFYDAFEDNANVYIVMELCGGGELLDRILARGGKYSEDDAKAVLIQILNVVAFCHLQGVVHRDLKPENFLYTSKEENSMLKVIDFGLSDFVRPDERLNDIVGSAYYVAPEVLHRSYTTEADVWSIGVIAYILLCGSRPFWARTESGIFRAVLKADPSFDEPPWPSLSFEAKDFVKRLLYKDPRKRMTASQALMHPWIAGYKKIDIPFDILIFKQIKAYLRSSSLRKAALMALSKTLTTDELLYLKAQFAHLAPNKNGLITLDSIRLALATNATEAMKESRIPDFLALLNGLQYKGMDFEEFCAASISVHQHESLDCWEQSIRHAYELFEMNGNRVIVIEELASELGVGSSIPVHTILNDWIRHTDGKLSFLGFVKLLHGVSTRQSLAKTR

SEQ ID NO: 96059 - protein, 417 aa, Arabidopsis thaliana
  peptide (1)..(417): Ceres Seq. ID no. 12731658
  misc_feature (1)..(224): Pfam Name: Protein kinase domain Pfam Description: Protein kinase domain
  misc_feature (1)..(417): Homolog of NCBI NO: 15222781 NR Description: CDPK-related protein kinase, putative; protein id:
  misc_feature (1)..(417): Homolog of NCBI NO: 16904226 NR Description: calcium/calmodulin-dependent protein kinase CaMK3
  misc_feature (1)..(410): Homolog of NCBI NO: 15229785 NR Description: CDPK-related protein kinase; protein id: supported by cDNA: gi_16904213 [Arabidopsis thaliana]
  misc_feature (1)..(410): Homolog of NCBI NO: 2154715 NR Description: CDPK-related protein kinase [Arabidopsis thaliana]
  misc_feature (1)..(417): Homolog of NCBI NO: 1706130 NR Description: CDPK-related protein kinase (PK421)
  misc_feature (1)..(415): Homolog of NCBI NO: 23237898 NR Description: putative calcium/calmodulin-dependent protein
  misc_feature (1)..(410): Homolog of NCBI NO: 15226841 NR Description: CPDK-related protein kinase; protein id: supported by cDNA: gi_16904217, supported by cDNA: gi_5020365
  misc_feature (1)..(410): Homolog of NCBI NO: 15229002 NR Description: calcium-dependent protein kinase-like; protein id:
  misc_feature (1)..(412): Homolog of NCBI NO: 7446431 NR Description: calcium-dependent protein kinase-related protein
  misc_feature (1)..(415): Homolog of NCBI NO: 37535966 NR Description: putative kinase [Oryza sativa (japonica
MTSAISIEDVRREVKILRALSGHQNLVQFYDAFEDNANVYIVMELCGGGELLDRILARGGKYSEDDAKAVLIQILNVVAFCHLQGVVHRDLKPENFLYTSKEENSMLKVIDFGLSDFVRPDERLNDIVGSAYYVAPEVLHRSYTTEADVWSIGVIAYILLCGSRPFWARTESGIFRAVLKADPSFDEPPWPSLSFEAKDFVKRLLYKDPRKRMTASQALMHPWIAGYKKIDIPFDILIFKQIKAYLRSSSLRKAALMALSKTLTTDELLYLKAQFAHLAPNKNGLITLDSIRLALATNATEAMKESRIPDFLALLNGLQYKGMDFEEFCAASISVHQHESLDCWEQSIRHAYELFEMNGNRVIVIEELASELGVGSSIPVHTILNDWIRHTDGKLSFLGFVKLLHGVSTRQSLAKTR

SEQ ID NO: 96060 - protein, 375 aa, Arabidopsis thaliana
  peptide (1)..(375): Ceres Seq. ID no. 12731659
  misc_feature (1)..(182): Pfam Name: Protein kinase domain Pfam Description: Protein kinase domain
  misc_feature (1)..(375): Homolog of NCBI NO: 15222781 NR Description: CDPK-related protein kinase, putative; protein id:
  misc_feature (1)..(375): Homolog of NCBI NO: 16904226 NR Description: calcium/calmodulin-dependent protein kinase CaMK3
  misc_feature (1)..(368): Homolog of NCBI NO: 15229785 NR Description: CDPK-related protein kinase; protein id: supported by cDNA: gi_16904213 [Arabidopsis thaliana]
  misc_feature (1)..(368): Homolog of NCBI NO: 2154715 NR Description: CDPK-related protein kinase [Arabidopsis thaliana]
  misc_feature (1)..(375): Homolog of NCBI NO: 1706130 NR Description: CDPK-related protein kinase (PK421)
  misc_feature (1)..(373): Homolog of NCBI NO: 23237898 NR Description: putative calcium/calmodulin-dependent protein
  misc_feature (1)..(368): Homolog of NCBI NO: 15226841 NR Description: CPDK-related protein kinase; protein id: supported by cDNA: gi_16904217, supported by cDNA: gi_5020365
  misc_feature (1)..(368): Homolog of NCBI NO: 15229002 NR Description: calcium-dependent protein kinase-like; protein id:
  misc_feature (1)..(370): Homolog of NCBI NO: 7446431 NR Description: calcium-dependent protein kinase-related protein
  misc_feature (1)..(373): Homolog of NCBI NO: 37535966 NR Description: putative kinase [Oryza sativa (japonica
MELCGGGELLDRILARGGKYSEDDAKAVLIQILNVVAFCHLQGVVHRDLKPENFLYTSKEENSMLKVIDFGLSDFVRPDERLNDIVGSAYYVAPEVLHRSYTTEADVWSIGVIAYILLCGSRPFWARTESGIFRAVLKADPSFDEPPWPSLSFEAKDFVKRLLYKDPRKRMTASQALMHPWIAGYKKIDIPFDILIFKQIKAYLRSSSLRKAALMALSKTLTTDELLYLKAQFAHLAPNKNGLITLDSIRLALATNATEAMKESRIPDFLALLNGLQYKGMDFEEFCAASISVHQHESLDCWEQSIRHAYELFEMNGNRVIVIEELASELGVGSSIPVHTILNDWIRHTDGKLSFLGFVKLLHGVSTRQSLAKTR

SEQ ID NO: 96061 - DNA, 1797 bp, Arabidopsis thaliana
  misc_feature (1)..(1797): Ceres Seq. ID no. 12731684
  misc_feature: MA Experiment ID: 20000437 Result: Up-regulated in Transcription
  misc_feature: MA Experiment 20000437 PARAMETER Experiment Name: At_Drought_P Parameter: Age (day) Value: 8
  misc_feature: MA Experiment 20000437 PARAMETER Experiment Name: At_Drought_P Parameter: Organism Value: A. thaliana
  misc_feature: MA Experiment 20000437 PARAMETER Experiment Name: At_Drought_P Parameter: Plant Line Value: WS
  misc_feature: MA Experiment 20000437 PARAMETER Experiment Name: At_Drought_P Parameter: Timepoint (hr) Value: 24
  misc_feature: MA Experiment 20000437 PARAMETER Experiment Name: At_Drought_P Parameter: Tissue Value: Whole Plant
  misc_feature: MA Experiment 20000437 PARAMETER Experiment Name: At_Drought_P Parameter: Treatment Value: Drought vs. No Drought
  misc_feature: MA Experiment ID: 20001557 Result: Down-regulated in Transcription
  misc_feature: MA Experiment 20001557 PARAMETER Experiment Name: At_Drought_Soil_Dry_P Parameter: Age (day) Value: 27
  misc_feature: MA Experiment 20001557 PARAMETER Experiment Name: At_Drought_Soil_Dry_P Parameter: Organism Value: A. thaliana
  misc_feature: MA Experiment 20001557 PARAMETER Experiment Name: At_Drought_Soil_Dry_P Parameter: Plant Line Value: WS
  misc_feature: MA Experiment 20001557 PARAMETER Experiment Name: At_Drought_Soil_Dry_P Parameter: Post Timepoint (hr) Value: 3
  misc_feature: MA Experiment 20001557 PARAMETER Experiment Name: At_Drought_Soil_Dry_P Parameter: Post-Treatment Value: Re-Water vs. No Drought
  misc_feature: MA Experiment 20001557 PARAMETER Experiment Name: At_Drought_Soil_Dry_P Parameter: Timepoint (day) Value: 13
  misc_feature: MA Experiment 20001557 PARAMETER Experiment Name: At_Drought_Soil_Dry_P Parameter: Treatment Value: Drought vs. No Drought
  misc_feature: MA Experiment ID: 20001558 Result: Down-regulated in Transcription
  misc_feature: MA Experiment 20001558 PARAMETER Experiment Name: At_Drought_Soil_Dry_P Parameter: Age (day) Value: 27
  misc_feature: MA Experiment 20001558 PARAMETER Experiment Name: At_Drought_Soil_Dry_P Parameter: Organism Value: A. thaliana
  misc_feature: MA Experiment 20001558 PARAMETER Experiment Name: At_Drought_Soil_Dry_P Parameter: Plant Line Value: WS
  misc_feature: MA Experiment 20001558 PARAMETER Experiment Name: At_Drought_Soil_Dry_P Parameter: Post Timepoint (hr) Value: 6
  misc_feature: MA Experiment 20001558 PARAMETER Experiment Name: At_Drought_Soil_Dry_P Parameter: Post-Treatment Value: Re-Water vs. No Drought
  misc_feature: MA Experiment 20001558 PARAMETER Experiment Name: At_Drought_Soil_Dry_P Parameter: Timepoint (day) Value: 13
  misc_feature: MA Experiment 20001558 PARAMETER Experiment Name: At_Drought_Soil_Dry_P Parameter: Treatment Value: Drought vs. No Drought
  misc_feature: MA Experiment ID: 20001560 Result: Down-regulated in Transcription
  misc_feature: MA Experiment 20001560 PARAMETER Experiment Name: At_Drought_Soil_Dry_P Parameter: Age (day) Value: 28
  misc_feature: MA Experiment 20001560 PARAMETER Experiment Name: At_Drought_Soil_Dry_P Parameter: Organism Value: A. thaliana
  misc_feature: MA Experiment 20001560 PARAMETER Experiment Name: At_Drought_Soil_Dry_P Parameter: Plant Line Value: WS
  misc_feature: MA Experiment 20001560 PARAMETER Experiment Name: At_Drought_Soil_Dry_P Parameter: Post Timepoint (hr) Value: None
  misc_feature: MA Experiment 20001560 PARAMETER Experiment Name: At_Drought_Soil_Dry_P Parameter: Post-Treatment Value: None
  misc_feature: MA Experiment 20001560 PARAMETER Experiment Name: At_Drought_Soil_Dry_P Parameter: Timepoint (day) Value: 14
  misc_feature: MA Experiment 20001560 PARAMETER Experiment Name: At_Drought_Soil_Dry_P Parameter: Treatment Value: Drought vs. No Drought
gctcgtgtcgaggcggcagcaacacacttgtcgtctctccctgtagcttctctggagttttcgcagtcacgaatcttgttttgaagaaattaatttgaacaagggttttagggcttggatgctttgttttcattgaaaaagaagtagaaggagtgtatacaaggattatgggaactcacatcaatttcaacaacttaggaggtggtggtcatcctggaggggaagggagtagtaaccagatgaagccaacgggtagtgtcatgcccttggctaggcagtcctcggtctactcccttacctttgatgagttacagaacacactaggtggaccgggaaaagatttcgggtcgatgaacatggatgaactcctgaagagcatatggactgctgaggaagctcaggccatggccatgacttctgcgccagctgctacagcggtagcgcaacctggtgctggtatcccacccccaggtgggaatctccagaggcaaggttcgttgacgttgcctagaacaattagtcagaagactgttgatgaggtgtggaaatgtttgatcaccaaggatggtaatatggaaggtagcagcggaggcggtggtgagtcgaatgtgcctcctggaaggcaacagactttaggggaaatgacacttgaagaatttctgttccgtgctggggttgtaagagaagataactgtgttcaacagatgggtcaggtcaacggaaacaataacaatgggttttatggtaacagcactgctgctggcggcttaggttttggatttggtcagccaaatcaaaacagcataacattcaatggtactaatgattctatgatcttgaatcagccacctggtttagggctcaaaatgggtggaacaatgcagcagcaacaacaacaacagcagttgcttcagcagcaacaacagcagatgcagcagctgaatcagcctcatccacagcagcggctgcctcaaaccatttttcctaaacaagcaaacgtagcattttctgcgcctgtgaatataaccaacaagggttttgctggggctgcaaataattctatcaacaataataatggattagctagttacggaggaaccggggtcactgttgcagcaacttctccaggaacaagcagcgcagaaaataattctttatcaccagttccgtatgtgcttaatcgaggacgaagaagcaatacaggtctagagaaggttatcgagaggaggcaaaggagaatgatcaagaatcgggaatcagctgctagatcaagagctcgaaagcaggcttatacattggaactggaagccgaaattgaaaagctcaagaaaacgaatcaagaactgcagaaaaaacaggctgaaatggtggaaatgcagaagaatgagctgaaagaaacgtcgaagcgaccgtggggcagcaaaaggcaatgcttgagaaggacattaaccggaccatggtgaaggatgaagcaacaagaacggatgaaccagactcctagcttgggattaatgtaataggatagtgctacctgtacaggagattaagagaaattgagtgaaagatctaggttacagagtaggagagagttttcattatgaataaatgacattttgtgccctgacctttgttagtttaggtttagattatcctctgttattgacttattgtgctttctggttgttagggtttctaaaagacatagttgtttatatatatgtctgactttgtattccggatttggttctcttgtgtcattaacttgggtttagccattattacttaagagtggcaacg

SEQ ID NO: 96062 - protein, 431 aa, Arabidopsis thaliana
  peptide (1)..(431): Ceres Seq. ID no. 12731685
  misc_feature (348)..(410): Pfam Name: bZIP transcription factor Pfam Description: bZIP transcription factor
  misc_feature (1)..(431): Homolog of NCBI NO: 18402186 NR Description: abscisic acid responsive elements-binding factor; id: At3g19290.1, supported by cDNA: gi_15292926, supported by
  misc_feature (1)..(397): Homolog of NCBI NO: 11994451 NR Description: abscisic acid responsive elements-binding factor
  misc_feature (102)..(431): Homolog of NCBI NO: 18418350 NR Description: abscisic acid responsive elements-binding protein id: At4g34000.1, supported by cDNA: gi_15451049, by cDNA: gi_20148276, supported by cDNA: gi_6739279 [Arabidopsis
  misc_feature (1)..(104): Homolog of NCBI NO: 18418350 NR Description: abscisic acid responsive elements-binding protein id: At4g34000.1, supported by cDNA: gi_15451049, by cDNA: gi_20148276, supported by cDNA: gi_6739279 [Arabidopsis
  misc_feature (146)..(431): Homolog of NCBI NO: 18402757 NR Description: abscisic acid responsive elements-binding factor; id: At1g49720.1, supported by cDNA: gi_6739273 [Arabidopsis
  misc_feature (5)..(431): Homolog of NCBI NO: 13775111 NR Description: bZIP transcription factor 6 [Phaseolus vulgaris]
  misc_feature (102)..(397): Homolog of NCBI NO: 30689879 NR Description: abscisic acid responsive elements-binding [Arabidopsis thaliana] >gi|13346159|gb|AAK19603.1|AF334210_1 bZIP
  misc_feature (1)..(104): Homolog of NCBI NO: 30689879 NR Description: abscisic acid responsive elements-binding [Arabidopsis thaliana] >gi|13346159|gb|AAK19603.1|AF334210_1 bZIP
  misc_feature (1)..(416): Homolog of NCBI NO: 18402757 NR Description: abscisic acid responsive elements-binding factor; id: At1g49720.1, supported by cDNA: gi_6739273 [Arabidopsis
  misc_feature (13)..(431): Homolog of NCBI NO: 30693958 NR Description: ABA-responsive element binding protein 1 thaliana] >gi|6739278|gb|AAF27180.1|AF093545_1 abscisic acid
MGTHINFNNLGGGGHPGGEGSSNQMKPTGSVMPLARQSSVYSLTFDELQNTLGGPGKDFGSMNMDELLKSIWTAEEAQAMAMTSAPAATAVAQPGAGIPPPGGNLQRQGSLTLPRTISQKTVDEVWKCLITKDGNMEGSSGGGGESNVPPGRQQTLGEMTLEEFLFRAGVVREDNCVQQMGQVNGNNNNGFYGNSTAAGGLGFGFGQPNQNSITFNGTNDSMILNQPPGLGLKMGGTMQQQQQQQQLLQQQQQQMQQLNQPHPQQRLPQTIFPKQANVAFSAPVNITNKGFAGAANNSINNNNGLASYGGTGVTVAATSPGTSSAENNSLSPVPYVLNRGRRSNTGLEKVIERRQRRMIKNRESAARSRARKQAYTLELEAEIEKLKKTNQELQKKQAEMVEMQKNELKETSKRPWGSKRQCLRRTLTGPW

SEQ ID NO: 96063 - protein, 407 aa, Arabidopsis thaliana
  peptide (1)..(407): Ceres Seq. ID no. 12731686
  misc_feature (324)..(386): Pfam Name: bZIP transcription factor Pfam Description: bZIP transcription factor
  misc_feature (1)..(407): Homolog of NCBI NO: 18402186 NR Description: abscisic acid responsive elements-binding factor; id: At3g19290.1, supported by cDNA: gi_15292926, supported by
  misc_feature (1)..(373): Homolog of NCBI NO: 11994451 NR Description: abscisic acid responsive elements-binding factor
  misc_feature (78)..(407): Homolog of NCBI NO: 18418350 NR Description: abscisic acid responsive elements-binding protein id: At4g34000.1, supported by cDNA: gi_15451049, by cDNA: gi_20148276, supported by cDNA: gi_6739279 [Arabidopsis
  misc_feature (1)..(80): Homolog of NCBI NO: 18418350 NR Description: abscisic acid responsive elements-binding protein id: At4g34000.1, supported by cDNA: gi_15451049, by cDNA: gi_20148276, supported by cDNA: gi_6739279 [Arabidopsis
  misc_feature (122)..(407): Homolog of NCBI NO: 18402757 NR Description: abscisic acid responsive elements-binding factor; id: At1g49720.1, supported by cDNA: gi_6739273 [Arabidopsis
  misc_feature (1)..(407): Homolog of NCBI NO: 13775111 NR Description: bZIP transcription factor 6 [Phaseolus vulgaris]
  misc_feature (78)..(373): Homolog of NCBI NO: 30689879 NR Description: abscisic acid responsive elements-binding [Arabidopsis thaliana] >gi|13346159|gb|AAK19603.1|AF334210_1 bZIP
  misc_feature (1)..(80): Homolog of NCBI NO: 30689879 NR Description: abscisic acid responsive elements-binding [Arabidopsis thaliana] >gi|13346159|gb|AAK19603.1|AF334210_1 bZIP
  misc_feature (1)..(392): Homolog of NCBI NO: 18402757 NR Description: abscisic acid responsive elements-binding factor; id: At1g49720.1, supported by cDNA: gi_6739273 [Arabidopsis
  misc_feature (1)..(407): Homolog of NCBI NO: 30693958 NR Description: ABA-responsive element binding protein 1 thaliana] >gi|6739278|gb|AAF27180.1|AF093545_1 abscisic acid
MKPTGSVMPLARQSSVYSLTFDELQNTLGGPGKDFGSMNMDELLKSIWTAEEAQAMAMTSAPAATAVAQPGAGIPPPGGNLQRQGSLTLPRTISQKTVDEVWKCLITKDGNMEGSSGGGGESNVPPGRQQTLGEMTLEEFLFRAGVVREDNCVQQMGQVNGNNNNGFYGNSTAAGGLGFGFGQPNQNSITFNGTNDSMILNQPPGLGLKMGGTMQQQQQQQQLLQQQQQQMQQLNQPHPQQRLPQTIFPKQANVAFSAPVNITNKGFAGAANNSINNNNGLASYGGTGVTVAATSPGTSSAENNSLSPVPYVLNRGRRSNTGLEKVIERRQRRMIKNRESAARSRARKQAYTLELEAEIEKLKKTNQELQKKQAEMVEMQKNELKETSKRPWGSKRQCLRRTLTGPW

SEQ ID NO: 96064 - protein, 400 aa, Arabidopsis thaliana
  peptide (1)..(400): Ceres Seq. ID no. 12731687
  misc_feature (317)..(379): Pfam Name: bZIP transcription factor Pfam Description: bZIP transcription factor
  misc_feature (1)..(400): Homolog of NCBI NO: 18402186 NR Description: abscisic acid responsive elements-binding factor; id: At3g19290.1, supported by cDNA: gi_15292926, supported by
  misc_feature (1)..(366): Homolog of NCBI NO: 11994451 NR Description: abscisic acid responsive elements-binding factor
  misc_feature (71)..(400): Homolog of NCBI NO: 18418350 NR Description: abscisic acid responsive elements-binding protein id: At4g34000.1, supported by cDNA: gi_15451049, by cDNA: gi_20148276, supported by cDNA: gi_6739279 [Arabidopsis
  misc_feature (1)..(73): Homolog of NCBI NO: 18418350 NR Description: abscisic acid responsive elements-binding protein id: At4g34000.1, supported by cDNA: gi_15451049, by cDNA: gi_20148276, supported by cDNA: gi_6739279 [Arabidopsis
  misc_feature (115)..(400): Homolog of NCBI NO: 18402757 NR Description: abscisic acid responsive elements-binding factor; id: At1g49720.1, supported by cDNA: gi_6739273 [Arabidopsis
  misc_feature (1)..(400): Homolog of NCBI NO: 13775111 NR Description: bZIP transcription factor 6 [Phaseolus vulgaris]
  misc_feature (71)..(366): Homolog of NCBI NO: 30689879 NR Description: abscisic acid responsive elements-binding [Arabidopsis thaliana] >gi|13346159|gb|AAK19603.1|AF334210_1 bZIP
  misc_feature (1)..(73): Homolog of NCBI NO: 30689879 NR Description: abscisic acid responsive elements-binding [Arabidopsis thaliana] >gi|13346159|gb|AAK19603.1|AF334210_1 bZIP
  misc_feature (1)..(385): Homolog of NCBI NO: 18402757 NR Description: abscisic acid responsive elements-binding factor; id: At1g49720.1, supported by cDNA: gi_6739273 [Arabidopsis
  misc_feature (1)..(400): Homolog of NCBI NO: 30693958 NR Description: ABA-responsive element binding protein 1 thaliana] >gi|6739278|gb|AAF27180.1|AF093545_1 abscisic acid
MPLARQSSVYSLTFDELQNTLGGPGKDFGSMNMDELLKSIWTAEEAQAMAMTSAPAATAVAQPGAGIPPPGGNLQRQGSLTLPRTISQKTVDEVWKCLITKDGNMEGSSGGGGESNVPPGRQQTLGEMTLEEFLFRAGVVREDNCVQQMGQVNGNNNNGFYGNSTAAGGLGFGFGQPNQNSITFNGTNDSMILNQPPGLGLKMGGTMQQQQQQQQLLQQQQQQMQQLNQPHPQQRLPQTIFPKQANVAFSAPVNITNKGFAGAANNSINNNNGLASYGGTGVTVAATSPGTSSAENNSLSPVPYVLNRGRRSNTGLEKVIERRQRRMIKNRESAARSRARKQAYTLELEAEIEKLKKTNQELQKKQAEMVEMQKNELKETSKRPWGSKRQCLRRTLTGPW

SEQ ID NO: 96065 - DNA, 1992 bp, Arabidopsis thaliana
  misc_feature (1)..(1992): Ceres Seq. ID no. 12731688
  misc_feature: MA Experiment ID: 20000315 Result: Down-regulated in Transcription
  misc_feature: MA Experiment 20000315 PARAMETER Experiment Name: At_14day_Shoots-Roots_Sub_P Parameter: Age (day) Value: 14
  misc_feature: MA Experiment 20000315 PARAMETER Experiment Name: At_14day_Shoots-Roots_Sub_P Parameter: Organism Value: A. thaliana
  misc_feature: MA Experiment 20000315 PARAMETER Experiment Name: At_14day_Shoots-Roots_Sub_P Parameter: Plant Line Value: WS
  misc_feature: MA Experiment 20000315 PARAMETER Experiment Name: At_14day_Shoots-Roots_Sub_P Parameter: Tissue Value: Shoots vs. Whole Plant
atggtgttggtttataatcaagctctcttgctcgcattcttcgcattgcttggattccagtactttcctttactcaccgaagcaggttgtccattggactttacttcatctaacttcactctagtggcttccgtatgctcgaacaacaccgagagagctaaatgctgccgctacatgaatgctttcgttgcaatatctgtcgcccgctatgcaaactacacagctgatcttggagttacatcagatttgactgaaatctgtatcactactatctctagaaccatggagctttatggaatcccaagaaatgctaccatcttctgtggattagggaccaagattcttgttaactatgattgtgagggtctgactactgtaccgccaatgcttcattccacaagttttggagatgtttccagaaactgcaaactcccgcttcctccgggtgatcaatgcaggaattgtttgaattccagtatcagctaccttaggagcctcgttggtgctgataatagcatcaaactgagtacttgtcgtgatgcaacttatgctgtgttagcaagccgggttgacaattcatcggctcttgaactagctagctgcttctttaatgtgcctgagcttagccccactccaggttcgtctccatcatcgctgagtccagaagcttctcctccagtgttagctgatagtccaagcagcgataatcttgttttgtctccattaaaaagtcaccatccatatcacttgacaatggttccgactattgggattgctgtcacagtttttgctcttgtgatggttgtagtcctaatagttcttatccaaagaaaaaaacgagaacttgatgactccaagagcatcgcttgtaatctaacaaggacatctccttctccccgcccaaggtcgatgattcatgaaggtaattcgtttggttttcggaaattcagctacaaggagataaggaaagcaactgaagatttcaacgcggtgattggccgtgggggctttgggactgtttacaaagctgagttcagtaatgggttggttgcagctgtaaaaaagatgaacaagagctctgaacaagctgaagatgaattttgcagagagatagagcttctcgccaggctgcatcaccgccacctagttgctttgaaagggttttgtaataagaagaacgagaggttccttgtctacgagtatatggaaaatgggagcctgaaggatcatctacactccacggaaaaatctccactaagttgggaatcaaggatgaaaatcgcaattgatgtggctaatgctctggaataccttcacttctactgtgaccctcccctctgtcacagagacattaagtcaagcaatatattactcgacgagcactttgttgctaagcttgcagattttggccttgcacatgcttctagagatggctccatttgttttgaacctgttaatactgatatccgcggaactccaggctatgtagatccagagtacgttgtaacacatgaactaacagagaaaagcgacgtgtacagctacggagtggtgttgctagagatcataactgggaaaagagcggttgatgaaggtaggaacctggtagaactgtctcagcctttgctggtatcagaatcaagacgcatagatctggtggatccgagaatcaaagactgcatagatggagaacagcttgaaacagtagtggcagttgtaagatggtgcacagagaaagaaggcgtggctaggccatcaatcaagcaagttctgaggctgttgtacgaaagctgtgatccgttgcatctcgggcttgcaatggcagttgaagagaacaaaggacggtcactgagaggtgactcagggttccaaagtggagacatccgtggcttggcttcttcctctagtactacttcaaggtcgcattgtagccggagttttctgcttgagactggctcccctcactctccaccaaatggtctctctttttga

SEQ ID NO: 96066 - protein, 663 aa, Arabidopsis thaliana
  peptide (1)..(663): Ceres Seq. ID no. 12731689
  misc_feature (2)..(663): Homolog of NCBI NO: 30694632 NR Description: expressed protein [Arabidopsis thaliana]
  misc_feature (9)..(661): Homolog of NCBI NO: 38345516 NR Description: OSJNBa0039K24.19 [Oryza sativa (japonica
  misc_feature (2)..(435): Homolog of NCBI NO: 18402761 NR Description: expressed protein; protein id: At1g49730.1,
  misc_feature (9)..(212): Homolog of NCBI NO: 5777621 NR Description: CAA30379.1 protein [Oryza sativa]
  misc_feature (272)..(395): Homolog of NCBI NO: 5777621 NR Description: CAA30379.1 protein [Oryza sativa]
  misc_feature (566)..(650): Homolog of NCBI NO: 5777621 NR Description: CAA30379.1 protein [Oryza sativa]
  misc_feature (449)..(524): Homolog of NCBI NO: 5777621 NR Description: CAA30379.1 protein [Oryza sativa]
  misc_feature (244)..(594): Homolog of NCBI NO: 15222211 NR Description: leucine-rich repeat transmembrane protein kinase,
  misc_feature (255)..(594): Homolog of NCBI NO: 11346408 NR Description: hypothetical protein T20L15.220 - Arabidopsis >gi|7329668|emb|CAB82765.1| putative protein [Arabidopsis
  misc_feature (206)..(644): Homolog of NCBI NO: 15218207 NR Description: protein kinase, putative; protein id: At1g52290.1
MVLVYNQALLLAFFALLGFQYFPLLTEAGCPLDFTSSNFTLVASVCSNNTERAKCCRYMNAFVAISVARYANYTADLGVTSDLTEICITTISRTMELYGIPRNATIFCGLGTKILVNYDCEGLTTVPPMLHSTSFGDVSRNCKLPLPPGDQCRNCLNSSISYLRSLVGADNSIKLSTCRDATYAVLASRVDNSSALELASCFFNVPELSPTPGSSPSSLSPEASPPVLADSPSSDNLVLSPLKSHHPYHLTMVPTIGIAVTVFALVMVVVLIVLIQRKKRELDDSKSIACNLTRTSPSPRPRSMIHEGNSFGFRKFSYKEIRKATEDFNAVIGRGGFGTVYKAEFSNGLVAAVKKMNKSSEQAEDEFCREIELLARLHHRHLVALKGFCNKKNERFLVYEYMENGSLKDHLHSTEKSPLSWESRMKIAIDVANALEYLHFYCDPPLCHRDIKSSNILLDEHFVAKLADFGLAHASRDGSICFEPVNTDIRGTPGYVDPEYVVTHELTEKSDVYSYGVVLLEIITGKRAVDEGRNLVELSQPLLVSESRRIDLVDPRIKDCIDGEQLETVVAVVRWCTEKEGVARPSIKQVLRLLYESCDPLHLGLAMAVEENKGRSLRGDSGFQSGDIRGLASSSSTTSRSHCSRSFLLETGSPHSPPNGLSF

SEQ ID NO: 96067 - protein, 605 aa, Arabidopsis thaliana
  peptide (1)..(605): Ceres Seq. ID no. 12731690
  misc_feature (1)..(605): Homolog of NCBI NO: 30694632 NR Description: expressed protein [Arabidopsis thaliana]
  misc_feature (1)..(603): Homolog of NCBI NO: 38345516 NR Description: OSJNBa0039K24.19 [Oryza sativa (japonica
  misc_feature (1)..(377): Homolog of NCBI NO: 18402761 NR Description: expressed protein; protein id: At1g49730.1,
  misc_feature (1)..(154): Homolog of NCBI NO: 5777621 NR Description: CAA30379.1 protein [Oryza sativa]
  misc_feature (214)..(337): Homolog of NCBI NO: 5777621 NR Description: CAA30379.1 protein [Oryza sativa]
  misc_feature (508)..(592): Homolog of NCBI NO: 5777621 NR Description: CAA30379.1 protein [Oryza sativa]
  misc_feature (391)..(466): Homolog of NCBI NO: 5777621 NR Description: CAA30379.1 protein [Oryza sativa]
  misc_feature (186)..(536): Homolog of NCBI NO: 15222211 NR Description: leucine-rich repeat transmembrane protein kinase,
  misc_feature (197)..(536): Homolog of NCBI NO: 11346408 NR Description: hypothetical protein T20L15.220 - Arabidopsis >gi|7329668|emb|CAB82765.1| putative protein [Arabidopsis
  misc_feature (148)..(586): Homolog of NCBI NO: 15218207 NR Description: protein kinase, putative; protein id: At1g52290.1
MNAFVAISVARYANYTADLGVTSDLTEICITTISRTMELYGIPRNATIFCGLGTKILVNYDCEGLTTVPPMLHSTSFGDVSRNCKLPLPPGDQCRNCLNSSISYLRSLVGADNSIKLSTCRDATYAVLASRVDNSSALELASCFFNVPELSPTPGSSPSSLSPEASPPVLADSPSSDNLVLSPLKSHHPYHLTMVPTIGIAVTVFALVMVVVLIVLIQRKKRELDDSKSIACNLTRTSPSPRPRSMIHEGNSFGFRKFSYKEIRKATEDFNAVIGRGGFGTVYKAEFSNGLVAAVKKMNKSSEQAEDEFCREIELLARLHHRHLVALKGFCNKKNERFLVYEYMENGSLKDHLHSTEKSPLSWESRMKIAIDVANALEYLHFYCDPPLCHRDIKSSNILLDEHFVAKLADFGLAHASRDGSICFEPVNTDIRGTPGYVDPEYVVTHELTEKSDVYSYGVVLLEIITGKRAVDEGRNLVELSQPLLVSESRRIDLVDPRIKDCIDGEQLETVVAVVRWCTEKEGVARPSIKQVLRLLYESCDPLHLGLAMAVEENKGRSLRGDSGFQSGDIRGLASSSSTTSRSHCSRSFLLETGSPHSPPNGLSF

SEQ ID NO: 96068 - protein, 569 aa, Arabidopsis thaliana
  peptide (1)..(569): Ceres Seq. ID no. 12731691
  misc_feature (1)..(569): Homolog of NCBI NO: 30694632 NR Description: expressed protein [Arabidopsis thaliana]
  misc_feature (1)..(567): Homolog of NCBI NO: 38345516 NR Description: OSJNBa0039K24.19 [Oryza sativa (japonica
  misc_feature (1)..(341): Homolog of NCBI NO: 18402761 NR Description: expressed protein; protein id: At1g49730.1,
  misc_feature (1)..(118): Homolog of NCBI NO: 5777621 NR Description: CAA30379.1 protein [Oryza sativa]
  misc_feature (178)..(301): Homolog of NCBI NO: 5777621 NR Description: CAA30379.1 protein [Oryza sativa]
  misc_feature (472)..(556): Homolog of NCBI NO: 5777621 NR Description: CAA30379.1 protein [Oryza sativa]
  misc_feature (355)..(430): Homolog of NCBI NO: 5777621 NR Description: CAA30379.1 protein [Oryza sativa]
  misc_feature (150)..(500): Homolog of NCBI NO: 15222211 NR Description: leucine-rich repeat transmembrane protein kinase,
  misc_feature (161)..(500): Homolog of NCBI NO: 11346408 NR Description: hypothetical protein T20L15.220 - Arabidopsis >gi|7329668|emb|CAB82765.1| putative protein [Arabidopsis
  misc_feature (112)..(550): Homolog of NCBI NO: 15218207 NR Description: protein kinase, putative; protein id: At1g52290.1
MELYGIPRNATIFCGLGTKILVNYDCEGLTTVPPMLHSTSFGDVSRNCKLPLPPGDQCRNCLNSSISYLRSLVGADNSIKLSTCRDATYAVLASRVDNSSALELASCFFNVPELSPTPGSSPSSLSPEASPPVLADSPSSDNLVLSPLKSHHPYHLTMVPTIGIAVTVFALVMVVVLIVLIQRKKRELDDSKSIACNLTRTSPSPRPRSMIHEGNSFGFRKFSYKEIRKATEDFNAVIGRGGFGTVYKAEFSNGLVAAVKKMNKSSEQAEDEFCREIELLARLHHRHLVALKGFCNKKNERFLVYEYMENGSLKDHLHSTEKSPLSWESRMKIAIDVANALEYLHFYCDPPLCHRDIKSSNILLDEHFVAKLADFGLAHASRDGSICFEPVNTDIRGTPGYVDPEYVVTHELTEKSDVYSYGVVLLEIITGKRAVDEGRNLVELSQPLLVSESRRIDLVDPRIKDCIDGEQLETVVAVVRWCTEKEGVARPSIKQVLRLLYESCDPLHLGLAMAVEENKGRSLRGDSGFQSGDIRGLASSSSTTSRSHCSRSFLLETGSPHSPPNGLSF

SEQ ID NO: 96069 - DNA, 2115 bp, Arabidopsis thaliana
  misc_feature (1)..(2115): Ceres Seq. ID no. 12731695
  misc_feature: MA Experiment ID: 20000184 Result: Down-regulated in Transcription
  misc_feature: MA Experiment 20000184 PARAMETER Experiment Name: At_Shoots__P Parameter: Age (day) Value: 7
  misc_feature: MA Experiment 20000184 PARAMETER Experiment Name: At_Shoots__P Parameter: Tissue Value: Shoots vs. Whole Plant
  misc_feature: MA Experiment ID: 20000438 Result: Down-regulated in Transcription
  misc_feature: MA Experiment 20000438 PARAMETER Experiment Name: At_Shoots__P Parameter: Age (day) Value: 14
  misc_feature: MA Experiment 20000438 PARAMETER Experiment Name: At_Shoots__P Parameter: Tissue Value: Shoots vs. Whole Plant
  misc_feature: MA Experiment ID: 20000439 Result: Up-regulated in Transcription
  misc_feature: MA Experiment 20000439 PARAMETER Experiment Name: At_Roots__P Parameter: Age (day) Value: 14 vs. 21
  misc_feature: MA Experiment 20000439 PARAMETER Experiment Name: At_Roots__P Parameter: Organism Value: A. thaliana
  misc_feature: MA Experiment 20000439 PARAMETER Experiment Name: At_Roots__P Parameter: Tissue Value: Roots vs. Whole Plant
  misc_feature: MA Experiment ID: 20000452 Result: Up-regulated in Transcription
  misc_feature: MA Experiment 20000452 PARAMETER Experiment Name: At_CS6879_Shoots-Roots_P Parameter: Age (day) Value: 14
  misc_feature: MA Experiment 20000452 PARAMETER Experiment Name: At_CS6879_Shoots-Roots_P Parameter: Organism Value: A. thaliana
  misc_feature: MA Experiment 20000452 PARAMETER Experiment Name: At_CS6879_Shoots-Roots_P Parameter: Plant Line Value: CS6879 vs. WS
  misc_feature: MA Experiment 20000452 PARAMETER Experiment Name: At_CS6879_Shoots-Roots_P Parameter: Tissue Value: Shoots
  misc_feature: MA Experiment ID: 20001248 Result: Down-regulated in Transcription
  misc_feature: MA Experiment 20001248 PARAMETER Experiment Name: At_Far-red-induction_P Parameter: Age (day) Value: 7
  misc_feature: MA Experiment 20001248 PARAMETER Experiment Name: At_Far-red-induction_P Parameter: Light Value: Far-red vs. White
  misc_feature: MA Experiment 20001248 PARAMETER Experiment Name: At_Far-red-induction_P Parameter: Organism Value: A. thaliana
  misc_feature: MA Experiment 20001248 PARAMETER Experiment Name: At_Far-red-induction_P Parameter: Plant Line Value: Columbia
  misc_feature: MA Experiment 20001248 PARAMETER Experiment Name: At_Far-red-induction_P Parameter: Timepoint (hr) Value: 4
  misc_feature: MA Experiment 20001248 PARAMETER Experiment Name: At_Far-red-induction_P Parameter: Tissue Value: Whole Plant
  misc_feature: MA Experiment ID: 20001911 Result: Down-regulated in Transcription
  misc_feature: MA Experiment 20001911 PARAMETER Experiment Name: At_Drought_Reproduction_P Parameter: Age (day) Value: 40
  misc_feature: MA Experiment 20001911 PARAMETER Experiment Name: At_Drought_Reproduction_P Parameter: Organism Value: A. thaliana
  misc_feature: MA Experiment 20001911 PARAMETER Experiment Name: At_Drought_Reproduction_P Parameter: Plant Line Value: WS
  misc_feature: MA Experiment 20001911 PARAMETER Experiment Name: At_Drought_Reproduction_P Parameter: Timepoint (day) Value: 10
  misc_feature: MA Experiment 20001911 PARAMETER Experiment Name: At_Drought_Reproduction_P Parameter: Tissue Value: Flowers
  misc_feature: MA Experiment 20001911 PARAMETER Experiment Name: At_Drought_Reproduction_P Parameter: Treatment Value: Drought vs. No Drought
atggaaacaaaccagtggcggtcgaggaaaaagatagaatcagctgcagaaacactccaagtttcttctagaagaggcagaggacaggcacgtatggttcctcctgtaagtggagttagatccgagagagctcgaaaaagtctaagtgagaagctagagactgtagctttaaactctcctaagaaagatgctcgtgtgagtctttatggcgagaaaagtgtagtagatgagattttcctagaagatgaagaaatgggtcatgaaactggtttgaagaatggagagtcgtcgcctttttgtggtgtatcggacaagcttctgcagcgaatcgagcttcttgggagagaccatgaggcaacgagacttgataacaacaagttcaggtcaatcgaatctatgaaaaagagacaagaagaatcggcatgtgatgatctagttgatatgaagacaaagattcaaacgttagctgcggagaacactcagcttaagaagtctcttgtggcgaaagaagagcttgcggtaagtcttcaagagcgtaaatttcaggtggaatcagaattcgaagcgttaatgactagattagattcaacggagaaagaaaacgcattcttgagatatgagtatactgttcttgagaaagatcttcaggtaaaaacagaggaaacagagcatactcgcaggtctatggagctaacgcataagcagcaacttaggaatgtgaacaagattgttgagcttgaagctgaatgccaaaggttaagacttctctttcgaaagaagtttccagagaagtctatatctatgaggaatgaaggtgaagaaaagaagatggagatgagaagacgaaacgctaataagagcgatatgatgatgagagatgaagttcagagcaggaagctgaagtatgatcttttgatggagcagattgggaatgttagggcagagaacaagaatctaatggacataattatgaagaaaaacattgagatcaaagatcttagccgcgggcagaaaccgttagaggcttcgagtttcgatattcaaagcgaaagtagtgtgatgagcccctgtggttccaaggagatgaagttactgatggatgattttaatgagatggagaagttagccattgtgtgtactgagaaagatccaagagtggatgatgagaaggaaggatcttttgattggattcaagttgttttgagcgctataacgaagcaagagaggatatcgaaacgcggtgttaaagaactcttacaagacattaagattgctttaggatgtatggatgaaaatgataatgtagaaagaaagaaaggtgaagaagatcctctctgcatcacatggaaatctaataacgaatcgggtccaatgactaaggatgagatcaagagacatttgggtttgacgaaatcagataaggtggagaagattgaatctgatgaaaagcaagaactgagaaagaagcttgaggaatcagtggagaagatcagaaacttagaagcagagatgaaaacattgagagagaataaggaaaaggtagaggcagagatggaaacggagaaatcgatgaaggaagatcttgatacaaagctgaacataacaagagctaacctcaacgagacacagaagaagttgtcttctcttgaagtagaatttgattacagaaagagctgttgtgaagaactcgaagggacttgcatcgagcttcagcttcagctagaaagtgttgaaacaaagaaaccgacgcagagaaacaaaaacgggtgggatatagcaacagcttctgtgaagttatcagagtgtcaagaaacgattaccagtttacggaagcaactaagagcgttatctacaacagaaacaagcagcaccattaaatttctacacaaaagatcttctctccgggaaaatatagcagaggatgatactaacagagttgctcaagatgatgatggtaaccgttacaacgctttgatcgtgtacgaaccagtgaaggcgagaggtgagaagatggagatggtaccgagaaagaagcaaggattagggttcttgaaaaaactgttgttcaggaggaaaagagtgagcagcaagaaatgtcttgccttgactatgtga

SEQ ID NO: 96070 - protein, 704 aa, Arabidopsis thaliana
  peptide (1)..(704): Ceres Seq. ID no. 12731696
  misc_feature (117)..(623): Pfam Name: Plant protein of unknown function (DUF869) Pfam Description: Plant protein of unknown function (DUF869)
  misc_feature (39)..(552): Homolog of NCBI NO: 15227816 NR Description: unknown protein; protein id: At2g23360.1
  misc_feature (157)..(333): Homolog of NCBI NO: 15223690 NR Description: unknown protein; protein id: At1g19835.1
  misc_feature (468)..(624): Homolog of NCBI NO: 15223690 NR Description: unknown protein; protein id: At1g19835.1
  misc_feature (157)..(333): Homolog of NCBI NO: 25518563 NR Description: hypothetical protein F6F9.12 - Arabidopsis >gi|10086489|gb|AAG12549.1|AC007797_9 Unknown Protein
  misc_feature (468)..(624): Homolog of NCBI NO: 25518563 NR Description: hypothetical protein F6F9.12 - Arabidopsis >gi|10086489|gb|AAG12549.1|AC007797_9 Unknown Protein
  misc_feature (1)..(566): Homolog of NCBI NO: 38345501 NR Description: OSJNBa0010D21.14 [Oryza sativa (japonica
  misc_feature (148)..(620): Homolog of NCBI NO: 15219095 NR Description: myosin-like protein; protein id: At1g21810.1
  misc_feature (148)..(620): Homolog of NCBI NO: 5263333 NR Description: F8K7.24 [Arabidopsis thaliana]
  misc_feature (148)..(620): Homolog of NCBI NO: 25402939 NR Description: protein T26F17.2 [imported] - Arabidopsis >gi|6552748|gb|AAF16547.1|AC013482_21 T26F17.2 [Arabidopsis
  misc_feature (101)..(355): Homolog of NCBI NO: 15221012 NR Description: mysoin-like protein; protein id: At1g47900.1
METNQWRSRKKIESAAETLQVSSRRGRGQARMVPPVSGVRSERARKSLSEKLETVALNSPKKDARVSLYGEKSVVDEIFLEDEEMGHETGLKNGESSPFCGVSDKLLQRIELLGRDHEATRLDNNKFRSIESMKKRQEESACDDLVDMKTKIQTLAAENTQLKKSLVAKEELAVSLQERKFQVESEFEALMTRLDSTEKENAFLRYEYTVLEKDLQVKTEETEHTRRSMELTHKQQLRNVNKIVELEAECQRLRLLFRKKFPEKSISMRNEGEEKKMEMRRRNANKSDMMMRDEVQSRKLKYDLLMEQIGNVRAENKNLMDIIMKKNIEIKDLSRGQKPLEASSFDIQSESSVMSPCGSKEMKLLMDDFNEMEKLAIVCTEKDPRVDDEKEGSFDWIQVVLSAITKQERISKRGVKELLQDIKIALGCMDENDNVERKKGEEDPLCITWKSNNESGPMTKDEIKRHLGLTKSDKVEKIESDEKQELRKKLEESVEKIRNLEAEMKTLRENKEKVEAEMETEKSMKEDLDTKLNITRANLNETQKKLSSLEVEFDYRKSCCEELEGTCIELQLQLESVETKKPTQRNKNGWDIATASVKLSECQETITSLRKQLRALSTTETSSTIKFLHKRSSLRENIAEDDTNRVAQDDDGNRYNALIVYEPVKARGEKMEMVPRKKQGLGFLKKLLFRRKRVSSKKCLALTM

SEQ ID NO: 96071 - protein, 673 aa, Arabidopsis thaliana
  peptide (1)..(673): Ceres Seq. ID no. 12731697
  misc_feature (86)..(592): Pfam Name: Plant protein of unknown function (DUF869) Pfam Description: Plant protein of unknown function (DUF869)
  misc_feature (8)..(521): Homolog of NCBI NO: 15227816 NR Description: unknown protein; protein id: At2g23360.1
  misc_feature (126)..(302): Homolog of NCBI NO: 15223690 NR Description: unknown protein; protein id: At1g19835.1
  misc_feature (437)..(593): Homolog of NCBI NO: 15223690 NR Description: unknown protein; protein id: At1g19835.1
  misc_feature (126)..(302): Homolog of NCBI NO: 25518563 NR Description: hypothetical protein F6F9.12 - Arabidopsis >gi|10086489|gb|AAG12549.1|AC007797_9 Unknown Protein
  misc_feature (437)..(593): Homolog of NCBI NO: 25518563 NR Description: hypothetical protein F6F9.12 - Arabidopsis >gi|10086489|gb|AAG12549.1|AC007797_9 Unknown Protein
  misc_feature (1)..(535): Homolog of NCBI NO: 38345501 NR Description: OSJNBa0010D21.14 [Oryza sativa (japonica
  misc_feature (117)..(589): Homolog of NCBI NO: 15219095 NR Description: myosin-like protein; protein id: At1g21810.1
  misc_feature (117)..(589): Homolog of NCBI NO: 5263333 NR Description: F8K7.24 [Arabidopsis thaliana]
  misc_feature (117)..(589): Homolog of NCBI NO: 25402939 NR Description: protein T26F17.2 [imported] - Arabidopsis >gi|6552748|gb|AAF16547.1|AC013482_21 T26F17.2 [Arabidopsis
  misc_feature (70)..(324): Homolog of NCBI NO: 15221012 NR Description: mysoin-like protein; protein id: At1g47900.1
MVPPVSGVRSERARKSLSEKLETVALNSPKKDARVSLYGEKSVVDEIFLEDEEMGHETGLKNGESSPFCGVSDKLLQRIELLGRDHEATRLDNNKFRSIESMKKRQEESACDDLVDMKTKIQTLAAENTQLKKSLVAKEELAVSLQERKFQVESEFEALMTRLDSTEKENAFLRYEYTVLEKDLQVKTEETEHTRRSMELTHKQQLRNVNKIVELEAECQRLRLLFRKKFPEKSISMRNEGEEKKMEMRRRNANKSDMMMRDEVQSRKLKYDLLMEQIGNVRAENKNLMDIIMKKNIEIKDLSRGQKPLEASSFDIQSESSVMSPCGSKEMKLLMDDFNEMEKLAIVCTEKDPRVDDEKEGSFDWIQVVLSAITKQERISKRGVKELLQDIKIALGCMDENDNVERKKGEEDPLCITWKSNNESGPMTKDEIKRHLGLTKSDKVEKIESDEKQELRKKLEESVEKIRNLEAEMKTLRENKEKVEAEMETEKSMKEDLDTKLNITRANLNETQKKLSSLEVEFDYRKSCCEELEGTCIELQLQLESVETKKPTQRNKNGWDIATASVKLSECQETITSLRKQLRALSTTETSSTIKFLHKRSSLRENIAEDDTNRVAQDDDGNRYNALIVYEPVKARGEKMEMVPRKKQGLGFLKKLLFRRKRVSSKKCLALTM

SEQ ID NO: 96072 - protein, 620 aa, Arabidopsis thaliana
  peptide (1)..(620): Ceres Seq. ID no. 12731698
  misc_feature (33)..(539): Pfam Name: Plant protein of unknown function (DUF869) Pfam Description: Plant protein of unknown function (DUF869)
  misc_feature (1)..(468): Homolog of NCBI NO: 15227816 NR Description: unknown protein; protein id: At2g23360.1
  misc_feature (73)..(249): Homolog of NCBI NO: 15223690 NR Description: unknown protein; protein id: At1g19835.1
  misc_feature (384)..(540): Homolog of NCBI NO: 15223690 NR Description: unknown protein; protein id: At1g19835.1
  misc_feature (73)..(249): Homolog of NCBI NO: 25518563 NR Description: hypothetical protein F6F9.12 - Arabidopsis >gi|10086489|gb|AAG12549.1|AC007797_9 Unknown Protein
  misc_feature (384)..(540): Homolog of NCBI NO: 25518563 NR Description: hypothetical protein F6F9.12 - Arabidopsis >gi|10086489|gb|AAG12549.1|AC007797_9 Unknown Protein
  misc_feature (1)..(482): Homolog of NCBI NO: 38345501 NR Description: OSJNBa0010D21.14 [Oryza sativa (japonica
  misc_feature (64)..(536): Homolog of NCBI NO: 15219095 NR Description: myosin-like protein; protein id: At1g21810.1
  misc_feature (64)..(536): Homolog of NCBI NO: 5263333 NR Description: F8K7.24 [Arabidopsis thaliana]
  misc_feature (64)..(536): Homolog of NCBI NO: 25402939 NR Description: protein T26F17.2 [imported] - Arabidopsis >gi|6552748|gb|AAF16547.1|AC013482_21 T26F17.2 [Arabidopsis
  misc_feature (17)..(271): Homolog of NCBI NO: 15221012 NR Description: mysoin-like protein; protein id: At1g47900.1
MGHETGLKNGESSPFCGVSDKLLQRIELLGRDHEATRLDNNKFRSIESMKKRQEESACDDLVDMKTKIQTLAAENTQLKKSLVAKEELAVSLQERKFQVESEFEALMTRLDSTEKENAFLRYEYTVLEKDLQVKTEETEHTRRSMELTHKQQLRNVNKIVELEAECQRLRLLFRKKFPEKSISMRNEGEEKKMEMRRRNANKSDMMMRDEVQSRKLKYDLLMEQIGNVRAENKNLMDIIMKKNIEIKDLSRGQKPLEASSFDIQSESSVMSPCGSKEMKLLMDDFNEMEKLAIVCTEKDPRVDDEKEGSFDWIQVVLSAITKQERISKRGVKELLQDIKIALGCMDENDNVERKKGEEDPLCITWKSNNESGPMTKDEIKRHLGLTKSDKVEKIESDEKQELRKKLEESVEKIRNLEAEMKTLRENKEKVEAEMETEKSMKEDLDTKLNITRANLNETQKKLSSLEVEFDYRKSCCEELEGTCIELQLQLESVETKKPTQRNKNGWDIATASVKLSECQETITSLRKQLRALSTTETSSTIKFLHKRSSLRENIAEDDTNRVAQDDDGNRYNALIVYEPVKARGEKMEMVPRKKQGLGFLKKLLFRRKRVSSKKCLALTM

SEQ ID NO: 96073 - DNA, 1576 bp, Arabidopsis thaliana
  misc_feature (1)..(1576): Ceres Seq. ID no. 12731699
  misc_feature: MA Experiment ID: 108433 Result: Up-regulated in Transcription
  misc_feature: MA Experiment 108433 PARAMETER Experiment Name: At_rhl_Mutant2_cDNA_P Parameter: Age (day) Value: 7
  misc_feature: MA Experiment 108433 PARAMETER Experiment Name: At_rhl_Mutant2_cDNA_P Parameter: Organism Value: A. thaliana
  misc_feature: MA Experiment 108433 PARAMETER Experiment Name: At_rhl_Mutant2_cDNA_P Parameter: Plant Line Value: rhl Mutant vs. wt landsburg
  misc_feature: MA Experiment 108433 PARAMETER Experiment Name: At_rhl_Mutant2_cDNA_P Parameter: Tissue Value: Roots
  misc_feature: MA Experiment ID: 108461 Result: Up-regulated in Transcription
  misc_feature: MA Experiment 108461 PARAMETER Experiment Name: At_Germinating_Seeds_cDNA_P Parameter: Age (day) Value: 1 vs. 0
  misc_feature: MA Experiment 108461 PARAMETER Experiment Name: At_Germinating_Seeds_cDNA_P Parameter: Tissue Value: Germinating Seeds
  misc_feature: MA Experiment ID: 108462 Result: Up-regulated in Transcription
  misc_feature: MA Experiment 108462 PARAMETER Experiment Name: At_Germinating_Seeds_cDNA_P Parameter: Age (day) Value: 2 vs. 0
  misc_feature: MA Experiment 108462 PARAMETER Experiment Name: At_Germinating_Seeds_cDNA_P Parameter: Tissue Value: Germinating Seeds
  misc_feature: MA Experiment ID: 108463 Result: Up-regulated in Transcription
  misc_feature: MA Experiment 108463 PARAMETER Experiment Name: At_Germinating_Seeds_cDNA_P Parameter: Age (day) Value: 3 vs. 0
  misc_feature: MA Experiment 108463 PARAMETER Experiment Name: At_Germinating_Seeds_cDNA_P Parameter: Tissue Value: Germinating Seeds
  misc_feature: MA Experiment ID: 108464 Result: Up-regulated in Transcription
  misc_feature: MA Experiment 108464 PARAMETER Experiment Name: At_Germinating_Seeds_cDNA_P Parameter: Age (day) Value: 4 vs. 0
  misc_feature: MA Experiment 108464 PARAMETER Experiment Name: At_Germinating_Seeds_cDNA_P Parameter: Tissue Value: Germinating Seeds
  misc_feature: MA Experiment ID: 108474 Result: Down-regulated in Transcription
  misc_feature: MA Experiment 108474 PARAMETER Experiment Name: At_Drought_Flowers_cDNA_P Parameter: Timepoint (hr) Value: null
  misc_feature: MA Experiment 108474 PARAMETER Experiment Name: At_Drought_Flowers_cDNA_P Parameter: Treatment Value: Drought vs. No Drought
  misc_feature: MA Experiment ID: 108579 Result: Down-regulated in Transcription
  misc_feature: MA Experiment 108579 PARAMETER Experiment Name: At_4deg_Cold_cDNA_P Parameter: Temperature (deg C) Value: 4 vs. 22
  misc_feature: MA Experiment 108579 PARAMETER Experiment Name: At_4deg_Cold_cDNA_P Parameter: Timepoint (hr) Value: 6
  misc_feature: MA Experiment 108579 PARAMETER Experiment Name: At_4deg_Cold_cDNA_P Parameter: Tissue Value: Aerial
  misc_feature: MA Experiment ID: 108594 Result: Up-regulated in Transcription
  misc_feature: MA Experiment 108594 PARAMETER Experiment Name: At_Ler-rhl_Root_cDNA_P Parameter: Plant Line Value: null
  misc_feature: MA Experiment ID: 108595 Result: Up-regulated in Transcription
  misc_feature: MA Experiment 108595 PARAMETER Experiment Name: At_Ler-pi_Ovule_cDNA_P Parameter: Plant Line Value: null
  misc_feature: MA Experiment ID: 20000180 Result: Up-regulated in Transcription
  misc_feature: MA Experiment 20000180 PARAMETER Experiment Name: At_Germinating_Seeds_P Parameter: Age (hr) Value: 24 vs. 0
  misc_feature: MA Experiment 20000180 PARAMETER Experiment Name: At_Germinating_Seeds_P Parameter: Tissue Value: Germinating Seeds
  misc_feature: MA Experiment ID: 20000182 Result: Up-regulated in Transcription
  misc_feature: MA Experiment 20000182 PARAMETER Experiment Name: At_2mM_SA_P Parameter: Age (day) Value: 14
  misc_feature: MA Experiment 20000182 PARAMETER Experiment Name: At_2mM_SA_P Parameter: Organism Value: A. thaliana
  misc_feature: MA Experiment 20000182 PARAMETER Experiment Name: At_2mM_SA_P Parameter: Plant Line Value: WS
  misc_feature: MA Experiment 20000182 PARAMETER Experiment Name: At_2mM_SA_P Parameter: Timepoint (hr) Value: 6
  misc_feature: MA Experiment 20000182 PARAMETER Experiment Name: At_2mM_SA_P Parameter: Tissue Value: Aerial
  misc_feature: MA Experiment 20000182 PARAMETER Experiment Name: At_2mM_SA_P Parameter: Treatment Value: 2mM SA vs. No Treatment
  misc_feature: MA Experiment ID: 20000185 Result: Up-regulated in Transcription
  misc_feature: MA Experiment 20000185 PARAMETER Experiment Name: At_Roots__P Parameter: Age (day) Value: 7 vs. 21
  misc_feature: MA Experiment 20000185 PARAMETER Experiment Name: At_Roots__P Parameter: Organism Value: A. thaliana
  misc_feature: MA Experiment 20000185 PARAMETER Experiment Name: At_Roots__P Parameter: Tissue Value: Roots vs. Whole Plant
  misc_feature: MA Experiment ID: 20000224 Result: Down-regulated in Transcription
  misc_feature: MA Experiment ID: 20000227 Result: Up-regulated in Transcription
  misc_feature: MA Experiment 20000227 PARAMETER Experiment Name: At_Root-Tips-vs-Tops_P Parameter: Tissue Value: Root Tips vs. Root Tops
  misc_feature: MA Experiment ID: 20000234 Result: Down-regulated in Transcription
  misc_feature: MA Experiment 20000234 PARAMETER Experiment Name: At_Siliques_P Parameter: Age (day) Value: 21
  misc_feature: MA Experiment 20000234 PARAMETER Experiment Name: At_Siliques_P Parameter: Organism Value: A. thaliana
  misc_feature: MA Experiment 20000234 PARAMETER Experiment Name: At_Siliques_P Parameter: Plant Line Value: WS
  misc_feature: MA Experiment 20000234 PARAMETER Experiment Name: At_Siliques_P Parameter: Tissue Value: Less Than 5mm Siliques vs. Whole Plant
  misc_feature: MA Experiment ID: 20000235 Result: Down-regulated in Transcription
  misc_feature: MA Experiment 20000235 PARAMETER Experiment Name: At_Siliques_P Parameter: Age (day) Value: 21
  misc_feature: MA Experiment 20000235 PARAMETER Experiment Name: At_Siliques_P Parameter: Organism Value: A. thaliana
  misc_feature: MA Experiment 20000235 PARAMETER Experiment Name: At_Siliques_P Parameter: Plant Line Value: WS
  misc_feature: MA Experiment 20000235 PARAMETER Experiment Name: At_Siliques_P Parameter: Tissue Value: 5-10mm Siliques vs. Whole Plant
  misc_feature: MA Experiment ID: 20000265 Result: Up-regulated in Transcription
  misc_feature: MA Experiment 20000265 PARAMETER Experiment Name: At_Open_Flower_P Parameter: Age (day) Value: 21
  misc_feature: MA Experiment 20000265 PARAMETER Experiment Name: At_Open_Flower_P Parameter: Plant Line Value: WS
  misc_feature: MA Experiment 20000265 PARAMETER Experiment Name: At_Open_Flower_P Parameter: Tissue Value: Closed Flower vs. Whole Plant
  misc_feature: MA Experiment ID: 20000286 Result: Up-regulated in Transcription
  misc_feature: MA Experiment 20000286 PARAMETER Experiment Name: At_Open_Flower_P Parameter: Age (day) Value: 21
  misc_feature: MA Experiment 20000286 PARAMETER Experiment Name: At_Open_Flower_P Parameter: Plant Line Value: WS
  misc_feature: MA Experiment 20000286 PARAMETER Experiment Name: At_Open_Flower_P Parameter: Tissue Value: Half Open vs. Whole Plant
  misc_feature: MA Experiment ID: 20000438 Result: Down-regulated in Transcription
  misc_feature: MA Experiment 20000438 PARAMETER Experiment Name: At_Shoots__P Parameter: Age (day) Value: 14
  misc_feature: MA Experiment 20000438 PARAMETER Experiment Name: At_Shoots__P Parameter: Tissue Value: Shoots vs. Whole Plant
  misc_feature: MA Experiment ID: 20000439 Result: Up-regulated in Transcription
  misc_feature: MA Experiment 20000439 PARAMETER Experiment Name: At_Roots__P Parameter: Age (day) Value: 14 vs. 21
  misc_feature: MA Experiment 20000439 PARAMETER Experiment Name: At_Roots__P Parameter: Organism Value: A. thaliana
  misc_feature: MA Experiment 20000439 PARAMETER Experiment Name: At_Roots__P Parameter: Tissue Value: Roots vs. Whole Plant
  misc_feature: MA Experiment ID: 20001247 Result: Up-regulated in Transcription
  misc_feature: MA Experiment 20001247 PARAMETER Experiment Name: At_Far-red-induction_P Parameter: Age (day) Value: 7
  misc_feature: MA Experiment 20001247 PARAMETER Experiment Name: At_Far-red-induction_P Parameter: Light Value: Far-red vs. White
  misc_feature: MA Experiment 20001247 PARAMETER Experiment Name: At_Far-red-induction_P Parameter: Organism Value: A. thaliana
  misc_feature: MA Experiment 20001247 PARAMETER Experiment Name: At_Far-red-induction_P Parameter: Plant Line Value: Columbia
  misc_feature: MA Experiment 20001247 PARAMETER Experiment Name: At_Far-red-induction_P Parameter: Timepoint (hr) Value: 1
  misc_feature: MA Experiment 20001247 PARAMETER Experiment Name: At_Far-red-induction_P Parameter: Tissue Value: Whole Plant
  misc_feature: MA Experiment ID: 20001248 Result: Up-regulated in Transcription
  misc_feature: MA Experiment 20001248 PARAMETER Experiment Name: At_Far-red-induction_P Parameter: Age (day) Value: 7
  misc_feature: MA Experiment 20001248 PARAMETER Experiment Name: At_Far-red-induction_P Parameter: Light Value: Far-red vs. White
  misc_feature: MA Experiment 20001248 PARAMETER Experiment Name: At_Far-red-induction_P Parameter: Organism Value: A. thaliana
  misc_feature: MA Experiment 20001248 PARAMETER Experiment Name: At_Far-red-induction_P Parameter: Plant Line Value: Columbia
  misc_feature: MA Experiment 20001248 PARAMETER Experiment Name: At_Far-red-induction_P Parameter: Timepoint (hr) Value: 4
  misc_feature: MA Experiment 20001248 PARAMETER Experiment Name: At_Far-red-induction_P Parameter: Tissue Value: Whole Plant
  misc_feature: MA Experiment ID: 20001450 Result: Up-regulated in Transcription
  misc_feature: MA Experiment 20001450 PARAMETER Experiment Name: At_Far-red-induction_P Parameter: Age (day) Value: 7
  misc_feature: MA Experiment 20001450 PARAMETER Experiment Name: At_Far-red-induction_P Parameter: Light Value: Far-red vs. White
  misc_feature: MA Experiment 20001450 PARAMETER Experiment Name: At_Far-red-induction_P Parameter: Organism Value: A. thaliana
  misc_feature: MA Experiment 20001450 PARAMETER Experiment Name: At_Far-red-induction_P Parameter: Plant Line Value: Columbia
  misc_feature: MA Experiment 20001450 PARAMETER Experiment Name: At_Far-red-induction_P Parameter: Timepoint (hr) Value: 8
  misc_feature: MA Experiment 20001450 PARAMETER Experiment Name: At_Far-red-induction_P Parameter: Tissue Value: Whole Plant
  misc_feature: MA Experiment ID: 20001451 Result: Up-regulated in Transcription
  misc_feature: MA Experiment 20001451 PARAMETER Experiment Name: At_Far-red-induction_P Parameter: Age (day) Value: 7
  misc_feature: MA Experiment 20001451 PARAMETER Experiment Name: At_Far-red-induction_P Parameter: Light Value: Far-red vs. White
  misc_feature: MA Experiment 20001451 PARAMETER Experiment Name: At_Far-red-induction_P Parameter: Organism Value: A. thaliana
  misc_feature: MA Experiment 20001451 PARAMETER Experiment Name: At_Far-red-induction_P Parameter: Plant Line Value: Columbia
  misc_feature: MA Experiment 20001451 PARAMETER Experiment Name: At_Far-red-induction_P Parameter: Timepoint (hr) Value: 24
  misc_feature: MA Experiment 20001451 PARAMETER Experiment Name: At_Far-red-induction_P Parameter: Tissue Value: Whole Plant
  misc_feature: MA Experiment ID: 20001555 Result: Up-regulated in Transcription
  misc_feature: MA Experiment 20001555 PARAMETER Experiment Name: At_Drought_Soil_Dry_P Parameter: Age (day) Value: 24
  misc_feature: MA Experiment 20001555 PARAMETER Experiment Name: At_Drought_Soil_Dry_P Parameter: Organism Value: A. thaliana
  misc_feature: MA Experiment 20001555 PARAMETER Experiment Name: At_Drought_Soil_Dry_P Parameter: Plant Line Value: WS
  misc_feature: MA Experiment 20001555 PARAMETER Experiment Name: At_Drought_Soil_Dry_P Parameter: Post Timepoint (hr) Value: None
  misc_feature: MA Experiment 20001555 PARAMETER Experiment Name: At_Drought_Soil_Dry_P Parameter: Post-Treatment Value: None
  misc_feature: MA Experiment 20001555 PARAMETER Experiment Name: At_Drought_Soil_Dry_P Parameter: Timepoint (day) Value: 10
  misc_feature: MA Experiment 20001555 PARAMETER Experiment Name: At_Drought_Soil_Dry_P Parameter: Treatment Value: Drought vs. No Drought
  misc_feature: MA Experiment ID: 20001556 Result: Up-regulated in Transcription
  misc_feature: MA Experiment 20001556 PARAMETER Experiment Name: At_Drought_Soil_Dry_P Parameter: Age (day) Value: 26
  misc_feature: MA Experiment 20001556 PARAMETER Experiment Name: At_Drought_Soil_Dry_P Parameter: Organism Value: A. thaliana
  misc_feature: MA Experiment 20001556 PARAMETER Experiment Name: At_Drought_Soil_Dry_P Parameter: Plant Line Value: WS
  misc_feature: MA Experiment 20001556 PARAMETER Experiment Name: At_Drought_Soil_Dry_P Parameter: Post Timepoint (hr) Value: None
  misc_feature: MA Experiment 20001556 PARAMETER Experiment Name: At_Drought_Soil_Dry_P Parameter: Post-Treatment Value: None
  misc_feature: MA Experiment 20001556 PARAMETER Experiment Name: At_Drought_Soil_Dry_P Parameter: Timepoint (day) Value: 12
  misc_feature: MA Experiment 20001556 PARAMETER Experiment Name: At_Drought_Soil_Dry_P Parameter: Treatment Value: Drought vs. No Drought
  misc_feature: MA Experiment ID: 20001557 Result: Up-regulated in Transcription
  misc_feature: MA Experiment 20001557 PARAMETER Experiment Name: At_Drought_Soil_Dry_P Parameter: Age (day) Value: 27
  misc_feature: MA Experiment 20001557 PARAMETER Experiment Name: At_Drought_Soil_Dry_P Parameter: Organism Value: A. thaliana
  misc_feature: MA Experiment 20001557 PARAMETER Experiment Name: At_Drought_Soil_Dry_P Parameter: Plant Line Value: WS
  misc_feature: MA Experiment 20001557 PARAMETER Experiment Name: At_Drought_Soil_Dry_P Parameter: Post Timepoint (hr) Value: 3
  misc_feature: MA Experiment 20001557 PARAMETER Experiment Name: At_Drought_Soil_Dry_P Parameter: Post-Treatment Value: Re-Water vs. No Drought
  misc_feature: MA Experiment 20001557 PARAMETER Experiment Name: At_Drought_Soil_Dry_P Parameter: Timepoint (day) Value: 13
  misc_feature: MA Experiment 20001557 PARAMETER Experiment Name: At_Drought_Soil_Dry_P Parameter: Treatment Value: Drought vs. No Drought
  misc_feature: MA Experiment ID: 20001904 Result: Up-regulated in Transcription
  misc_feature: MA Experiment 20001904 PARAMETER Experiment Name: At_Drought_Reproduction_P Parameter: Age (day) Value: 37
  misc_feature: MA Experiment 20001904 PARAMETER Experiment Name: At_Drought_Reproduction_P Parameter: Organism Value: A. thaliana
  misc_feature: MA Experiment 20001904 PARAMETER Experiment Name: At_Drought_Reproduction_P Parameter: Plant Line Value: WS
  misc_feature: MA Experiment 20001904 PARAMETER Experiment Name: At_Drought_Reproduction_P Parameter: Timepoint (day) Value: 7
  misc_feature: MA Experiment 20001904 PARAMETER Experiment Name: At_Drought_Reproduction_P Parameter: Tissue Value: Rosettes
  misc_feature: MA Experiment 20001904 PARAMETER Experiment Name: At_Drought_Reproduction_P Parameter: Treatment Value: Drought vs. No Drought
  misc_feature: MA Experiment ID: 20001905 Result: Up-regulated in Transcription
  misc_feature: MA Experiment 20001905 PARAMETER Experiment Name: At_Drought_Reproduction_P Parameter: Age (day) Value: 40
  misc_feature: MA Experiment 20001905 PARAMETER Experiment Name: At_Drought_Reproduction_P Parameter: Organism Value: A. thaliana
  misc_feature: MA Experiment 20001905 PARAMETER Experiment Name: At_Drought_Reproduction_P Parameter: Plant Line Value: WS
  misc_feature: MA Experiment 20001905 PARAMETER Experiment Name: At_Drought_Reproduction_P Parameter: Timepoint (day) Value: 10
  misc_feature: MA Experiment 20001905 PARAMETER Experiment Name: At_Drought_Reproduction_P Parameter: Tissue Value: Rosettes
  misc_feature: MA Experiment 20001905 PARAMETER Experiment Name: At_Drought_Reproduction_P Parameter: Treatment Value: Drought vs. No Drought
gtcaaatcgaaaacaaacacaaaaagcaaacaaatatggctacttcaatcaaatctataaccctagctctcttgatattctcagtgttactaatctccttgtctctcggctccgtcacagcgacggagactacacgaaacgaggcggaggcacgacggatgtatgaaaggtggcttgttgagaatcggaagaactataatggtctcggagagaaagagagacgctttgagatcttcaaagacaacttgaagttcgtcgaagagcacagttccatcccgaatcggacttacgaagtcgggttgacccggttcgctgatttgactaacgatgagtttcgtgcgatttacttgaggagcaagatggagagaactagggttccggtgaagggagagaagtatttgtataaggttggagatagcttacctgatgctatcgattggagagctaaaggtgctgttaatccagtcaaagatcaaggatcctgtggaagttgttgggcgttttccgcgattggagcggttgaaggtataaatcagattaagacaggagagttgatatctttgtctgagcaagaacttgttgattgtgacacaagttacaatgatggatgtggtggaggtcttatggattatgcttttaagttcattattgaaaacggtggtattgatacagaggaagattatccttatattgcaactgatgttaacgtgtgcaattctgataagaagaacactcgtgttgttaccatcgatggttatgaggatgttcctcaaaacgatgagaagtctttgaagaaggctcttgctaatcaacctattagtgttgccattgaagctggtggcagagctttccagctttacacatctggtgtgtttacaggaacatgtggaacatctttggaccatggtgttgtagctgtgggatacggatcagaaggtggtcaagactactggattgttcgtaactcatggggatcaaactggggagaaagcggatactttaagctcgaacgtaacatcaaagagtcatcagggaaatgcggtgtggcgatgatggcttcttaccctaccaaatcatcaggctcaaacccaccaaaaccgccagcgccttcaccggttgtttgtgacaagtctaacacttgtccagctaagtccacttgttgttgcctatatgagtacaatggtaaatgctatagctggggatgttgtccgtatgagtcagccacttgttgcgatgatggttctagctgctgcccccagtcataccctgtctgcgatttaaaggccaatacttgtagaatgaagggaaacagtccgttaagcataaaagctttgacacgaggaccagcgattgcgaccacaaagtctacaaacatgctagtgggcagcgcttgaggagagataatacaaacgaagaaccgatttgttttcagcccacgttatcaagattcagtcttttgtctttagacacttccaagttggatcatagtttgattactcttgtcaaatttaatgttatcttggatttgattttacttgatgtaaatgtttaagaagtaatctgatatttgcttcca

SEQ ID NO: 96074 - protein, 463 aa, Arabidopsis thaliana; identical to SEQ ID NO: 36210
  peptide (1)..(463): Ceres Seq. ID no. 12731700
  misc_feature (140)..(356): Pfam Name: Papain family cysteine protease Pfam Description: Papain family cysteine protease
  misc_feature (12)..(463): Homolog of NCBI NO: 18402225 NR Description: cysteine proteinase; protein id: At3g19390.1, by cDNA: gi_17065297, supported by cDNA: gi_20260003 [Arabidopsis >gi|11994461|dbj|BAB02463.1| cysteine proteinase [Arabidopsis
  misc_feature (17)..(463): Homolog of NCBI NO: 18141281 NR Description: senescence-associated cysteine protease [Brassica
  misc_feature (30)..(450): Homolog of NCBI NO: 18422289 NR Description: cysteine proteinase RD21A; protein id:
  misc_feature (38)..(449): Homolog of NCBI NO: 18141283 NR Description: senescence-associated cysteine protease [Brassica
  misc_feature (20)..(449): Homolog of NCBI NO: 14517542 NR Description: F2G19.31/F2G19.31 [Arabidopsis thaliana]
  misc_feature (20)..(449): Homolog of NCBI NO: 18401614 NR Description: cysteine proteinase RD21A; protein id: supported by cDNA: gi_14517541, supported by cDNA: gi_18175925, by cDNA: gi_19548038 [Arabidopsis thaliana]
  misc_feature (35)..(457): Homolog of NCBI NO: 30141019 NR Description: cysteine protease-1 [Helianthus annuus]
  misc_feature (12)..(446): Homolog of NCBI NO: 5777889 NR Description: cysteine protease [Solanum tuberosum]
  misc_feature (55)..(452): Homolog of NCBI NO: 1361974 NR Description: cysteine proteinase (EC 3.4.22.-) - clove pink
  misc_feature (8)..(431): Homolog of NCBI NO: 18141285 NR Description: senescence-associated cysteine protease [Brassica

SEQ ID NO: 96075 - protein, 452 aa, Arabidopsis thaliana; identical to SEQ ID NO: 36211
  peptide (1)..(452): Ceres Seq. ID no. 12731701
  misc_feature (129)..(345): Pfam Name: Papain family cysteine protease Pfam Description: Papain family cysteine protease
  misc_feature (1)..(452): Homolog of NCBI NO: 18402225 NR Description: cysteine proteinase; protein id: At3g19390.1, by cDNA: gi_17065297, supported by cDNA: gi_20260003 [Arabidopsis >gi|11994461|dbj|BAB02463.1| cysteine proteinase [Arabidopsis
  misc_feature (6)..(452): Homolog of NCBI NO: 18141281 NR Description: senescence-associated cysteine protease [Brassica
  misc_feature (19)..(439): Homolog of NCBI NO: 18422289 NR Description: cysteine proteinase RD21A; protein id:
  misc_feature (27)..(438): Homolog of NCBI NO: 18141283 NR Description: senescence-associated cysteine protease [Brassica
  misc_feature (9)..(438): Homolog of NCBI NO: 14517542 NR Description: F2G19.31/F2G19.31 [Arabidopsis thaliana]
  misc_feature (9)..(438): Homolog of NCBI NO: 18401614 NR Description: cysteine proteinase RD21A; protein id: supported by cDNA: gi_14517541, supported by cDNA: gi_18175925, by cDNA: gi_19548038 [Arabidopsis thaliana]
  misc_feature (24)..(446): Homolog of NCBI NO: 30141019 NR Description: cysteine protease-1 [Helianthus annuus]
  misc_feature (1)..(435): Homolog of NCBI NO: 5777889 NR Description: cysteine protease [Solanum tuberosum]
  misc_feature (44)..(441): Homolog of NCBI NO: 1361974 NR Description: cysteine proteinase (EC 3.4.22.-) - clove pink
  misc_feature (1)..(420): Homolog of NCBI NO: 18141285 NR Description: senescence-associated cysteine protease [Brassica

SEQ ID NO: 96076 - protein, 411 aa, Arabidopsis thaliana; identical to SEQ ID NO: 36212
  peptide (1)..(411): Ceres Seq. ID no. 12731702
  misc_feature (88)..(304): Pfam Name: Papain family cysteine protease Pfam Description: Papain family cysteine protease
  misc_feature (1)..(411): Homolog of NCBI NO: 18402225 NR Description: cysteine proteinase; protein id: At3g19390.1, by cDNA: gi_17065297, supported by cDNA: gi_20260003 [Arabidopsis >gi|11994461|dbj|BAB02463.1| cysteine proteinase [Arabidopsis
  misc_feature (1)..(411): Homolog of NCBI NO: 18141281 NR Description: senescence-associated cysteine protease [Brassica
  misc_feature (1)..(398): Homolog of NCBI NO: 18422289 NR Description: cysteine proteinase RD21A; protein id:
  misc_feature (1)..(397): Homolog of NCBI NO: 18141283 NR Description: senescence-associated cysteine protease [Brassica
  misc_feature (1)..(397): Homolog of NCBI NO: 14517542 NR Description: F2G19.31/F2G19.31 [Arabidopsis thaliana]
  misc_feature (1)..(397): Homolog of NCBI NO: 18401614 NR Description: cysteine proteinase RD21A; protein id: supported by cDNA: gi_14517541, supported by cDNA: gi_18175925, by cDNA: gi_19548038 [Arabidopsis thaliana]
  misc_feature (1)..(405): Homolog of NCBI NO: 30141019 NR Description: cysteine protease-1 [Helianthus annuus]
  misc_feature (1)..(394): Homolog of NCBI NO: 5777889 NR Description: cysteine protease [Solanum tuberosum]
  misc_feature (3)..(400): Homolog of NCBI NO: 1361974 NR Description: cysteine proteinase (EC 3.4.22.-) - clove pink
  misc_feature (1)..(379): Homolog of NCBI NO: 18141285 NR Description: senescence-associated cysteine protease [Brassica

SEQ ID NO: 96077 - DNA, 1653 bp, Arabidopsis thaliana
  misc_feature (1)..(1653): Ceres Seq. ID no. 12731711
  misc_feature: MA Experiment ID: 20000227 Result: Up-regulated in Transcription
  misc_feature: MA Experiment 20000227 PARAMETER Experiment Name: At_Root-Tips-vs-Tops_P Parameter: Tissue Value: Root Tips vs. Root Tops
  misc_feature: MA Experiment ID: 20000436 Result: Down-regulated in Transcription
  misc_feature: MA Experiment 20000436 PARAMETER Experiment Name: At_Drought_P Parameter: Age (day) Value: 7
  misc_feature: MA Experiment 20000436 PARAMETER Experiment Name: At_Drought_P Parameter: Organism Value: A. thaliana
  misc_feature: MA Experiment 20000436 PARAMETER Experiment Name: At_Drought_P Parameter: Plant Line Value: WS
  misc_feature: MA Experiment 20000436 PARAMETER Experiment Name: At_Drought_P Parameter: Timepoint (hr) Value: 12
  misc_feature: MA Experiment 20000436 PARAMETER Experiment Name: At_Drought_P Parameter: Tissue Value: Whole Plant
  misc_feature: MA Experiment 20000436 PARAMETER Experiment Name: At_Drought_P Parameter: Treatment Value: Drought vs. No Drought
  misc_feature: MA Experiment ID: 20000437 Result: Down-regulated in Transcription
  misc_feature: MA Experiment 20000437 PARAMETER Experiment Name: At_Drought_P Parameter: Age (day) Value: 8
  misc_feature: MA Experiment 20000437 PARAMETER Experiment Name: At_Drought_P Parameter: Organism Value: A. thaliana
  misc_feature: MA Experiment 20000437 PARAMETER Experiment Name: At_Drought_P Parameter: Plant Line Value: WS
  misc_feature: MA Experiment 20000437 PARAMETER Experiment Name: At_Drought_P Parameter: Timepoint (hr) Value: 24
  misc_feature: MA Experiment 20000437 PARAMETER Experiment Name: At_Drought_P Parameter: Tissue Value: Whole Plant
  misc_feature: MA Experiment 20000437 PARAMETER Experiment Name: At_Drought_P Parameter: Treatment Value: Drought vs. No Drought
  misc_feature: MA Experiment ID: 20000451 Result: Down-regulated in Transcription
  misc_feature: MA Experiment 20000451 PARAMETER Experiment Name: At_CS6879_Shoots-Roots_P Parameter: Age (day) Value: 14
  misc_feature: MA Experiment 20000451 PARAMETER Experiment Name: At_CS6879_Shoots-Roots_P Parameter: Organism Value: A. thaliana
  misc_feature: MA Experiment 20000451 PARAMETER Experiment Name: At_CS6879_Shoots-Roots_P Parameter: Plant Line Value: CS6879 vs. WS
  misc_feature: MA Experiment 20000451 PARAMETER Experiment Name: At_CS6879_Shoots-Roots_P Parameter: Tissue Value: Roots
atggccgatacacccccgggcatagccaagaacccaagccacgcaacatgtaagatcaagaagtacaaacattgttacaacttggaacatgtttgtcccaagttttgccctgactcttgccatgtcgaatgtgcttcttgcaaacccatatgtggtcctccttcccctggcgacgatggtggcggcgatgacagtggtggtgatgacggtggatacactcctcctgctcctgttccaccagtttcaccaccacctcctacaccttccgtgccaagccctactccaccagtttcaccaccgcctccaactcctacaccatctgtgccaagtcccactccaccagtttcaccaccacctccaactcctacaccgtctgtgccaagtcccactccaccagtttcaccaccacctccgactcctacaccttccgtgccaagtcccaccccaccagtttcaccaccacctccgactcctacaccttctgtgccaagtcccactccaccagttcctactgatcctatgccaagtccccctccgccagtttcaccaccgcctccaactcctacaccatctgtgccaagtcctcctgatgttactcccactcctcctacgccatctgtgccaagtcctcctgatgttactcccactcctcctacgccatccgtgccaagtcctcctgatgttactcccactcctcctacgccaccttccgtcccaactccttccggctctcccccttacgttcccccgccatcagacgaagaggaagcagcaggtgccaaaagggtcaggtgtaagaagcagcgctctccatgttacggagttgaatacacttgccccgccgattgtccccgttcttgtcaagtggattgcgtcacttgcaagcctgtttgcaattgcgacaagcctggatctgtttgccaagacccacgtttcatcggaggagatggtctaaccttttacttccacggcaagaaagactccaacttctgccttatctctgatcctaaccttcacatcaacgctcatttcatcggtaaacgtagagctggtatggcacgtgacttcacatgggtccaatccattgccatactcttcggcactcaccgtttatacgtcggagccctaaagactgccacgtgggatgattccgttgaccggattgccgtctctttcgacggaaatgttatctcacttcctcagctagacggtgccaggtggacttcttcccctggtgtataccctgaggtctcggtcaagcgagttgaagtagagggtttgcttaagatcacagcaagagtggtgccaataacaatggaagattcaagaatccatggctacgacgtgaaggaagacgactgtctagctcaccttgacctaggcttcaagttccaagaccttagcgataatgtcgatggtgttttgggacagacttataggtctaactacgttagccgagttaagattggagtccacatgcctgtgatgggtggtgacagagaatttcagaccaccggactttttgcacctgactgttcagccgcaaggttcaccggtaacggagacagcaacaatggccggagcaaattggagctccctgagatgagttgtgccagtggcttaggtggcaagggagtggtttgcaagagataa

SEQ ID NO: 96078 - protein, 550 aa, Arabidopsis thaliana; identical to SEQ ID NO: 75616
  peptide (1)..(550): Ceres Seq. ID no. 12731712
  misc_feature (74)..(251): Pfam Name: Formin Homology 2 Domain Pfam Description: Formin Homology 2 Domain
  misc_feature (241)..(550): Homolog of NCBI NO: 4514637 NR Description: root cap protein 2 [Zea mays]
  misc_feature (257)..(550): Homolog of NCBI NO: 7484468 NR Description: late embryonic abundant protein EMB7 - white >gi|1350543|gb|AAB01570.1| late embryogenesis abundant protein
  misc_feature (230)..(550): Homolog of NCBI NO: 21741738 NR Description: OSJNBa0073L04.18 [Oryza sativa (japonica
  misc_feature (241)..(517): Homolog of NCBI NO: 34905936 NR Description: similar to root cap protein [Oryza sativa
  misc_feature (224)..(517): Homolog of NCBI NO: 34905940 NR Description: similar to root cap protein [Oryza sativa
  misc_feature (279)..(517): Homolog of NCBI NO: 34905930 NR Description: similar to root cap protein [Oryza sativa
  misc_feature (241)..(519): Homolog of NCBI NO: 4514635 NR Description: root cap protein 1 [Zea mays]
  misc_feature (274)..(517): Homolog of NCBI NO: 34905934 NR Description: similar to root cap protein [Oryza sativa
  misc_feature (259)..(523): Homolog of NCBI NO: 15239360 NR Description: late embryonic abundant protein - like; protein At5g60530.1, supported by cDNA: gi_15809989 [Arabidopsis >gi|9757755|dbj|BAB08236.1| contains similarity to root cap
  misc_feature (259)..(523): Homolog of NCBI NO: 15809990 NR Description: AT5g60530/muf9_180 [Arabidopsis thaliana]

SEQ ID NO: 96079 - protein, 377 aa, Arabidopsis thaliana; identical to SEQ ID NO: 75617
  peptide (1)..(377): Ceres Seq. ID no. 12731713
  misc_feature (1)..(78): Pfam Name: Formin Homology 2 Domain Pfam Description: Formin Homology 2 Domain
  misc_feature (68)..(377): Homolog of NCBI NO: 4514637 NR Description: root cap protein 2 [Zea mays]
  misc_feature (84)..(377): Homolog of NCBI NO: 7484468 NR Description: late embryonic abundant protein EMB7 - white >gi|1350543|gb|AAB01570.1| late embryogenesis abundant protein
  misc_feature (57)..(377): Homolog of NCBI NO: 21741738 NR Description: OSJNBa0073L04.18 [Oryza sativa (japonica
  misc_feature (68)..(344): Homolog of NCBI NO: 34905936 NR Description: similar to root cap protein [Oryza sativa
  misc_feature (51)..(344): Homolog of NCBI NO: 34905940 NR Description: similar to root cap protein [Oryza sativa
  misc_feature (106)..(344): Homolog of NCBI NO: 34905930 NR Description: similar to root cap protein [Oryza sativa
  misc_feature (68)..(346): Homolog of NCBI NO: 4514635 NR Description: root cap protein 1 [Zea mays]
  misc_feature (101)..(344): Homolog of NCBI NO: 34905934 NR Description: similar to root cap protein [Oryza sativa
  misc_feature (86)..(350): Homolog of NCBI NO: 15239360 NR Description: late embryonic abundant protein - like; protein At5g60530.1, supported by cDNA: gi_15809989 [Arabidopsis >gi|9757755|dbj|BAB08236.1| contains similarity to root cap
  misc_feature (86)..(350): Homolog of NCBI NO: 15809990 NR Description: AT5g60530/muf9_180 [Arabidopsis thaliana]

SEQ ID NO: 96080 - protein, 288 aa, Arabidopsis thaliana
  peptide (1)..(288): Ceres Seq. ID no. 12731714
MFVPSFALTLAMSNVLLANPYVVLLPLATMVAAMTVVVMTVDTLLLLLFHQFHHHLLHLPCQALLHQFHHRLQLLHHLCQVPLHQFHHHLQLLHRLCQVPLHQFHHHLRLLHLPCQVPPHQFHHHLRLLHLLCQVPLHQFLLILCQVPLRQFHHRLQLLHHLCQVLLMLLPLLLRHLCQVLLMLLPLLLRHPCQVLLMLLPLLLRHLPSQLLPALPLTFPRHQTKRKQQVPKGSGVRSSALHVTELNTLAPPIVPVLVKWIASLASLFAIATSLDLFAKTHVSSEEMV

SEQ ID NO: 96081 - DNA, 486 bp, Arabidopsis thaliana
  misc_feature (1)..(486): Ceres Seq. ID no. 12731735
  misc_feature: MA Experiment ID: 20000347 Result: Up-regulated in Transcription
  misc_feature: MA Experiment 20000347 PARAMETER Experiment Name: At_2mM_SA_Sub_P Parameter: Age (day) Value: 14
  misc_feature: MA Experiment 20000347 PARAMETER Experiment Name: At_2mM_SA_Sub_P Parameter: Organism Value: A. thaliana
  misc_feature: MA Experiment 20000347 PARAMETER Experiment Name: At_2mM_SA_Sub_P Parameter: Plant Line Value: WS
  misc_feature: MA Experiment 20000347 PARAMETER Experiment Name: At_2mM_SA_Sub_P Parameter: Timepoint (hr) Value: 6
  misc_feature: MA Experiment 20000347 PARAMETER Experiment Name: At_2mM_SA_Sub_P Parameter: Tissue Value: Aerial
  misc_feature: MA Experiment 20000347 PARAMETER Experiment Name: At_2mM_SA_Sub_P Parameter: Treatment Value: 2mM SA vs. No Treatment
  misc_feature: MA Experiment ID: 20000355 Result: Up-regulated in Transcription
  misc_feature: MA Experiment 20000355 PARAMETER Experiment Name: At_Siliques_Sub_P Parameter: Age (day) Value: 21
  misc_feature: MA Experiment 20000355 PARAMETER Experiment Name: At_Siliques_Sub_P Parameter: Organism Value: A. thaliana
  misc_feature: MA Experiment 20000355 PARAMETER Experiment Name: At_Siliques_Sub_P Parameter: Plant Line Value: WS
  misc_feature: MA Experiment 20000355 PARAMETER Experiment Name: At_Siliques_Sub_P Parameter: Tissue Value: Less Than 5mm Siliques vs. Whole Plant
  misc_feature: MA Experiment ID: 20000634 Result: Down-regulated in Transcription
  misc_feature: MA Experiment 20000634 PARAMETER Experiment Name: At_10percent_PEG_Sub_P Parameter: Age (day) Value: 12
  misc_feature: MA Experiment 20000634 PARAMETER Experiment Name: At_10percent_PEG_Sub_P Parameter: Organism Value: A. thaliana
  misc_feature: MA Experiment 20000634 PARAMETER Experiment Name: At_10percent_PEG_Sub_P Parameter: Plant Line Value: WS
  misc_feature: MA Experiment 20000634 PARAMETER Experiment Name: At_10percent_PEG_Sub_P Parameter: Timepoint (day) Value: 12
  misc_feature: MA Experiment 20000634 PARAMETER Experiment Name: At_10percent_PEG_Sub_P Parameter: Tissue Value: Whole Plant
  misc_feature: MA Experiment 20000634 PARAMETER Experiment Name: At_10percent_PEG_Sub_P Parameter: Treatment Value: 10% PEG vs. No Treatment
atgtctctactcaaaaccaacattttatttctcttagcaattgctcttttctatggctctttagccgaagatttgcaacaacaattcttagaggcccacaacgaagcccgaaacgaggttgggctcgacccattggtttgggacgatgaggtcgctgcatatgcggcaagctatgcaaaccagaggatcaatgattgtgcattagtccattcgaatggaccatttggagagaacatagcgatgagtagtggagaaatgtcggctgaagatgctgcggaaatgtggatcaacgagaaacagtactacgattacgatagtaacacgtgtaatgatccaaacggtggcacctgtctacattacacgcaagttgtttggaaaaacacagttcgtttgggatgtgctaaagttgtgtgtaacagtggtggtacttttattacatgcaactatgatcctcctggtaattacattggtgaaaaaccattctaa

SEQ ID NO: 96082 - protein, 161 aa, Arabidopsis thaliana
  peptide (1)..(161): Ceres Seq. ID no. 12731736
  misc_feature (30)..(148): Pfam Name: SCP-like extracellular protein Pfam Description: SCP-like extracellular protein
  misc_feature (1)..(161): Homolog of NCBI NO: 15230919 NR Description: PR-1 protein, putative; protein id: At3g19690.1
  misc_feature (3)..(161): Homolog of NCBI NO: 19944 NR Description: PR-1a protein (AA 1 - 168) [Nicotiana tabacum]
  misc_feature (3)..(161): Homolog of NCBI NO: 100370 NR Description: pathogenesis-related protein 1 - common tobacco
  misc_feature (3)..(161): Homolog of NCBI NO: 218304 NR Description: PR1a protein precursor [Nicotiana tabacum]
  misc_feature (3)..(161): Homolog of NCBI NO: 130826 NR Description: Pathogenesis-related protein 1A precursor (PR-1A)
  misc_feature (3)..(161): Homolog of NCBI NO: 579402 NR Description: PR1a preprotein [Nicotiana tabacum]
  misc_feature (12)..(161): Homolog of NCBI NO: 17221641 NR Description: PR-1 [Solanum torvum]
  misc_feature (8)..(161): Homolog of NCBI NO: 15225965 NR Description: putative pathogenesis related-1 (PR1) protein; id: At2g14580.1, supported by cDNA: gi_17529119 [Arabidopsis
  misc_feature (3)..(161): Homolog of NCBI NO: 130828 NR Description: Pathogenesis-related protein 1C precursor (PR-1C)
  misc_feature (3)..(161): Homolog of NCBI NO: 536788 NR Description: PR1c preprotein [Nicotiana tabacum]
MSLLKTNILFLLAIALFYGSLAEDLQQQFLEAHNEARNEVGLDPLVWDDEVAAYAASYANQRINDCALVHSNGPFGENIAMSSGEMSAEDAAEMWINEKQYYDYDSNTCNDPNGGTCLHYTQVVWKNTVRLGCAKVVCNSGGTFITCNYDPPGNYIGEKPF

SEQ ID NO: 96083 - protein, 81 aa, Arabidopsis thaliana
  peptide (1)..(81): Ceres Seq. ID no. 12731737
  misc_feature (1)..(68): Pfam Name: SCP-like extracellular protein Pfam Description: SCP-like extracellular protein
  misc_feature (1)..(81): Homolog of NCBI NO: 15230919 NR Description: PR-1 protein, putative; protein id: At3g19690.1
  misc_feature (1)..(81): Homolog of NCBI NO: 19944 NR Description: PR-1a protein (AA 1 - 168) [Nicotiana tabacum]
  misc_feature (1)..(81): Homolog of NCBI NO: 100370 NR Description: pathogenesis-related protein 1 - common tobacco
  misc_feature (1)..(81): Homolog of NCBI NO: 218304 NR Description: PR1a protein precursor [Nicotiana tabacum]
  misc_feature (1)..(81): Homolog of NCBI NO: 130826 NR Description: Pathogenesis-related protein 1A precursor (PR-1A)
  misc_feature (1)..(81): Homolog of NCBI NO: 579402 NR Description: PR1a preprotein [Nicotiana tabacum]
  misc_feature (1)..(81): Homolog of NCBI NO: 17221641 NR Description: PR-1 [Solanum torvum]
  misc_feature (1)..(81): Homolog of NCBI NO: 15225965 NR Description: putative pathogenesis related-1 (PR1) protein; id: At2g14580.1, supported by cDNA: gi_17529119 [Arabidopsis
  misc_feature (1)..(81): Homolog of NCBI NO: 130828 NR Description: Pathogenesis-related protein 1C precursor (PR-1C)
  misc_feature (1)..(81): Homolog of NCBI NO: 536788 NR Description: PR1c preprotein [Nicotiana tabacum]
MSSGEMSAEDAAEMWINEKQYYDYDSNTCNDPNGGTCLHYTQVVWKNTVRLGCAKVVCNSGGTFITCNYDPPGNYIGEKPF

SEQ ID NO: 96084 - DNA, 1997 bp, Arabidopsis thaliana
  misc_feature (1)..(1997): Ceres Seq. ID no. 12731744
  misc_feature: MA Experiment ID: 20001560 Result: Down-regulated in Transcription
  misc_feature: MA Experiment 20001560 PARAMETER Experiment Name: At_Drought_Soil_Dry_P Parameter: Age (day) Value: 28
  misc_feature: MA Experiment 20001560 PARAMETER Experiment Name: At_Drought_Soil_Dry_P Parameter: Organism Value: A. thaliana
  misc_feature: MA Experiment 20001560 PARAMETER Experiment Name: At_Drought_Soil_Dry_P Parameter: Plant Line Value: WS
  misc_feature: MA Experiment 20001560 PARAMETER Experiment Name: At_Drought_Soil_Dry_P Parameter: Post Timepoint (hr) Value: None
  misc_feature: MA Experiment 20001560 PARAMETER Experiment Name: At_Drought_Soil_Dry_P Parameter: Post-Treatment Value: None
  misc_feature: MA Experiment 20001560 PARAMETER Experiment Name: At_Drought_Soil_Dry_P Parameter: Timepoint (day) Value: 14
  misc_feature: MA Experiment 20001560 PARAMETER Experiment Name: At_Drought_Soil_Dry_P Parameter: Treatment Value: Drought vs. No Drought
attggtagtcagcgacacggaactcattaactttactcttctcactggtcaatcgtcggagataatcgggtgatcggcgatggagaatacggacgtcttcttggggctgcatgatttcctggagcggatgcgcaaaccctccgccggcgatttcgtcaaatccattaaaagtttcattgtttcattctcgaacaatgcaccagacccggaaaaagattgtgctatggttcaggagttcttttctaagatggaggctgctttcagggctcatccactttggtctggttgttctgaggaggaattggatagtgctggagatggcctggagaagtatgttatgacaaagctatttactcgggtgtttgcttcaaacactgaggaggttatagctgatgagaagctatttcagaagatgtcattggttcaacaattcatttctcccgagaatttggatatacaaccaacttttcaaaatgaatcgtcatggctgctagctcaaaaagagctccagaagataaacatgtacaaagctcctcgtgataagcttgtgtgtatccttaactgttgcaaagtgattaataacttactgctaaatgcttcaattgcttcaaacgagaatgcacctggagcagacgaatttcttcctgttttgatatatgtaacaataaaggctaaccctccacaacttcactcaaacttgttgtatatacaaaggtataggcgtgaatctaaacttgttggtgaagctgcgtacttcttcacaaacatactctctgcagagtctttcatctcaaatattgatgcaaaatctatttcactggatgaagctgagtttgaaaagaacatggaatctgcacgggcacgaatttctggtttggacagccagacttatcaaactggtcatggctctgcaccaccccctcgtgatgagtccactcttcagaaaactcaaagtctgaatcccaagagggaaaacactcttttccaatcaaaatcgtctgatagtctttctgggaccaacgaattactgaatataaacagtgaaacaccaatgaagaaagctgaatccatttcagatttggaaaataagggtgcgacgcttctgaaggataccgagccaagcaaagtctttcaagaatatccttacatatttgccagtgctggtgatttgaggataggagatgttgaaggcttgttaaatagttataaacagctcgttttcaaatatgtgtgccttaccaaaggattgggtgatggaacatctttagctccatccagttcacccttgcaagcgtcgtccggttttaatacgtctaaggaatctgaggatcatagaagatcgtcttcagatgtacaaatgacaaaggaaactgacaggagtgttgatgatttgatccgagctctacatggtgaaggggaagatgttaacaatctgtcagatgtaaaacatgaagaatatggcgcaatgttggtagagggaaaggatgaagaacgtgattccaaggtgcaaggagaagtagatgccaaagatattgaattgatgaagcaaattcctaagagagaaggtgacaattctagttcccgacctgcagaagatgaagatgttggttccaaacagccagttacggaagcttctgagtgagccaaatgacccatcttggtgatgagagtctcttgtatcggatcaattattcatttaatgggggaagcaaaggtcaagtcatagttaagatgtcatctattcgtttcttggagttatgagttttgaagatgactggagagccgtatgagacggaagctatctgcatctgtattcccttggaaaagaggggcagtcaaatggtaaattactttcttcaattgtgtttctttttttgctctttgtttctcagtgatatgattttggaggggctcgtcaacatttgtcaatccatatgtaactcttacatctgctattgcgtatatacaataaggatataatcagaataatatttgcc

SEQ ID NO: 96085 - protein, 520 aa, Arabidopsis thaliana
  peptide (1)..(520): Ceres Seq. ID no. 12731745
  misc_feature (135)..(242): Pfam Name: Vacuolar sorting protein 9 (VPS9) domain Pfam Description: Vacuolar sorting protein 9 (VPS9) domain
  misc_feature (1)..(520): Homolog of NCBI NO: 18402362 NR Description: expressed protein; protein id: At3g19770.1, by cDNA: gi_15027906, supported by cDNA: gi_19310676 [Arabidopsis >gi|15027907|gb|AAK76484.1| unknown protein [Arabidopsis
  misc_feature (1)..(424): Homolog of NCBI NO: 15242388 NR Description: putative protein; protein id: At5g09320.1 thaliana] >gi|9955519|emb|CAC05458.1| putative protein
  misc_feature (32)..(438): Homolog of NCBI NO: 34902128 NR Description: unknown protein [Oryza sativa (japonica
  misc_feature (8)..(30): Homolog of NCBI NO: 34902128 NR Description: unknown protein [Oryza sativa (japonica
  misc_feature (236)..(444): Homolog of NCBI NO: 15242388 NR Description: putative protein; protein id: At5g09320.1 thaliana] >gi|9955519|emb|CAC05458.1| putative protein
  misc_feature (3)..(259): Homolog of NCBI NO: 19112902 NR Description: putative vacuolar protein sorting-associated [Schizosaccharomyces pombe] >gi|7493160|pir||T40507 probable
  misc_feature (17)..(349): Homolog of NCBI NO: 26354574 NR Description: unnamed protein product [Mus musculus]
  misc_feature (27)..(241): Homolog of NCBI NO: 21739944 NR Description: hypothetical protein [Homo sapiens]
  misc_feature (27)..(241): Homolog of NCBI NO: 27882595 NR Description: Similar to RIKEN cDNA 4432404J10 gene [Mus
  misc_feature (1)..(307): Homolog of NCBI NO: 38541983 NR Description: RAB guanine nucleotide exchange factor (GEF) 1
MENTDVFLGLHDFLERMRKPSAGDFVKSIKSFIVSFSNNAPDPEKDCAMVQEFFSKMEAAFRAHPLWSGCSEEELDSAGDGLEKYVMTKLFTRVFASNTEEVIADEKLFQKMSLVQQFISPENLDIQPTFQNESSWLLAQKELQKINMYKAPRDKLVCILNCCKVINNLLLNASIASNENAPGADEFLPVLIYVTIKANPPQLHSNLLYIQRYRRESKLVGEAAYFFTNILSAESFISNIDAKSISLDEAEFEKNMESARARISGLDSQTYQTGHGSAPPPRDESTLQKTQSLNPKRENTLFQSKSSDSLSGTNELLNINSETPMKKAESISDLENKGATLLKDTEPSKVFQEYPYIFASAGDLRIGDVEGLLNSYKQLVFKYVCLTKGLGDGTSLAPSSSPLQASSGFNTSKESEDHRRSSSDVQMTKETDRSVDDLIRALHGEGEDVNNLSDVKHEEYGAMLVEGKDEERDSKVQGEVDAKDIELMKQIPKREGDNSSSRPAEDEDVGSKQPVTEASE

SEQ ID NO: 96086 - protein, 504 aa, Arabidopsis thaliana
  peptide (1)..(504): Ceres Seq. ID no. 12731746
  misc_feature (119)..(226): Pfam Name: Vacuolar sorting protein 9 (VPS9) domain Pfam Description: Vacuolar sorting protein 9 (VPS9) domain
  misc_feature (1)..(504): Homolog of NCBI NO: 18402362 NR Description: expressed protein; protein id: At3g19770.1, by cDNA: gi_15027906, supported by cDNA: gi_19310676 [Arabidopsis >gi|15027907|gb|AAK76484.1| unknown protein [Arabidopsis
  misc_feature (1)..(408): Homolog of NCBI NO: 15242388 NR Description: putative protein; protein id: At5g09320.1 thaliana] >gi|9955519|emb|CAC05458.1| putative protein
  misc_feature (16)..(422): Homolog of NCBI NO: 34902128 NR Description: unknown protein [Oryza sativa (japonica
  misc_feature (1)..(14): Homolog of NCBI NO: 34902128 NR Description: unknown protein [Oryza sativa (japonica
  misc_feature (220)..(428): Homolog of NCBI NO: 15242388 NR Description: putative protein; protein id: At5g09320.1 thaliana] >gi|9955519|emb|CAC05458.1| putative protein
  misc_feature (1)..(243): Homolog of NCBI NO: 19112902 NR Description: putative vacuolar protein sorting-associated [Schizosaccharomyces pombe] >gi|7493160|pir||T40507 probable
  misc_feature (1)..(333): Homolog of NCBI NO: 26354574 NR Description: unnamed protein product [Mus musculus]
  misc_feature (11)..(225): Homolog of NCBI NO: 21739944 NR Description: hypothetical protein [Homo sapiens]
  misc_feature (11)..(225): Homolog of NCBI NO: 27882595 NR Description: Similar to RIKEN cDNA 4432404J10 gene [Mus
  misc_feature (1)..(291): Homolog of NCBI NO: 38541983 NR Description: RAB guanine nucleotide exchange factor (GEF) 1
MRKPSAGDFVKSIKSFIVSFSNNAPDPEKDCAMVQEFFSKMEAAFRAHPLWSGCSEEELDSAGDGLEKYVMTKLFTRVFASNTEEVIADEKLFQKMSLVQQFISPENLDIQPTFQNESSWLLAQKELQKINMYKAPRDKLVCILNCCKVINNLLLNASIASNENAPGADEFLPVLIYVTIKANPPQLHSNLLYIQRYRRESKLVGEAAYFFTNILSAESFISNIDAKSISLDEAEFEKNMESARARISGLDSQTYQTGHGSAPPPRDESTLQKTQSLNPKRENTLFQSKSSDSLSGTNELLNINSETPMKKAESISDLENKGATLLKDTEPSKVFQEYPYIFASAGDLRIGDVEGLLNSYKQLVFKYVCLTKGLGDGTSLAPSSSPLQASSGFNTSKESEDHRRSSSDVQMTKETDRSVDDLIRALHGEGEDVNNLSDVKHEEYGAMLVEGKDEERDSKVQGEVDAKDIELMKQIPKREGDNSSSRPAEDEDVGSKQPVTEASE

SEQ ID NO: 96087 - protein, 472 aa, Arabidopsis thaliana
  peptide (1)..(472): Ceres Seq. ID no. 12731747
  misc_feature (87)..(194): Pfam Name: Vacuolar sorting protein 9 (VPS9) domain Pfam Description: Vacuolar sorting protein 9 (VPS9) domain
  misc_feature (1)..(472): Homolog of NCBI NO: 18402362 NR Description: expressed protein; protein id: At3g19770.1, by cDNA: gi_15027906, supported by cDNA: gi_19310676 [Arabidopsis >gi|15027907|gb|AAK76484.1| unknown protein [Arabidopsis
  misc_feature (1)..(376): Homolog of NCBI NO: 15242388 NR Description: putative protein; protein id: At5g09320.1 thaliana] >gi|9955519|emb|CAC05458.1| putative protein
  misc_feature (1)..(390): Homolog of NCBI NO: 34902128 NR Description: unknown protein [Oryza sativa (japonica
  misc_feature (188)..(396): Homolog of NCBI NO: 15242388 NR Description: putative protein; protein id: At5g09320.1 thaliana] >gi|9955519|emb|CAC05458.1| putative protein
  misc_feature (1)..(211): Homolog of NCBI NO: 19112902 NR Description: putative vacuolar protein sorting-associated [Schizosaccharomyces pombe] >gi|7493160|pir||T40507 probable
  misc_feature (1)..(301): Homolog of NCBI NO: 26354574 NR Description: unnamed protein product [Mus musculus]
  misc_feature (1)..(193): Homolog of NCBI NO: 21739944 NR Description: hypothetical protein [Homo sapiens]
  misc_feature (1)..(193): Homolog of NCBI NO: 27882595 NR Description: Similar to RIKEN cDNA 4432404J10 gene [Mus
  misc_feature (1)..(259): Homolog of NCBI NO: 38541983 NR Description: RAB guanine nucleotide exchange factor (GEF) 1
  misc_feature (1)..(301): Homolog of NCBI NO: 28278927 NR Description: Similar to Rab5 exchange factor [Danio rerio]
MVQEFFSKMEAAFRAHPLWSGCSEEELDSAGDGLEKYVMTKLFTRVFASNTEEVIADEKLFQKMSLVQQFISPENLDIQPTFQNESSWLLAQKELQKINMYKAPRDKLVCILNCCKVINNLLLNASIASNENAPGADEFLPVLIYVTIKANPPQLHSNLLYIQRYRRESKLVGEAAYFFTNILSAESFISNIDAKSISLDEAEFEKNMESARARISGLDSQTYQTGHGSAPPPRDESTLQKTQSLNPKRENTLFQSKSSDSLSGTNELLNINSETPMKKAESISDLENKGATLLKDTEPSKVFQEYPYIFASAGDLRIGDVEGLLNSYKQLVFKYVCLTKGLGDGTSLAPSSSPLQASSGFNTSKESEDHRRSSSDVQMTKETDRSVDDLIRALHGEGEDVNNLSDVKHEEYGAMLVEGKDEERDSKVQGEVDAKDIELMKQIPKREGDNSSSRPAEDEDVGSKQPVTEASE

SEQ ID NO: 96088 - DNA, 2334 bp, Arabidopsis thaliana
  misc_feature (1)..(2334): Ceres Seq. ID no. 12731761
  misc_feature: MA Experiment ID: 20000171 Result: Down-regulated in Transcription
  misc_feature: MA Experiment 20000171 PARAMETER Experiment Name: At_42deg_Heat_P Parameter: Age (day) Value: 14
  misc_feature: MA Experiment 20000171 PARAMETER Experiment Name: At_42deg_Heat_P Parameter: Organism Value: A. thaliana
  misc_feature: MA Experiment 20000171 PARAMETER Experiment Name: At_42deg_Heat_P Parameter: Plant Line Value: WS
  misc_feature: MA Experiment 20000171 PARAMETER Experiment Name: At_42deg_Heat_P Parameter: Temperature (deg C) Value: 42 vs. 22
  misc_feature: MA Experiment 20000171 PARAMETER Experiment Name: At_42deg_Heat_P Parameter: Timepoint (hr) Value: 1
  misc_feature: MA Experiment 20000171 PARAMETER Experiment Name: At_42deg_Heat_P Parameter: Tissue Value: Aerial
  misc_feature: MA Experiment ID: 20000173 Result: Down-regulated in Transcription
  misc_feature: MA Experiment 20000173 PARAMETER Experiment Name: At_42deg_Heat_P Parameter: Age (day) Value: 14
  misc_feature: MA Experiment 20000173 PARAMETER Experiment Name: At_42deg_Heat_P Parameter: Organism Value: A. thaliana
  misc_feature: MA Experiment 20000173 PARAMETER Experiment Name: At_42deg_Heat_P Parameter: Plant Line Value: WS
  misc_feature: MA Experiment 20000173 PARAMETER Experiment Name: At_42deg_Heat_P Parameter: Temperature (deg C) Value: 42 vs. 22
  misc_feature: MA Experiment 20000173 PARAMETER Experiment Name: At_42deg_Heat_P Parameter: Timepoint (hr) Value: 6
  misc_feature: MA Experiment 20000173 PARAMETER Experiment Name: At_42deg_Heat_P Parameter: Tissue Value: Aerial
  misc_feature: MA Experiment ID: 20000184 Result: Down-regulated in Transcription
  misc_feature: MA Experiment 20000184 PARAMETER Experiment Name: At_Shoots__P Parameter: Age (day) Value: 7
  misc_feature: MA Experiment 20000184 PARAMETER Experiment Name: At_Shoots__P Parameter: Tissue Value: Shoots vs. Whole Plant
  misc_feature: MA Experiment ID: 20000227 Result: Down-regulated in Transcription
  misc_feature: MA Experiment 20000227 PARAMETER Experiment Name: At_Root-Tips-vs-Tops_P Parameter: Tissue Value: Root Tips vs. Root Tops
  misc_feature: MA Experiment ID: 20000439 Result: Up-regulated in Transcription
  misc_feature: MA Experiment 20000439 PARAMETER Experiment Name: At_Roots__P Parameter: Age (day) Value: 14 vs. 21
  misc_feature: MA Experiment 20000439 PARAMETER Experiment Name: At_Roots__P Parameter: Organism Value: A. thaliana
  misc_feature: MA Experiment 20000439 PARAMETER Experiment Name: At_Roots__P Parameter: Tissue Value: Roots vs. Whole Plant
  misc_feature: MA Experiment ID: 20001558 Result: Down-regulated in Transcription
  misc_feature: MA Experiment 20001558 PARAMETER Experiment Name: At_Drought_Soil_Dry_P Parameter: Age (day) Value: 27
  misc_feature: MA Experiment 20001558 PARAMETER Experiment Name: At_Drought_Soil_Dry_P Parameter: Organism Value: A. thaliana
  misc_feature: MA Experiment 20001558 PARAMETER Experiment Name: At_Drought_Soil_Dry_P Parameter: Plant Line Value: WS
  misc_feature: MA Experiment 20001558 PARAMETER Experiment Name: At_Drought_Soil_Dry_P Parameter: Post Timepoint (hr) Value: 6
  misc_feature: MA Experiment 20001558 PARAMETER Experiment Name: At_Drought_Soil_Dry_P Parameter: Post-Treatment Value: Re-Water vs. No Drought
  misc_feature: MA Experiment 20001558 PARAMETER Experiment Name: At_Drought_Soil_Dry_P Parameter: Timepoint (day) Value: 13
  misc_feature: MA Experiment 20001558 PARAMETER Experiment Name: At_Drought_Soil_Dry_P Parameter: Treatment Value: Drought vs. No Drought
  misc_feature: MA Experiment ID: 20001560 Result: Down-regulated in Transcription
  misc_feature: MA Experiment 20001560 PARAMETER Experiment Name: At_Drought_Soil_Dry_P Parameter: Age (day) Value: 28
  misc_feature: MA Experiment 20001560 PARAMETER Experiment Name: At_Drought_Soil_Dry_P Parameter: Organism Value: A. thaliana
  misc_feature: MA Experiment 20001560 PARAMETER Experiment Name: At_Drought_Soil_Dry_P Parameter: Plant Line Value: WS
  misc_feature: MA Experiment 20001560 PARAMETER Experiment Name: At_Drought_Soil_Dry_P Parameter: Post Timepoint (hr) Value: None
  misc_feature: MA Experiment 20001560 PARAMETER Experiment Name: At_Drought_Soil_Dry_P Parameter: Post-Treatment Value: None
  misc_feature: MA Experiment 20001560 PARAMETER Experiment Name: At_Drought_Soil_Dry_P Parameter: Timepoint (day) Value: 14
  misc_feature: MA Experiment 20001560 PARAMETER Experiment Name: At_Drought_Soil_Dry_P Parameter: Treatment Value: Drought vs. No Drought
acaaactcaaaaccagagtctactacattagaaattttcacaattacaattctccggcgaatccaacgtttccggcacaattctccactatattgacggcgatatacccttatacggcgtttcgtggttacaatttgtaacctaactactcatcgtctacccaattcaaaccagtcaggtttccgtacagtagtaaaatcacaattcctctctgtaacaacgatctcaacgacttcaacgagacacgttactattccaatccatttttccgacgccggcaactgaatcagaatcggaaaactctagagacatatggttgattggagtggcgatgcaccggcagggctcgtctccgattacgccttcaaactataacgccgccgtttcaattgcttctgatgtacctactggtttaaccaagtctcctttatctcacgcgattccagtttcgccgatttctgctgcttacccttccggtgatcctattttgatgatgtctgggactcctctcgctagggttcgattatctgaaattttgccttatgaaggagctccttctccggtgtatgcaaaagctgtggaggctttgtctgtgtctttgatgaggtataatgcgtctgtgatcgagatagggagtgaagacactgcactgatgcgatgtggccttgaagctgctcgtttgtattttagaactagaagccttactgtttctggtaaaggcaatcgtggcctctctatgtatagagccggaaggtctgttgaagatttagattcttcacctccatgcatggctgagattttcaggtgtttgggtaaagtagcacgagctgctttatctgcaatagcaaggcatctacgtttaagaagcgatgtttttaaccatatgcttgatgactttccactagctccgaacgaggtttcctcctcggtgctactggcttcctatgctcatgcatcgatacaaaatggaaaacatgcttctggaggtgggaacctatctgctaagattgaagttgagaagggtttgttgacactgttctgctcagatggcactggcattcaggtatgtgacccaaatggtcgttggtacacagcagataatggatgtggggtgggtgatctcttactgattaccggcaaagcgcttagtcatgctactgcaggtctccgtccagctgcctcttacagaactactaccgatcatttgtctgccactgacactcgaggaagggcatcattagcttttaggcttatgccgaaaagtaatgctatattagattgttccccaatagaagcagccggccatgtaattcctcaaagctatgtgccagtatctgttagtcagtttatggataacctcttagccgagaatgacactctagttaatccgcctgtgaaaaccaatgttccacgggatgatgtttgcaaagagccttccttaagaagtgttctctcggatccaatttctggtgcttttcttgaagatgcaatggttgtctcttgtggacattcatttggtggccttatgcttagaagagtccttgaaatgtctagatgtacgctctgcaatacagagatcgagtctgggtctctggttcctaaccatgcacttagagctgccgcttcagctatcaagcaacaggatgataaacgacttttccacaacgcagccatgagaaggcgtagaaaagaaatgagtgatcaaatggatgtggtgagatgatctgactctgctctacatattgcttttgtgggtggtttccgattacatagttaccatctccaaacttatcagcctgcatcatcatctgttttctggaaaatggagatccagctacggatgatggtatgcatcgagtggtgcattatccatttgctgtaaatgagaaagttcttatcaagggaaaccggcgaactccagaaaagtttgttggaaaagaagcaatcgtgacatctcagtgtctcaatggctggtatctattaaagattgtcgaaagcggagacaatgtacggctgcaataccgatccctaaaaaagatggtgaacgatgacagaggaggaggcctacaggctcaaccggttgagagcaatagcttgtagaatgtaatcatatttaacccttttcttttcttcttattctgtatctctagagctagagagaaaagaaaagataatgtggtttggggttttgagattctgcataaatttaaatcgtttggttagaaaaagaaagtagtggaagactattattgtaaactatattagcctcctaagtattagaggttttgtacagaacaaaatgttagaaaagaaaaaacaactgtgttactcttg

SEQ ID NO: 96089 - protein, 463 aa, Arabidopsis thaliana
  peptide (1)..(463): Ceres Seq. ID no. 12731762
  misc_feature (1)..(461): Homolog of NCBI NO: 30685540 NR Description: expressed protein [Arabidopsis thaliana]
  misc_feature (1)..(379): Homolog of NCBI NO: 11994201 NR Description: gb|AAF35943.1~gene_id:MPN9.14~similar to unknown
  misc_feature (348)..(461): Homolog of NCBI NO: 11994201 NR Description: gb|AAF35943.1~gene_id:MPN9.14~similar to unknown
  misc_feature (1)..(463): Homolog of NCBI NO: 20453175 NR Description: At3g19895 [Arabidopsis thaliana]
  misc_feature (137)..(352): Homolog of NCBI NO: 15230647 NR Description: unknown protein; protein id: At3g12940.1
  misc_feature (56)..(122): Homolog of NCBI NO: 15230647 NR Description: unknown protein; protein id: At3g12940.1
  misc_feature (137)..(352): Homolog of NCBI NO: 15795123 NR Description: gb|AAF35943.1~gene_id:MGH6.5~strong similarity to
  misc_feature (56)..(122): Homolog of NCBI NO: 15795123 NR Description: gb|AAF35943.1~gene_id:MGH6.5~strong similarity to
  misc_feature (150)..(374): Homolog of NCBI NO: 33146538 NR Description: unknown protein [Oryza sativa (japonica
  misc_feature (60)..(133): Homolog of NCBI NO: 33146538 NR Description: unknown protein [Oryza sativa (japonica
MHRQGSSPITPSNYNAAVSIASDVPTGLTKSPLSHAIPVSPISAAYPSGDPILMMSGTPLARVRLSEILPYEGAPSPVYAKAVEALSVSLMRYNASVIEIGSEDTALMRCGLEAARLYFRTRSLTVSGKGNRGLSMYRAGRSVEDLDSSPPCMAEIFRCLGKVARAALSAIARHLRLRSDVFNHMLDDFPLAPNEVSSSVLLASYAHASIQNGKHASGGGNLSAKIEVEKGLLTLFCSDGTGIQVCDPNGRWYTADNGCGVGDLLLITGKALSHATAGLRPAASYRTTTDHLSATDTRGRASLAFRLMPKSNAILDCSPIEAAGHVIPQSYVPVSVSQFMDNLLAENDTLVNPPVKTNVPRDDVCKEPSLRSVLSDPISGAFLEDAMVVSCGHSFGGLMLRRVLEMSRCTLCNTEIESGSLVPNHALRAAASAIKQQDDKRLFHNAAMRRRRKEMSDQMDVVR

SEQ ID NO: 96090 - protein, 410 aa, Arabidopsis thaliana
  peptide (1)..(410): Ceres Seq. ID no. 12731763
  misc_feature (1)..(408): Homolog of NCBI NO: 30685540 NR Description: expressed protein [Arabidopsis thaliana]
  misc_feature (1)..(326): Homolog of NCBI NO: 11994201 NR Description: gb|AAF35943.1~gene_id:MPN9.14~similar to unknown
  misc_feature (295)..(408): Homolog of NCBI NO: 11994201 NR Description: gb|AAF35943.1~gene_id:MPN9.14~similar to unknown
  misc_feature (1)..(410): Homolog of NCBI NO: 20453175 NR Description: At3g19895 [Arabidopsis thaliana]
  misc_feature (84)..(299): Homolog of NCBI NO: 15230647 NR Description: unknown protein; protein id: At3g12940.1
  misc_feature (3)..(69): Homolog of NCBI NO: 15230647 NR Description: unknown protein; protein id: At3g12940.1
  misc_feature (84)..(299): Homolog of NCBI NO: 15795123 NR Description: gb|AAF35943.1~gene_id:MGH6.5~strong similarity to
  misc_feature (3)..(69): Homolog of NCBI NO: 15795123 NR Description: gb|AAF35943.1~gene_id:MGH6.5~strong similarity to
  misc_feature (97)..(321): Homolog of NCBI NO: 33146538 NR Description: unknown protein [Oryza sativa (japonica
  misc_feature (7)..(80): Homolog of NCBI NO: 33146538 NR Description: unknown protein [Oryza sativa (japonica
MMSGTPLARVRLSEILPYEGAPSPVYAKAVEALSVSLMRYNASVIEIGSEDTALMRCGLEAARLYFRTRSLTVSGKGNRGLSMYRAGRSVEDLDSSPPCMAEIFRCLGKVARAALSAIARHLRLRSDVFNHMLDDFPLAPNEVSSSVLLASYAHASIQNGKHASGGGNLSAKIEVEKGLLTLFCSDGTGIQVCDPNGRWYTADNGCGVGDLLLITGKALSHATAGLRPAASYRTTTDHLSATDTRGRASLAFRLMPKSNAILDCSPIEAAGHVIPQSYVPVSVSQFMDNLLAENDTLVNPPVKTNVPRDDVCKEPSLRSVLSDPISGAFLEDAMVVSCGHSFGGLMLRRVLEMSRCTLCNTEIESGSLVPNHALRAAASAIKQQDDKRLFHNAAMRRRRKEMSDQMDVVR

SEQ ID NO: 96091 - protein, 409 aa, Arabidopsis thaliana
  peptide (1)..(409): Ceres Seq. ID no. 12731764
  misc_feature (1)..(407): Homolog of NCBI NO: 30685540 NR Description: expressed protein [Arabidopsis thaliana]
  misc_feature (1)..(325): Homolog of NCBI NO: 11994201 NR Description: gb|AAF35943.1~gene_id:MPN9.14~similar to unknown
  misc_feature (294)..(407): Homolog of NCBI NO: 11994201 NR Description: gb|AAF35943.1~gene_id:MPN9.14~similar to unknown
  misc_feature (1)..(409): Homolog of NCBI NO: 20453175 NR Description: At3g19895 [Arabidopsis thaliana]
  misc_feature (83)..(298): Homolog of NCBI NO: 15230647 NR Description: unknown protein; protein id: At3g12940.1
  misc_feature (2)..(68): Homolog of NCBI NO: 15230647 NR Description: unknown protein; protein id: At3g12940.1
  misc_feature (83)..(298): Homolog of NCBI NO: 15795123 NR Description: gb|AAF35943.1~gene_id:MGH6.5~strong similarity to
  misc_feature (2)..(68): Homolog of NCBI NO: 15795123 NR Description: gb|AAF35943.1~gene_id:MGH6.5~strong similarity to
  misc_feature (96)..(320): Homolog of NCBI NO: 33146538 NR Description: unknown protein [Oryza sativa (japonica
  misc_feature (6)..(79): Homolog of NCBI NO: 33146538 NR Description: unknown protein [Oryza sativa (japonica
MSGTPLARVRLSEILPYEGAPSPVYAKAVEALSVSLMRYNASVIEIGSEDTALMRCGLEAARLYFRTRSLTVSGKGNRGLSMYRAGRSVEDLDSSPPCMAEIFRCLGKVARAALSAIARHLRLRSDVFNHMLDDFPLAPNEVSSSVLLASYAHASIQNGKHASGGGNLSAKIEVEKGLLTLFCSDGTGIQVCDPNGRWYTADNGCGVGDLLLITGKALSHATAGLRPAASYRTTTDHLSATDTRGRASLAFRLMPKSNAILDCSPIEAAGHVIPQSYVPVSVSQFMDNLLAENDTLVNPPVKTNVPRDDVCKEPSLRSVLSDPISGAFLEDAMVVSCGHSFGGLMLRRVLEMSRCTLCNTEIESGSLVPNHALRAAASAIKQQDDKRLFHNAAMRRRRKEMSDQMDVVR

SEQ ID NO: 96092 - DNA, 1417 bp, Arabidopsis thaliana
  misc_feature (1)..(1417): Ceres Seq. ID no. 12731777
  misc_feature: MA Experiment ID: 20001451 Result: Down-regulated in Transcription
  misc_feature: MA Experiment 20001451 PARAMETER Experiment Name: At_Far-red-induction_P Parameter: Age (day) Value: 7
  misc_feature: MA Experiment 20001451 PARAMETER Experiment Name: At_Far-red-induction_P Parameter: Light Value: Far-red vs. White
  misc_feature: MA Experiment 20001451 PARAMETER Experiment Name: At_Far-red-induction_P Parameter: Organism Value: A. thaliana
  misc_feature: MA Experiment 20001451 PARAMETER Experiment Name: At_Far-red-induction_P Parameter: Plant Line Value: Columbia
  misc_feature: MA Experiment 20001451 PARAMETER Experiment Name: At_Far-red-induction_P Parameter: Timepoint (hr) Value: 24
  misc_feature: MA Experiment 20001451 PARAMETER Experiment Name: At_Far-red-induction_P Parameter: Tissue Value: Whole Plant
acttaaaattaaataaaaagatagaagaaaaatagtgctttgagaagaagaaaaaaaccgttgccctagaattaaaatccacttctcagtgtcataggcgtcgtcggtttgggaattttataaagttggtctcttttgaattcatcagtttcgtcattctccttcaaatctggaaaccaaagcgagtgtgttttgctctcttgaatcgaatttgtaagctcgtcgattttgcttctttccgggtcgggtaatcaatttgatttgattcttcactcttctacagtgagcagaaaatggaagctctctacgccaagctctacgacaaatacaccaaactccagaagaagaaatattccgaatacgatgagattaataaggaacaagaagagaaattccttacctttgtttcagcctcagaggagttgatggaacatttgagaggtgaaaatcagagttctctggagatggttgagaagttgaggaatgaaatcatttcaatcagatctggcagggacgacaagtttctggagtgtcaaaagcttctcatggaagaagaactaaagaacaaatcactttctgaagaagttgtcaagctaaaagagctggtccaagaggaacatcctcgcaactatgaagatcaaagtggaaaaaaacaaaagagaaagactcctgaaagtgctcgagttacaacgagaagcatgataaaacgtagcagactgtcagaagatttggtggaaacggatatggtatcacctgacattagcaaacatcataaagcaaaggagcctctcttggtttctcagccacaatgctgcagaacaacctacgatggatcaagtagttctgctagttgtacatttcaagctcttggcaaacacttgctaggaatgaaattatcaactaataataagggcaaacgcgcctgcattgtagcctcacacccaacaaccggtttatccttcagcctaacttttataaataacccaaatggtgaagaatctgagctgctttacaagcctgcatcactcggaacatttcaaagagtggcaccggaatggatgagagaagttataaagttcagcacaagtatgtgtcccatcttctttgaaagagtctctcgagtcattaagctcaattgttgatcggtaccgtatgtacatctccctccccttatcttgtgtagtcatctctgatggcttcttagtgtgatgtttctcaataggtttgaaaagctagggaagttatcattgtatctatagaaatgtgtctctctttaactttggaattagtttcaaagatagtgtgtccttgtgatgaatcatattgtaacaagatcttgatttatcctttgctctcgataccctctcctcttgtagacctcataaatctctgatctattgagcattttacatgattc

SEQ ID NO: 96093 - protein, 282 aa, Arabidopsis thaliana
  peptide (1)..(282): Ceres Seq. ID no. 12731778
  misc_feature (1)..(282): Homolog of NCBI NO: 22331190 NR Description: hypothetical protein; protein id: At3g20070.1, by cDNA: gi_17380795 [Arabidopsis thaliana] gene_id:MAL21.7~unknown protein [Arabidopsis thaliana]
  misc_feature (154)..(278): Homolog of NCBI NO: 13194678 NR Description: unknown [Pennisetum ciliare]
MEALYAKLYDKYTKLQKKKYSEYDEINKEQEEKFLTFVSASEELMEHLRGENQSSLEMVEKLRNEIISIRSGRDDKFLECQKLLMEEELKNKSLSEEVVKLKELVQEEHPRNYEDQSGKKQKRKTPESARVTTRSMIKRSRLSEDLVETDMVSPDISKHHKAKEPLLVSQPQCCRTTYDGSSSSASCTFQALGKHLLGMKLSTNNKGKRACIVASHPTTGLSFSLTFINNPNGEESELLYKPASLGTFQRVAPEWMREVIKFSTSMCPIFFERVSRVIKLNC

SEQ ID NO: 96094 - protein, 238 aa, Arabidopsis thaliana
  peptide (1)..(238): Ceres Seq. ID no. 12731779
  misc_feature (1)..(238): Homolog of NCBI NO: 22331190 NR Description: hypothetical protein; protein id: At3g20070.1, by cDNA: gi_17380795 [Arabidopsis thaliana] gene_id:MAL21.7~unknown protein [Arabidopsis thaliana]
  misc_feature (110)..(234): Homolog of NCBI NO: 13194678 NR Description: unknown [Pennisetum ciliare]
MEHLRGENQSSLEMVEKLRNEIISIRSGRDDKFLECQKLLMEEELKNKSLSEEVVKLKELVQEEHPRNYEDQSGKKQKRKTPESARVTTRSMIKRSRLSEDLVETDMVSPDISKHHKAKEPLLVSQPQCCRTTYDGSSSSASCTFQALGKHLLGMKLSTNNKGKRACIVASHPTTGLSFSLTFINNPNGEESELLYKPASLGTFQRVAPEWMREVIKFSTSMCPIFFERVSRVIKLNC

SEQ ID NO: 96095 - protein, 225 aa, Arabidopsis thaliana
  peptide (1)..(225): Ceres Seq. ID no. 12731780
  misc_feature (1)..(225): Homolog of NCBI NO: 22331190 NR Description: hypothetical protein; protein id: At3g20070.1, by cDNA: gi_17380795 [Arabidopsis thaliana] gene_id:MAL21.7~unknown protein [Arabidopsis thaliana]
  misc_feature (97)..(221): Homolog of NCBI NO: 13194678 NR Description: unknown [Pennisetum ciliare]
MVEKLRNEIISIRSGRDDKFLECQKLLMEEELKNKSLSEEVVKLKELVQEEHPRNYEDQSGKKQKRKTPESARVTTRSMIKRSRLSEDLVETDMVSPDISKHHKAKEPLLVSQPQCCRTTYDGSSSSASCTFQALGKHLLGMKLSTNNKGKRACIVASHPTTGLSFSLTFINNPNGEESELLYKPASLGTFQRVAPEWMREVIKFSTSMCPIFFERVSRVIKLNC

SEQ ID NO: 96096 - DNA, 1575 bp, Arabidopsis thaliana
  misc_feature (1)..(1575): Ceres Seq. ID no. 12731781
  misc_feature: MA Experiment ID: 20000185 Result: Up-regulated in Transcription
  misc_feature: MA Experiment 20000185 PARAMETER Experiment Name: At_Roots__P Parameter: Age (day) Value: 7 vs. 21
  misc_feature: MA Experiment 20000185 PARAMETER Experiment Name: At_Roots__P Parameter: Organism Value: A. thaliana
  misc_feature: MA Experiment 20000185 PARAMETER Experiment Name: At_Roots__P Parameter: Tissue Value: Roots vs. Whole Plant
  misc_feature: MA Experiment ID: 20000439 Result: Up-regulated in Transcription
  misc_feature: MA Experiment 20000439 PARAMETER Experiment Name: At_Roots__P Parameter: Age (day) Value: 14 vs. 21
  misc_feature: MA Experiment 20000439 PARAMETER Experiment Name: At_Roots__P Parameter: Organism Value: A. thaliana
  misc_feature: MA Experiment 20000439 PARAMETER Experiment Name: At_Roots__P Parameter: Tissue Value: Roots vs. Whole Plant
  misc_feature: MA Experiment ID: 20000495 Result: Up-regulated in Transcription
  misc_feature: MA Experiment 20000495 PARAMETER Experiment Name: At_Guard_Cells_P Parameter: Harvest Date Value: 8/2/2002
  misc_feature: MA Experiment 20000495 PARAMETER Experiment Name: At_Guard_Cells_P Parameter: Organism Value: A. thaliana
  misc_feature: MA Experiment 20000495 PARAMETER Experiment Name: At_Guard_Cells_P Parameter: Tissue Value: Guard Cells vs. Leaves
atggcaacacttatcagcgttgactttcagcactgtttcatgtacataatcctcctatgcctcttctcacttctctgttactctctcttcttcaggaaaccaaagggcacacgagttggctgtgatctgcctccgagccctccgtctcttcctatcattggtcatcttcaccatctcctctcttctctaactcacaagtctttacaaaaactctcctccaagtatggacctttcctccatctccggatctttagtgttcccatcatccttgtctcatctgcttcagtggcatatgagatctttaaggcccacgatgtgaacgtctcatctcgtggtgctgctgcgatcgatgagtccctcttgtttggatcttctagcttcatttacgctccctatggagattactggaagttcatgaagaagatcttcgccactaagctgctccgaccacaggtgctggagaattcacgtggtgttcgtgctgaagagttaaagcggttttacaggagaattctcgataaggcgaggaagaatgagaacatcgagatcagtaaggaatcggcgatgctcatgaacaacatcttatgcaggatgagcatgggaaggagtttttcagaggaaaatggtgaggcagagagagtcaggggcctggtgggtgaatcatatgccttggtgaagaagattttcttcgcagctacattgcgcagactgcttgagaagcttcggatcccactattcaggaaggagataatgggtgtgtccgacagatttgatgagctgctagagaggattattgtggaacacaaagacaaacttgaaaaggagcatcaagttatggatatgatggatgtgttgttggcagcttatcgagacaaaaacgcagagtataagatcactaggaatcatatcaagtcgttttttgtggaccttttcgttgggggcactgatacctcggtccaaacaacacaatggactatggctgagatcattaataaccctaacattcttcagacactgagaaaagaaatcgattcagttgtagggaaatcaaggttgattcacgaaacggatataccaaaccttccttatttgcaagcagtggttaaggaaggactaagattgcatcctccagggcccctcttgataaggacttttcaagaaagatgtgagatgaaagggttctacataccggagaagacaacactcgttatcaacgcttatgctgtgatgagagatcccgactcttgggaagatcctgacgagtttaagccagagaggtttctaagttattcaagatcagggcaagaagacgagaaagagcaaacacttaagtacctttcttttggtggcggaaggagaggatgtcctggagtaaatctaggttatatatttgttggaactgcaataggaatgatggtgcagtgctttgactggaaaatcgaaggagataaggtcaacatggaagagacttatggaggaatgaacctaaccatggttaacccgcttaagtgcactccagttcctcgaacccaacctttttcttttacttctaatctcgagattcttagttcctga

SEQ ID NO: 96097 - protein, 524 aa, Arabidopsis thaliana
  peptide (1)..(524): Ceres Seq. ID no. 12731782
  misc_feature (1)..(524): Homolog of NCBI NO: 15231047 NR Description: cytochrome P450, putative; protein id: At3g20090.1
  misc_feature (1)..(524): Homolog of NCBI NO: 9294003 NR Description: cytochrome P450-like protein [Arabidopsis
  misc_feature (5)..(506): Homolog of NCBI NO: 15233794 NR Description: cytochrome p450 family; protein id: At4g15360.1
  misc_feature (1)..(515): Homolog of NCBI NO: 15231052 NR Description: cytochrome p450 family; protein id: At3g20130.1
  misc_feature (4)..(513): Homolog of NCBI NO: 15231049 NR Description: cytochrome p450 family; protein id: At3g20100.1, by cDNA: 149380., supported by cDNA: gi_15215771 [Arabidopsis
  misc_feature (12)..(512): Homolog of NCBI NO: 9293969 NR Description: cytochrome P450-like protein [Arabidopsis
  misc_feature (4)..(513): Homolog of NCBI NO: 21553521 NR Description: cytochrome P450, putative [Arabidopsis thaliana]
  misc_feature (17)..(510): Homolog of NCBI NO: 15233774 NR Description: cytochrome p450 family; protein id: At4g15350.1
  misc_feature (1)..(510): Homolog of NCBI NO: 15232418 NR Description: cytochrome P450, putative; protein id: At3g20950.1
  misc_feature (1)..(524): Homolog of NCBI NO: 30685997 NR Description: cytochrome P450 family [Arabidopsis thaliana]
MATLISVDFQHCFMYIILLCLFSLLCYSLFFRKPKGTRVGCDLPPSPPSLPIIGHLHHLLSSLTHKSLQKLSSKYGPFLHLRIFSVPIILVSSASVAYEIFKAHDVNVSSRGAAAIDESLLFGSSSFIYAPYGDYWKFMKKIFATKLLRPQVLENSRGVRAEELKRFYRRILDKARKNENIEISKESAMLMNNILCRMSMGRSFSEENGEAERVRGLVGESYALVKKIFFAATLRRLLEKLRIPLFRKEIMGVSDRFDELLERIIVEHKDKLEKEHQVMDMMDVLLAAYRDKNAEYKITRNHIKSFFVDLFVGGTDTSVQTTQWTMAEIINNPNILQTLRKEIDSVVGKSRLIHETDIPNLPYLQAVVKEGLRLHPPGPLLIRTFQERCEMKGFYIPEKTTLVINAYAVMRDPDSWEDPDEFKPERFLSYSRSGQEDEKEQTLKYLSFGGGRRGCPGVNLGYIFVGTAIGMMVQCFDWKIEGDKVNMEETYGGMNLTMVNPLKCTPVPRTQPFSFTSNLEILSS

SEQ ID NO: 96098 - protein, 511 aa, Arabidopsis thaliana
  peptide (1)..(511): Ceres Seq. ID no. 12731783
  misc_feature (1)..(511): Homolog of NCBI NO: 15231047 NR Description: cytochrome P450, putative; protein id: At3g20090.1
  misc_feature (1)..(511): Homolog of NCBI NO: 9294003 NR Description: cytochrome P450-like protein [Arabidopsis
  misc_feature (1)..(493): Homolog of NCBI NO: 15233794 NR Description: cytochrome p450 family; protein id: At4g15360.1
  misc_feature (1)..(502): Homolog of NCBI NO: 15231052 NR Description: cytochrome p450 family; protein id: At3g20130.1
  misc_feature (1)..(500): Homolog of NCBI NO: 15231049 NR Description: cytochrome p450 family; protein id: At3g20100.1, by cDNA: 149380., supported by cDNA: gi_15215771 [Arabidopsis
  misc_feature (1)..(499): Homolog of NCBI NO: 9293969 NR Description: cytochrome P450-like protein [Arabidopsis
  misc_feature (1)..(500): Homolog of NCBI NO: 21553521 NR Description: cytochrome P450, putative [Arabidopsis thaliana]
  misc_feature (4)..(497): Homolog of NCBI NO: 15233774 NR Description: cytochrome p450 family; protein id: At4g15350.1
  misc_feature (1)..(497): Homolog of NCBI NO: 15232418 NR Description: cytochrome P450, putative; protein id: At3g20950.1
  misc_feature (1)..(511): Homolog of NCBI NO: 30685997 NR Description: cytochrome P450 family [Arabidopsis thaliana]
MYIILLCLFSLLCYSLFFRKPKGTRVGCDLPPSPPSLPIIGHLHHLLSSLTHKSLQKLSSKYGPFLHLRIFSVPIILVSSASVAYEIFKAHDVNVSSRGAAAIDESLLFGSSSFIYAPYGDYWKFMKKIFATKLLRPQVLENSRGVRAEELKRFYRRILDKARKNENIEISKESAMLMNNILCRMSMGRSFSEENGEAERVRGLVGESYALVKKIFFAATLRRLLEKLRIPLFRKEIMGVSDRFDELLERIIVEHKDKLEKEHQVMDMMDVLLAAYRDKNAEYKITRNHIKSFFVDLFVGGTDTSVQTTQWTMAEIINNPNILQTLRKEIDSVVGKSRLIHETDIPNLPYLQAVVKEGLRLHPPGPLLIRTFQERCEMKGFYIPEKTTLVINAYAVMRDPDSWEDPDEFKPERFLSYSRSGQEDEKEQTLKYLSFGGGRRGCPGVNLGYIFVGTAIGMMVQCFDWKIEGDKVNMEETYGGMNLTMVNPLKCTPVPRTQPFSFTSNLEILSS

SEQ ID NO: 96099 - protein, 386 aa, Arabidopsis thaliana
  peptide (1)..(386): Ceres Seq. ID no. 12731784
  misc_feature (1)..(386): Homolog of NCBI NO: 15231047 NR Description: cytochrome P450, putative; protein id: At3g20090.1
  misc_feature (1)..(386): Homolog of NCBI NO: 9294003 NR Description: cytochrome P450-like protein [Arabidopsis
  misc_feature (1)..(368): Homolog of NCBI NO: 15233794 NR Description: cytochrome p450 family; protein id: At4g15360.1
  misc_feature (1)..(377): Homolog of NCBI NO: 15231052 NR Description: cytochrome p450 family; protein id: At3g20130.1
  misc_feature (1)..(375): Homolog of NCBI NO: 15231049 NR Description: cytochrome p450 family; protein id: At3g20100.1, by cDNA: 149380., supported by cDNA: gi_15215771 [Arabidopsis
  misc_feature (1)..(374): Homolog of NCBI NO: 9293969 NR Description: cytochrome P450-like protein [Arabidopsis
  misc_feature (1)..(375): Homolog of NCBI NO: 21553521 NR Description: cytochrome P450, putative [Arabidopsis thaliana]
  misc_feature (1)..(372): Homolog of NCBI NO: 15233774 NR Description: cytochrome p450 family; protein id: At4g15350.1
  misc_feature (1)..(372): Homolog of NCBI NO: 15232418 NR Description: cytochrome P450, putative; protein id: At3g20950.1
  misc_feature (1)..(386): Homolog of NCBI NO: 30685997 NR Description: cytochrome P450 family [Arabidopsis thaliana]
MKKIFATKLLRPQVLENSRGVRAEELKRFYRRILDKARKNENIEISKESAMLMNNILCRMSMGRSFSEENGEAERVRGLVGESYALVKKIFFAATLRRLLEKLRIPLFRKEIMGVSDRFDELLERIIVEHKDKLEKEHQVMDMMDVLLAAYRDKNAEYKITRNHIKSFFVDLFVGGTDTSVQTTQWTMAEIINNPNILQTLRKEIDSVVGKSRLIHETDIPNLPYLQAVVKEGLRLHPPGPLLIRTFQERCEMKGFYIPEKTTLVINAYAVMRDPDSWEDPDEFKPERFLSYSRSGQEDEKEQTLKYLSFGGGRRGCPGVNLGYIFVGTAIGMMVQCFDWKIEGDKVNMEETYGGMNLTMVNPLKCTPVPRTQPFSFTSNLEILSS

SEQ ID NO: 96100 - DNA, 1545 bp, Arabidopsis thaliana
  misc_feature (1)..(1545): Ceres Seq. ID no. 12731789
atggcagcaatcatcggtgactgcttcatatttatcctcttatgcctcttctcactccttttctactatctcatcttcaggaaacctaagaactcacggcttgtcgcttatggctgtgatctgcctccgagccctccatctcttccgattataggccatgttcaccttctcctctcttccctagctcataaatctttacagaaactctcatccaagtatggacctcttctctatctccgcgtcttcaacttccctgtagtcctcgtctcctcggcgtctgtggcctacgagatctttaaggctcatgacttgaacatctcatctcgtgacaacccttcaatcgatgattccctcttgattggatcttctgtctttggtagtgctccttatggagattactttaagttcatgaagaagctcctggttactaagctgcttggaccacaggcacttgagcggtcaagaggcatccgtgcagatgagcttgagcggtttcactcaagcctgcttgataaggcggtaaagaaggagatcgttgagattgggaaggaagcaacgaagcttagtaataacagcctctggaggatgagcattgggagaagtttttcagagaagaatggtgaggctgagagagtcaggggactggttactgagttagatggcttgacaaagaaggtcttgtttgcaactttgctgcacaggccccttgagaagcttggaatctctctgttcaaaaaggagatcatgtgtgtttctgacagcttcgatgaggtccttgagagggttcttgtggaacatgaacagaaactggacgatcatcaagatagggacatgatggacgtgttgttggcagcttatggagatgaaaacgcagagcataaaatcagcaggaaccacatcaaagcatttttcgtggagcttttctttgcgggtactgatacctcggcgcaatcaatacagtggacaatggcagagatcattaacaaccccaacattcttaaaagattgagagaagaaatcgattctgtggtagggaaaacaaggttgattcaagaaactgatctaccaaagctcccctatttgcaagctgtggttaaggaaggacttagattgcacccgccattgcctctctttgtaaggacgttccaagaagggtgtaagattggaggtttctatgtaccagaaaagacaacacttattggtaatgcttatgttatgatgagagatccgagtgtctgggaagaccctgaggagtttaaacctgagaggtttctatcttcttcaagatcaacgcaagaagaggaaagaagagagcaagcacttaagtacattcctttcggtagtggacggagaggctgtcctggatcaagtctgggttatatctttgttggcaccgcagttggaatgatggtgcaatgctttgactggagtatcaaaggagacaaggtccaaatggatgaggctggaggactaaacttgagtatggctcattccctgaagtgcactcctgttcctcgaaaccggcctttacttgctgatcagtag

SEQ ID NO: 96101 - protein, 514 aa, Arabidopsis thaliana
  peptide (1)..(514): Ceres Seq. ID no. 12731790
  misc_feature (42)..(501): Pfam Name: Cytochrome P450 Pfam Description: Cytochrome P450
  misc_feature (1)..(514): Homolog of NCBI NO: 9293969 NR Description: cytochrome P450-like protein [Arabidopsis
  misc_feature (137)..(514): Homolog of NCBI NO: 30685634 NR Description: cytochrome P450 family [Arabidopsis thaliana]
  misc_feature (8)..(514): Homolog of NCBI NO: 15231050 NR Description: cytochrome P450, putative; protein id: At3g20110.1
  misc_feature (137)..(514): Homolog of NCBI NO: 26451135 NR Description: putative cytochrome P450 [Arabidopsis thaliana]
  misc_feature (8)..(506): Homolog of NCBI NO: 15231049 NR Description: cytochrome p450 family; protein id: At3g20100.1, by cDNA: 149380., supported by cDNA: gi_15215771 [Arabidopsis
  misc_feature (8)..(509): Homolog of NCBI NO: 15231047 NR Description: cytochrome P450, putative; protein id: At3g20090.1
  misc_feature (8)..(506): Homolog of NCBI NO: 21553521 NR Description: cytochrome P450, putative [Arabidopsis thaliana]
  misc_feature (7)..(510): Homolog of NCBI NO: 15231052 NR Description: cytochrome p450 family; protein id: At3g20130.1
  misc_feature (1)..(511): Homolog of NCBI NO: 9294003 NR Description: cytochrome P450-like protein [Arabidopsis
  misc_feature (7)..(506): Homolog of NCBI NO: 18402480 NR Description: cytochrome P450, putative; protein id: supported by cDNA: 147792. [Arabidopsis thaliana]
MAAIIGDCFIFILLCLFSLLFYYLIFRKPKNSRLVAYGCDLPPSPPSLPIIGHVHLLLSSLAHKSLQKLSSKYGPLLYLRVFNFPVVLVSSASVAYEIFKAHDLNISSRDNPSIDDSLLIGSSVFGSAPYGDYFKFMKKLLVTKLLGPQALERSRGIRADELERFHSSLLDKAVKKEIVEIGKEATKLSNNSLWRMSIGRSFSEKNGEAERVRGLVTELDGLTKKVLFATLLHRPLEKLGISLFKKEIMCVSDSFDEVLERVLVEHEQKLDDHQDRDMMDVLLAAYGDENAEHKISRNHIKAFFVELFFAGTDTSAQSIQWTMAEIINNPNILKRLREEIDSVVGKTRLIQETDLPKLPYLQAVVKEGLRLHPPLPLFVRTFQEGCKIGGFYVPEKTTLIGNAYVMMRDPSVWEDPEEFKPERFLSSSRSTQEEERREQALKYIPFGSGRRGCPGSSLGYIFVGTAVGMMVQCFDWSIKGDKVQMDEAGGLNLSMAHSLKCTPVPRNRPLLADQ

SEQ ID NO: 96102 - protein, 378 aa, Arabidopsis thaliana
  peptide (1)..(378): Ceres Seq. ID no. 12731791
  misc_feature (1)..(365): Pfam Name: Cytochrome P450 Pfam Description: Cytochrome P450
  misc_feature (1)..(378): Homolog of NCBI NO: 9293969 NR Description: cytochrome P450-like protein [Arabidopsis
  misc_feature (1)..(378): Homolog of NCBI NO: 30685634 NR Description: cytochrome P450 family [Arabidopsis thaliana]
  misc_feature (1)..(378): Homolog of NCBI NO: 15231050 NR Description: cytochrome P450, putative; protein id: At3g20110.1
  misc_feature (1)..(378): Homolog of NCBI NO: 26451135 NR Description: putative cytochrome P450 [Arabidopsis thaliana]
  misc_feature (1)..(370): Homolog of NCBI NO: 15231049 NR Description: cytochrome p450 family; protein id: At3g20100.1, by cDNA: 149380., supported by cDNA: gi_15215771 [Arabidopsis
  misc_feature (1)..(373): Homolog of NCBI NO: 15231047 NR Description: cytochrome P450, putative; protein id: At3g20090.1
  misc_feature (1)..(370): Homolog of NCBI NO: 21553521 NR Description: cytochrome P450, putative [Arabidopsis thaliana]
  misc_feature (1)..(374): Homolog of NCBI NO: 15231052 NR Description: cytochrome p450 family; protein id: At3g20130.1
  misc_feature (1)..(375): Homolog of NCBI NO: 9294003 NR Description: cytochrome P450-like protein [Arabidopsis
  misc_feature (1)..(370): Homolog of NCBI NO: 18402480 NR Description: cytochrome P450, putative; protein id: supported by cDNA: 147792. [Arabidopsis thaliana]
MKKLLVTKLLGPQALERSRGIRADELERFHSSLLDKAVKKEIVEIGKEATKLSNNSLWRMSIGRSFSEKNGEAERVRGLVTELDGLTKKVLFATLLHRPLEKLGISLFKKEIMCVSDSFDEVLERVLVEHEQKLDDHQDRDMMDVLLAAYGDENAEHKISRNHIKAFFVELFFAGTDTSAQSIQWTMAEIINNPNILKRLREEIDSVVGKTRLIQETDLPKLPYLQAVVKEGLRLHPPLPLFVRTFQEGCKIGGFYVPEKTTLIGNAYVMMRDPSVWEDPEEFKPERFLSSSRSTQEEERREQALKYIPFGSGRRGCPGSSLGYIFVGTAVGMMVQCFDWSIKGDKVQMDEAGGLNLSMAHSLKCTPVPRNRPLLADQ

SEQ ID NO: 96103 - protein, 319 aa, Arabidopsis thaliana
  peptide (1)..(319): Ceres Seq. ID no. 12731792
  misc_feature (1)..(306): Pfam Name: Cytochrome P450 Pfam Description: Cytochrome P450
  misc_feature (1)..(319): Homolog of NCBI NO: 9293969 NR Description: cytochrome P450-like protein [Arabidopsis
  misc_feature (1)..(319): Homolog of NCBI NO: 30685634 NR Description: cytochrome P450 family [Arabidopsis thaliana]
  misc_feature (1)..(319): Homolog of NCBI NO: 15231050 NR Description: cytochrome P450, putative; protein id: At3g20110.1
  misc_feature (1)..(319): Homolog of NCBI NO: 26451135 NR Description: putative cytochrome P450 [Arabidopsis thaliana]
  misc_feature (1)..(311): Homolog of NCBI NO: 15231049 NR Description: cytochrome p450 family; protein id: At3g20100.1, by cDNA: 149380., supported by cDNA: gi_15215771 [Arabidopsis
  misc_feature (1)..(314): Homolog of NCBI NO: 15231047 NR Description: cytochrome P450, putative; protein id: At3g20090.1
  misc_feature (1)..(311): Homolog of NCBI NO: 21553521 NR Description: cytochrome P450, putative [Arabidopsis thaliana]
  misc_feature (1)..(315): Homolog of NCBI NO: 15231052 NR Description: cytochrome p450 family; protein id: At3g20130.1
  misc_feature (1)..(316): Homolog of NCBI NO: 9294003 NR Description: cytochrome P450-like protein [Arabidopsis
  misc_feature (1)..(311): Homolog of NCBI NO: 18402480 NR Description: cytochrome P450, putative; protein id: supported by cDNA: 147792. [Arabidopsis thaliana]
MSIGRSFSEKNGEAERVRGLVTELDGLTKKVLFATLLHRPLEKLGISLFKKEIMCVSDSFDEVLERVLVEHEQKLDDHQDRDMMDVLLAAYGDENAEHKISRNHIKAFFVELFFAGTDTSAQSIQWTMAEIINNPNILKRLREEIDSVVGKTRLIQETDLPKLPYLQAVVKEGLRLHPPLPLFVRTFQEGCKIGGFYVPEKTTLIGNAYVMMRDPSVWEDPEEFKPERFLSSSRSTQEEERREQALKYIPFGSGRRGCPGSSLGYIFVGTAVGMMVQCFDWSIKGDKVQMDEAGGLNLSMAHSLKCTPVPRNRPLLADQ

SEQ ID NO: 96104 - DNA, 1548 bp, Arabidopsis thaliana
  misc_feature (1)..(1548): Ceres Seq. ID no. 12731793
  misc_feature: MA Experiment ID: 20000180 Result: Up-regulated in Transcription
  misc_feature: MA Experiment 20000180 PARAMETER Experiment Name: At_Germinating_Seeds_P Parameter: Age (hr) Value: 24 vs. 0
  misc_feature: MA Experiment 20000180 PARAMETER Experiment Name: At_Germinating_Seeds_P Parameter: Tissue Value: Germinating Seeds
  misc_feature: MA Experiment ID: 20000185 Result: Up-regulated in Transcription
  misc_feature: MA Experiment 20000185 PARAMETER Experiment Name: At_Roots__P Parameter: Age (day) Value: 7 vs. 21
  misc_feature: MA Experiment 20000185 PARAMETER Experiment Name: At_Roots__P Parameter: Organism Value: A. thaliana
  misc_feature: MA Experiment 20000185 PARAMETER Experiment Name: At_Roots__P Parameter: Tissue Value: Roots vs. Whole Plant
  misc_feature: MA Experiment ID: 20000265 Result: Up-regulated in Transcription
  misc_feature: MA Experiment 20000265 PARAMETER Experiment Name: At_Open_Flower_P Parameter: Age (day) Value: 21
  misc_feature: MA Experiment 20000265 PARAMETER Experiment Name: At_Open_Flower_P Parameter: Plant Line Value: WS
  misc_feature: MA Experiment 20000265 PARAMETER Experiment Name: At_Open_Flower_P Parameter: Tissue Value: Closed Flower vs. Whole Plant
  misc_feature: MA Experiment ID: 20000286 Result: Up-regulated in Transcription
  misc_feature: MA Experiment 20000286 PARAMETER Experiment Name: At_Open_Flower_P Parameter: Age (day) Value: 21
  misc_feature: MA Experiment 20000286 PARAMETER Experiment Name: At_Open_Flower_P Parameter: Plant Line Value: WS
  misc_feature: MA Experiment 20000286 PARAMETER Experiment Name: At_Open_Flower_P Parameter: Tissue Value: Half Open vs. Whole Plant
  misc_feature: MA Experiment ID: 20000439 Result: Up-regulated in Transcription
  misc_feature: MA Experiment 20000439 PARAMETER Experiment Name: At_Roots__P Parameter: Age (day) Value: 14 vs. 21
  misc_feature: MA Experiment 20000439 PARAMETER Experiment Name: At_Roots__P Parameter: Organism Value: A. thaliana
  misc_feature: MA Experiment 20000439 PARAMETER Experiment Name: At_Roots__P Parameter: Tissue Value: Roots vs. Whole Plant
atggaggcagtgatcagctttgactttcagaactgcttcatcttcatcctcatatttctcttaacgttcctatgcttctttttcttcttcaagaaaccaaaggattcacgagttaacttcgatttgcctccgagccctccttctctaccaatcattggtcatgttcaccttctcctctctactctaacccacaagtcattacagaaactctcctccaggtatggacctctcctctatctccggatttttaatgtccccatcatcctcgtttcctcggcctcagtggcctacgagatcttcaggacacaagacgtgaacatctcctctcgcggtgtcaccgcggttgatgagtccctcgtgtttggatcttccagtttcgtcactgctccttacggagattactggaagttcatgaagaagcttactgtcatgaagcttctcggaccgcaggcacaagagcagtcacgagacatccgtgcagatgacataaagcggttttgcaggaatctgctcgataaagcaaggaagaaggagagcgttgagattggtaaagaagcaatgaatctcatgaacaacattttgtgcaagatgagcatgggaaggagtttttcagaggagaatggtgagacagagaaactaaggggattagttaccgagtcgattggcttgatgaaaaagatgttcttggcagttttgttgcgcagacagcttcagaaacttggaatctcactattcaagaaggatatcatgggcgtttccaacaaatttgatgtgctgctagagaaagttcttgtggaacatagagagaaaccggagaaggatcaaggtacggttatgttggacgtgttgttggcagcttatggagacgaaaatgcagagtacaagatcactaagaatcacatcaaggcttttttcgtggaccttttcattggagccactgatacctctgtgcaaacaatacagtggacaatggccgagatcatgaacaatactcacattcttgagagaatgagagaagaaattgattctgtcgtagggaaatcaaggttgattcaagaaacggatttaccgaacctcccttacttgcacgctgtcattaaggaagcactaagactgcacccaccggggcctctcttgccaagggaatttcaacaagggtgtaagatcggagggttctacataccggagaagacaacacttttgattaatgcctatgttgtgatgagagatccgaatgtctgggaagaccctgaggagtttaaaccagagagatttctagcttcttcaaggtcagggcaagaggacgagagaagagagcaagctcttaagtttcttcctttcggcagtggaaggagaggatgtcctggatcaaatctagcttatatgattgtaggaagtgcaataggaatgatggtgcagtgctttgactggagaatcgaaggagagaaggtcaacatgaaagaggctgttaaagggaccatccttaccatggctcatcctcttaagttaactcctgtcactcgacaaccacccttgacttggatatga

SEQ ID NO: 96105 - protein, 515 aa, Arabidopsis thaliana
  peptide (1)..(515): Ceres Seq. ID no. 12731794
  misc_feature (43)..(505): Pfam Name: Cytochrome P450 Pfam Description: Cytochrome P450
  misc_feature (1)..(515): Homolog of NCBI NO: 15231052 NR Description: cytochrome p450 family; protein id: At3g20130.1
  misc_feature (1)..(514): Homolog of NCBI NO: 15231047 NR Description: cytochrome P450, putative; protein id: At3g20090.1
  misc_feature (1)..(511): Homolog of NCBI NO: 9294003 NR Description: cytochrome P450-like protein [Arabidopsis
  misc_feature (11)..(512): Homolog of NCBI NO: 9293969 NR Description: cytochrome P450-like protein [Arabidopsis
  misc_feature (1)..(512): Homolog of NCBI NO: 30685997 NR Description: cytochrome P450 family [Arabidopsis thaliana]
  misc_feature (8)..(510): Homolog of NCBI NO: 15231049 NR Description: cytochrome p450 family; protein id: At3g20100.1, by cDNA: 149380., supported by cDNA: gi_15215771 [Arabidopsis
  misc_feature (14)..(508): Homolog of NCBI NO: 15233774 NR Description: cytochrome p450 family; protein id: At4g15350.1
  misc_feature (8)..(510): Homolog of NCBI NO: 21553521 NR Description: cytochrome P450, putative [Arabidopsis thaliana]
  misc_feature (14)..(508): Homolog of NCBI NO: 7430617 NR Description: cytochrome P450 - Arabidopsis thaliana
  misc_feature (105)..(511): Homolog of NCBI NO: 30686008 NR Description: cytochrome P450 family [Arabidopsis thaliana]
MEAVISFDFQNCFIFILIFLLTFLCFFFFFKKPKDSRVNFDLPPSPPSLPIIGHVHLLLSTLTHKSLQKLSSRYGPLLYLRIFNVPIILVSSASVAYEIFRTQDVNISSRGVTAVDESLVFGSSSFVTAPYGDYWKFMKKLTVMKLLGPQAQEQSRDIRADDIKRFCRNLLDKARKKESVEIGKEAMNLMNNILCKMSMGRSFSEENGETEKLRGLVTESIGLMKKMFLAVLLRRQLQKLGISLFKKDIMGVSNKFDVLLEKVLVEHREKPEKDQGTVMLDVLLAAYGDENAEYKITKNHIKAFFVDLFIGATDTSVQTIQWTMAEIMNNTHILERMREEIDSVVGKSRLIQETDLPNLPYLHAVIKEALRLHPPGPLLPREFQQGCKIGGFYIPEKTTLLINAYVVMRDPNVWEDPEEFKPERFLASSRSGQEDERREQALKFLPFGSGRRGCPGSNLAYMIVGSAIGMMVQCFDWRIEGEKVNMKEAVKGTILTMAHPLKLTPVTRQPPLTWI

SEQ ID NO: 96106 - protein, 378 aa, Arabidopsis thaliana
  peptide (1)..(378): Ceres Seq. ID no. 12731795
  misc_feature (1)..(368): Pfam Name: Cytochrome P450 Pfam Description: Cytochrome P450
  misc_feature (1)..(378): Homolog of NCBI NO: 15231052 NR Description: cytochrome p450 family; protein id: At3g20130.1
  misc_feature (1)..(377): Homolog of NCBI NO: 15231047 NR Description: cytochrome P450, putative; protein id: At3g20090.1
  misc_feature (1)..(374): Homolog of NCBI NO: 9294003 NR Description: cytochrome P450-like protein [Arabidopsis
  misc_feature (1)..(375): Homolog of NCBI NO: 9293969 NR Description: cytochrome P450-like protein [Arabidopsis
  misc_feature (1)..(375): Homolog of NCBI NO: 30685997 NR Description: cytochrome P450 family [Arabidopsis thaliana]
  misc_feature (1)..(373): Homolog of NCBI NO: 15231049 NR Description: cytochrome p450 family; protein id: At3g20100.1, by cDNA: 149380., supported by cDNA: gi_15215771 [Arabidopsis
  misc_feature (1)..(371): Homolog of NCBI NO: 15233774 NR Description: cytochrome p450 family; protein id: At4g15350.1
  misc_feature (1)..(373): Homolog of NCBI NO: 21553521 NR Description: cytochrome P450, putative [Arabidopsis thaliana]
  misc_feature (1)..(371): Homolog of NCBI NO: 7430617 NR Description: cytochrome P450 - Arabidopsis thaliana
  misc_feature (1)..(374): Homolog of NCBI NO: 30686008 NR Description: cytochrome P450 family [Arabidopsis thaliana]
MKKLTVMKLLGPQAQEQSRDIRADDIKRFCRNLLDKARKKESVEIGKEAMNLMNNILCKMSMGRSFSEENGETEKLRGLVTESIGLMKKMFLAVLLRRQLQKLGISLFKKDIMGVSNKFDVLLEKVLVEHREKPEKDQGTVMLDVLLAAYGDENAEYKITKNHIKAFFVDLFIGATDTSVQTIQWTMAEIMNNTHILERMREEIDSVVGKSRLIQETDLPNLPYLHAVIKEALRLHPPGPLLPREFQQGCKIGGFYIPEKTTLLINAYVVMRDPNVWEDPEEFKPERFLASSRSGQEDERREQALKFLPFGSGRRGCPGSNLAYMIVGSAIGMMVQCFDWRIEGEKVNMKEAVKGTILTMAHPLKLTPVTRQPPLTWI

SEQ ID NO: 96107 - protein, 372 aa, Arabidopsis thaliana
  peptide (1)..(372): Ceres Seq. ID no. 12731796
  misc_feature (1)..(362): Pfam Name: Cytochrome P450 Pfam Description: Cytochrome P450
  misc_feature (1)..(372): Homolog of NCBI NO: 15231052 NR Description: cytochrome p450 family; protein id: At3g20130.1
  misc_feature (1)..(371): Homolog of NCBI NO: 15231047 NR Description: cytochrome P450, putative; protein id: At3g20090.1
  misc_feature (1)..(368): Homolog of NCBI NO: 9294003 NR Description: cytochrome P450-like protein [Arabidopsis
  misc_feature (1)..(369): Homolog of NCBI NO: 9293969 NR Description: cytochrome P450-like protein [Arabidopsis
  misc_feature (1)..(369): Homolog of NCBI NO: 30685997 NR Description: cytochrome P450 family [Arabidopsis thaliana]
  misc_feature (1)..(367): Homolog of NCBI NO: 15231049 NR Description: cytochrome p450 family; protein id: At3g20100.1, by cDNA: 149380., supported by cDNA: gi_15215771 [Arabidopsis
  misc_feature (1)..(365): Homolog of NCBI NO: 15233774 NR Description: cytochrome p450 family; protein id: At4g15350.1
  misc_feature (1)..(367): Homolog of NCBI NO: 21553521 NR Description: cytochrome P450, putative [Arabidopsis thaliana]
  misc_feature (1)..(365): Homolog of NCBI NO: 7430617 NR Description: cytochrome P450 - Arabidopsis thaliana
  misc_feature (1)..(368): Homolog of NCBI NO: 30686008 NR Description: cytochrome P450 family [Arabidopsis thaliana]
MKLLGPQAQEQSRDIRADDIKRFCRNLLDKARKKESVEIGKEAMNLMNNILCKMSMGRSFSEENGETEKLRGLVTESIGLMKKMFLAVLLRRQLQKLGISLFKKDIMGVSNKFDVLLEKVLVEHREKPEKDQGTVMLDVLLAAYGDENAEYKITKNHIKAFFVDLFIGATDTSVQTIQWTMAEIMNNTHILERMREEIDSVVGKSRLIQETDLPNLPYLHAVIKEALRLHPPGPLLPREFQQGCKIGGFYIPEKTTLLINAYVVMRDPNVWEDPEEFKPERFLASSRSGQEDERREQALKFLPFGSGRRGCPGSNLAYMIVGSAIGMMVQCFDWRIEGEKVNMKEAVKGTILTMAHPLKLTPVTRQPPLTWI

SEQ ID NO: 96108 - DNA, 2889 bp, Arabidopsis thaliana
  misc_feature (1)..(2889): Ceres Seq. ID no. 12731809
  misc_feature: MA Experiment ID: 20000171 Result: Down-regulated in Transcription
  misc_feature: MA Experiment 20000171 PARAMETER Experiment Name: At_42deg_Heat_P Parameter: Age (day) Value: 14
  misc_feature: MA Experiment 20000171 PARAMETER Experiment Name: At_42deg_Heat_P Parameter: Organism Value: A. thaliana
  misc_feature: MA Experiment 20000171 PARAMETER Experiment Name: At_42deg_Heat_P Parameter: Plant Line Value: WS
  misc_feature: MA Experiment 20000171 PARAMETER Experiment Name: At_42deg_Heat_P Parameter: Temperature (deg C) Value: 42 vs. 22
  misc_feature: MA Experiment 20000171 PARAMETER Experiment Name: At_42deg_Heat_P Parameter: Timepoint (hr) Value: 1
  misc_feature: MA Experiment 20000171 PARAMETER Experiment Name: At_42deg_Heat_P Parameter: Tissue Value: Aerial
  misc_feature: MA Experiment ID: 20000173 Result: Down-regulated in Transcription
  misc_feature: MA Experiment 20000173 PARAMETER Experiment Name: At_42deg_Heat_P Parameter: Age (day) Value: 14
  misc_feature: MA Experiment 20000173 PARAMETER Experiment Name: At_42deg_Heat_P Parameter: Organism Value: A. thaliana
  misc_feature: MA Experiment 20000173 PARAMETER Experiment Name: At_42deg_Heat_P Parameter: Plant Line Value: WS
  misc_feature: MA Experiment 20000173 PARAMETER Experiment Name: At_42deg_Heat_P Parameter: Temperature (deg C) Value: 42 vs. 22
  misc_feature: MA Experiment 20000173 PARAMETER Experiment Name: At_42deg_Heat_P Parameter: Timepoint (hr) Value: 6
  misc_feature: MA Experiment 20000173 PARAMETER Experiment Name: At_42deg_Heat_P Parameter: Tissue Value: Aerial
  misc_feature: MA Experiment ID: 20000182 Result: Up-regulated in Transcription
  misc_feature: MA Experiment 20000182 PARAMETER Experiment Name: At_2mM_SA_P Parameter: Age (day) Value: 14
  misc_feature: MA Experiment 20000182 PARAMETER Experiment Name: At_2mM_SA_P Parameter: Organism Value: A. thaliana
  misc_feature: MA Experiment 20000182 PARAMETER Experiment Name: At_2mM_SA_P Parameter: Plant Line Value: WS
  misc_feature: MA Experiment 20000182 PARAMETER Experiment Name: At_2mM_SA_P Parameter: Timepoint (hr) Value: 6
  misc_feature: MA Experiment 20000182 PARAMETER Experiment Name: At_2mM_SA_P Parameter: Tissue Value: Aerial
  misc_feature: MA Experiment 20000182 PARAMETER Experiment Name: At_2mM_SA_P Parameter: Treatment Value: 2mM SA vs. No Treatment
  misc_feature: MA Experiment ID: 20000184 Result: Down-regulated in Transcription
  misc_feature: MA Experiment 20000184 PARAMETER Experiment Name: At_Shoots__P Parameter: Age (day) Value: 7
  misc_feature: MA Experiment 20000184 PARAMETER Experiment Name: At_Shoots__P Parameter: Tissue Value: Shoots vs. Whole Plant
  misc_feature: MA Experiment ID: 20000234 Result: Down-regulated in Transcription
  misc_feature: MA Experiment 20000234 PARAMETER Experiment Name: At_Siliques_P Parameter: Age (day) Value: 21
  misc_feature: MA Experiment 20000234 PARAMETER Experiment Name: At_Siliques_P Parameter: Organism Value: A. thaliana
  misc_feature: MA Experiment 20000234 PARAMETER Experiment Name: At_Siliques_P Parameter: Plant Line Value: WS
  misc_feature: MA Experiment 20000234 PARAMETER Experiment Name: At_Siliques_P Parameter: Tissue Value: Less Than 5mm Siliques vs. Whole Plant
  misc_feature: MA Experiment ID: 20000235 Result: Down-regulated in Transcription
  misc_feature: MA Experiment 20000235 PARAMETER Experiment Name: At_Siliques_P Parameter: Age (day) Value: 21
  misc_feature: MA Experiment 20000235 PARAMETER Experiment Name: At_Siliques_P Parameter: Organism Value: A. thaliana
  misc_feature: MA Experiment 20000235 PARAMETER Experiment Name: At_Siliques_P Parameter: Plant Line Value: WS
  misc_feature: MA Experiment 20000235 PARAMETER Experiment Name: At_Siliques_P Parameter: Tissue Value: 5-10mm Siliques vs. Whole Plant
  misc_feature: MA Experiment ID: 20000436 Result: Up-regulated in Transcription
  misc_feature: MA Experiment 20000436 PARAMETER Experiment Name: At_Drought_P Parameter: Age (day) Value: 7
  misc_feature: MA Experiment 20000436 PARAMETER Experiment Name: At_Drought_P Parameter: Organism Value: A. thaliana
  misc_feature: MA Experiment 20000436 PARAMETER Experiment Name: At_Drought_P Parameter: Plant Line Value: WS
  misc_feature: MA Experiment 20000436 PARAMETER Experiment Name: At_Drought_P Parameter: Timepoint (hr) Value: 12
  misc_feature: MA Experiment 20000436 PARAMETER Experiment Name: At_Drought_P Parameter: Tissue Value: Whole Plant
  misc_feature: MA Experiment 20000436 PARAMETER Experiment Name: At_Drought_P Parameter: Treatment Value: Drought vs. No Drought
  misc_feature: MA Experiment ID: 20000437 Result: Up-regulated in Transcription
  misc_feature: MA Experiment 20000437 PARAMETER Experiment Name: At_Drought_P Parameter: Age (day) Value: 8
  misc_feature: MA Experiment 20000437 PARAMETER Experiment Name: At_Drought_P Parameter: Organism Value: A. thaliana
  misc_feature: MA Experiment 20000437 PARAMETER Experiment Name: At_Drought_P Parameter: Plant Line Value: WS
  misc_feature: MA Experiment 20000437 PARAMETER Experiment Name: At_Drought_P Parameter: Timepoint (hr) Value: 24
  misc_feature: MA Experiment 20000437 PARAMETER Experiment Name: At_Drought_P Parameter: Tissue Value: Whole Plant
  misc_feature: MA Experiment 20000437 PARAMETER Experiment Name: At_Drought_P Parameter: Treatment Value: Drought vs. No Drought
  misc_feature: MA Experiment ID: 20000438 Result: Down-regulated in Transcription
  misc_feature: MA Experiment 20000438 PARAMETER Experiment Name: At_Shoots__P Parameter: Age (day) Value: 14
  misc_feature: MA Experiment 20000438 PARAMETER Experiment Name: At_Shoots__P Parameter: Tissue Value: Shoots vs. Whole Plant
  misc_feature: MA Experiment ID: 20001558 Result: Down-regulated in Transcription
  misc_feature: MA Experiment 20001558 PARAMETER Experiment Name: At_Drought_Soil_Dry_P Parameter: Age (day) Value: 27
  misc_feature: MA Experiment 20001558 PARAMETER Experiment Name: At_Drought_Soil_Dry_P Parameter: Organism Value: A. thaliana
  misc_feature: MA Experiment 20001558 PARAMETER Experiment Name: At_Drought_Soil_Dry_P Parameter: Plant Line Value: WS
  misc_feature: MA Experiment 20001558 PARAMETER Experiment Name: At_Drought_Soil_Dry_P Parameter: Post Timepoint (hr) Value: 6
  misc_feature: MA Experiment 20001558 PARAMETER Experiment Name: At_Drought_Soil_Dry_P Parameter: Post-Treatment Value: Re-Water vs. No Drought
  misc_feature: MA Experiment 20001558 PARAMETER Experiment Name: At_Drought_Soil_Dry_P Parameter: Timepoint (day) Value: 13
  misc_feature: MA Experiment 20001558 PARAMETER Experiment Name: At_Drought_Soil_Dry_P Parameter: Treatment Value: Drought vs. No Drought
  misc_feature: MA Experiment ID: 20001560 Result: Down-regulated in Transcription
  misc_feature: MA Experiment 20001560 PARAMETER Experiment Name: At_Drought_Soil_Dry_P Parameter: Age (day) Value: 28
  misc_feature: MA Experiment 20001560 PARAMETER Experiment Name: At_Drought_Soil_Dry_P Parameter: Organism Value: A. thaliana
  misc_feature: MA Experiment 20001560 PARAMETER Experiment Name: At_Drought_Soil_Dry_P Parameter: Plant Line Value: WS
  misc_feature: MA Experiment 20001560 PARAMETER Experiment Name: At_Drought_Soil_Dry_P Parameter: Post Timepoint (hr) Value: None
  misc_feature: MA Experiment 20001560 PARAMETER Experiment Name: At_Drought_Soil_Dry_P Parameter: Post-Treatment Value: None
  misc_feature: MA Experiment 20001560 PARAMETER Experiment Name: At_Drought_Soil_Dry_P Parameter: Timepoint (day) Value: 14
  misc_feature: MA Experiment 20001560 PARAMETER Experiment Name: At_Drought_Soil_Dry_P Parameter: Treatment Value: Drought vs. No Drought
  misc_feature: MA Experiment ID: 20001906 Result: Up-regulated in Transcription
  misc_feature: MA Experiment 20001906 PARAMETER Experiment Name: At_Drought_Reproduction_P Parameter: Age (day) Value: 35
  misc_feature: MA Experiment 20001906 PARAMETER Experiment Name: At_Drought_Reproduction_P Parameter: Organism Value: A. thaliana
  misc_feature: MA Experiment 20001906 PARAMETER Experiment Name: At_Drought_Reproduction_P Parameter: Plant Line Value: WS
  misc_feature: MA Experiment 20001906 PARAMETER Experiment Name: At_Drought_Reproduction_P Parameter: Timepoint (day) Value: 5
  misc_feature: MA Experiment 20001906 PARAMETER Experiment Name: At_Drought_Reproduction_P Parameter: Tissue Value: Siliques
  misc_feature: MA Experiment 20001906 PARAMETER Experiment Name: At_Drought_Reproduction_P Parameter: Treatment Value: Drought vs. No Drought
  misc_feature: MA Experiment ID: 20001910 Result: Up-regulated in Transcription
  misc_feature: MA Experiment 20001910 PARAMETER Experiment Name: At_Drought_Reproduction_P Parameter: Age (day) Value: 37
  misc_feature: MA Experiment 20001910 PARAMETER Experiment Name: At_Drought_Reproduction_P Parameter: Organism Value: A. thaliana
  misc_feature: MA Experiment 20001910 PARAMETER Experiment Name: At_Drought_Reproduction_P Parameter: Plant Line Value: WS
  misc_feature: MA Experiment 20001910 PARAMETER Experiment Name: At_Drought_Reproduction_P Parameter: Timepoint (day) Value: 7
  misc_feature: MA Experiment 20001910 PARAMETER Experiment Name: At_Drought_Reproduction_P Parameter: Tissue Value: Flowers
  misc_feature: MA Experiment 20001910 PARAMETER Experiment Name: At_Drought_Reproduction_P Parameter: Treatment Value: Drought vs. No Drought
  misc_feature: MA Experiment ID: 20001911 Result: Up-regulated in Transcription
  misc_feature: MA Experiment 20001911 PARAMETER Experiment Name: At_Drought_Reproduction_P Parameter: Age (day) Value: 40
  misc_feature: MA Experiment 20001911 PARAMETER Experiment Name: At_Drought_Reproduction_P Parameter: Organism Value: A. thaliana
  misc_feature: MA Experiment 20001911 PARAMETER Experiment Name: At_Drought_Reproduction_P Parameter: Plant Line Value: WS
  misc_feature: MA Experiment 20001911 PARAMETER Experiment Name: At_Drought_Reproduction_P Parameter: Timepoint (day) Value: 10
  misc_feature: MA Experiment 20001911 PARAMETER Experiment Name: At_Drought_Reproduction_P Parameter: Tissue Value: Flowers
  misc_feature: MA Experiment 20001911 PARAMETER Experiment Name: At_Drought_Reproduction_P Parameter: Treatment Value: Drought vs. No Drought
atgacgactacgcagagcgctatgagaatggttgagggtgatcatataaaaaattggcaggcttctagtgatagtgggatctttggttcacttgatatggctgttgaagatttaggattccttatgaaaagaaataggttggatagtggtgatcaaaccggtaaattccctagtagaagcgaaagcgcgccgcctagcatggaaggttcctttgcagctcttaggaatctcttgaaacaacaagaaggtagtagctctgaagttttaagtagggctattgagaattatgactcggaagaagagatacgtagtgatcctgcttatgtagcttactatttgtcgaacatcaacttgaatccgagactccctcctccgttaatctcacgggagaatcagcacttgttgcgtcattttggtgataataatcagagtccaacaacttcttgggataatatggggataagatcatctttgcattcttctagaactgctctttcaactcatagagaggagcccgaggatgaggcatcatcgggtgaacaacaatcttatgcttctttggctggtcgtcgtaagagcatagctgatatgattcaggaagatttccctcttacactttcttctgtgttcaagcggcctcattcggcaggaaatcgtccaatagcacaagacatccatgccatttcctctgatacatcttcagaacacgcaagaagattaccggagtccgatataaattcggttaatctgctgagggagacagattctctctccagcgatgctattgctagtgaagatccctttaccactgatttggcctcacaaagttttactaatgcacagacagagagattgaacgcgaggcaagcgagccatgaggacaacaatctatctgtttttggtgcttctcctccatcctctgttgcttcaagaatgaggaggaaccaagaagaccaacaatctcagggaaggagaatgcctccacaatacacaccttcatcgtatcaggttcaagctagttcgccacagcaaatgagctatccgaggataggtggtacacaggacatgatgcagagcttaccaaagattgcaactggcgaggtacattcgactttccaatctcctcacggtttggcaccgcctcctatgtatacatcaacagcagcatatatgacatctctgagtccattttaccatcaaaactttcagtcctcgggtatgttcgtcccgcaatataattatggtggttaccctcctgcttctggtattgtccctcaatatatgagtggatacccatctcatgaagcgactgttcctatgccatatgatatctcatctacttcttcgggctacaacaaccctcggctcctgcctggagtatcatcgagtggacaaaacattccttctcttgtggatccttttcagttgcaatattttcaacaggctcaagtggacgcgtatgctcctccgtttcagagcagcactgattcttttgggcagaaagaccaacaagctgttggctatatggcaaatcatgaacctctcaacagtccattgagtccgggttacgggttgcaaagtccgcggcacatgggaaactattttgcagtgccgcctggtgtaagagtaatgccgcagtatccaggatcacctcttgctagtccggtgatgccatcctcaccggttggtggaatgatgagccactttggaagacgaagtgaaacaaggtatcatcaacaagggccaagtagaaacactgggatctaccctggtggatggcaagggaacagagggggagccagcagcatcgttgatgatctaaaaagacattcttttcttgatgaacttaagtctccaaatgctcggaaactcgagctttctgatattgcagggcgtgttgttgaattcaggcacgtcgatcagcatggcagccggtttattcaacagaagttggagcactgctccgatgaggagaaggcatctgttttcagtgaggttcttccacaagcttcaaaattgatgactgacgtttttggaaattatgtcatccaaaaattcatagaacatggaactccggcacagagagaagaacttgtgaagcaacttgctggtcagatggtttcactaagcttacaaatgtatggatgccgtgtgatacaaaaggcccttgaagtgatagatgttgaccaaaagacagaactaattcgtgagctcgatgggaatgtgctgaagtgtgttagagatcaaaacggaaatcatgttatccaaaaatgtatcgagagtatgcctgctggtaggattggattcgtaattgctgctttccgtggtcaagtcgccactctttctactcatccttatggatgccgagttatccagagaatcttggagcattgctcagatgatgaggagactcattgtataatagatgaaatattggaatctgcgtttgctcttgctcatgatcagtatgggaattatgtcactcagcatgtcctggagagagggaagcccgatgaaaggagacagatcattgagaagttgacagggaatgttgttcagatgagtcagcacaaatacgcatctaacgttgtagagaagtgtttggaacacgctgatagtaccgaaagagagttcctgattgaagagataatgggcaaatccgaggaagacaatcacttgctagcgatgatgaaggatcagtttgcaaattacgtggtccagaaagtcttggagatcagtaaagatcagcaaagggagattctggtgcagaggatgaaaattcatctccaaagtttgcggaaatacacatacgggaaacacatagtagcccgattcgaacaactgtttggtgaagagagtgaagtctcagaagagggaacagaaggttag

SEQ ID NO: 96109 - protein, 962 aa, Arabidopsis thaliana
  peptide (1)..(962): Ceres Seq. ID no. 12731810
  misc_feature (773)..(808): Pfam Name: Pumilio-family RNA binding repeat Pfam Description: Pumilio-family RNA binding repeat
  misc_feature (140)..(929): Homolog of NCBI NO: 8071634 NR Description: pumilio domain-containing protein PPD1 [Populus
  misc_feature (395)..(948): Homolog of NCBI NO: 34908236 NR Description: putative pumilio/Mpt5 family RNA-binding protein
  misc_feature (24)..(280): Homolog of NCBI NO: 34908236 NR Description: putative pumilio/Mpt5 family RNA-binding protein
  misc_feature (398)..(948): Homolog of NCBI NO: 14719326 NR Description: putative pumilio/Mpt5 family RNA-binding protein
  misc_feature (59)..(154): Homolog of NCBI NO: 14719326 NR Description: putative pumilio/Mpt5 family RNA-binding protein
  misc_feature (366)..(948): Homolog of NCBI NO: 15227038 NR Description: pumilio-family RNA-binding protein, putative; id: At2g29140.1 [Arabidopsis thaliana] >gi|25354254|pir||A84693
  misc_feature (20)..(215): Homolog of NCBI NO: 15227038 NR Description: pumilio-family RNA-binding protein, putative; id: At2g29140.1 [Arabidopsis thaliana] >gi|25354254|pir||A84693
  misc_feature (364)..(948): Homolog of NCBI NO: 15227052 NR Description: pumilio-family RNA-binding protein, putative; id: At2g29200.1 [Arabidopsis thaliana] >gi|25354258|pir||F84693
  misc_feature (20)..(201): Homolog of NCBI NO: 15227052 NR Description: pumilio-family RNA-binding protein, putative; id: At2g29200.1 [Arabidopsis thaliana] >gi|25354258|pir||F84693
  misc_feature (398)..(954): Homolog of NCBI NO: 20513851 NR Description: BPM [Hordeum vulgare]
MTTTQSAMRMVEGDHIKNWQASSDSGIFGSLDMAVEDLGFLMKRNRLDSGDQTGKFPSRSESAPPSMEGSFAALRNLLKQQEGSSSEVLSRAIENYDSEEEIRSDPAYVAYYLSNINLNPRLPPPLISRENQHLLRHFGDNNQSPTTSWDNMGIRSSLHSSRTALSTHREEPEDEASSGEQQSYASLAGRRKSIADMIQEDFPLTLSSVFKRPHSAGNRPIAQDIHAISSDTSSEHARRLPESDINSVNLLRETDSLSSDAIASEDPFTTDLASQSFTNAQTERLNARQASHEDNNLSVFGASPPSSVASRMRRNQEDQQSQGRRMPPQYTPSSYQVQASSPQQMSYPRIGGTQDMMQSLPKIATGEVHSTFQSPHGLAPPPMYTSTAAYMTSLSPFYHQNFQSSGMFVPQYNYGGYPPASGIVPQYMSGYPSHEATVPMPYDISSTSSGYNNPRLLPGVSSSGQNIPSLVDPFQLQYFQQAQVDAYAPPFQSSTDSFGQKDQQAVGYMANHEPLNSPLSPGYGLQSPRHMGNYFAVPPGVRVMPQYPGSPLASPVMPSSPVGGMMSHFGRRSETRYHQQGPSRNTGIYPGGWQGNRGGASSIVDDLKRHSFLDELKSPNARKLELSDIAGRVVEFRHVDQHGSRFIQQKLEHCSDEEKASVFSEVLPQASKLMTDVFGNYVIQKFIEHGTPAQREELVKQLAGQMVSLSLQMYGCRVIQKALEVIDVDQKTELIRELDGNVLKCVRDQNGNHVIQKCIESMPAGRIGFVIAAFRGQVATLSTHPYGCRVIQRILEHCSDDEETHCIIDEILESAFALAHDQYGNYVTQHVLERGKPDERRQIIEKLTGNVVQMSQHKYASNVVEKCLEHADSTEREFLIEEIMGKSEEDNHLLAMMKDQFANYVVQKVLEISKDQQREILVQRMKIHLQSLRKYTYGKHIVARFEQLFGEESEVSEEGTEG

SEQ ID NO: 96110 - protein, 955 aa, Arabidopsis thaliana
  peptide (1)..(955): Ceres Seq. ID no. 12731811
  misc_feature (766)..(801): Pfam Name: Pumilio-family RNA binding repeat Pfam Description: Pumilio-family RNA binding repeat
  misc_feature (133)..(922): Homolog of NCBI NO: 8071634 NR Description: pumilio domain-containing protein PPD1 [Populus
  misc_feature (388)..(941): Homolog of NCBI NO: 34908236 NR Description: putative pumilio/Mpt5 family RNA-binding protein
  misc_feature (17)..(273): Homolog of NCBI NO: 34908236 NR Description: putative pumilio/Mpt5 family RNA-binding protein
  misc_feature (391)..(941): Homolog of NCBI NO: 14719326 NR Description: putative pumilio/Mpt5 family RNA-binding protein
  misc_feature (52)..(147): Homolog of NCBI NO: 14719326 NR Description: putative pumilio/Mpt5 family RNA-binding protein
  misc_feature (359)..(941): Homolog of NCBI NO: 15227038 NR Description: pumilio-family RNA-binding protein, putative; id: At2g29140.1 [Arabidopsis thaliana] >gi|25354254|pir||A84693
  misc_feature (13)..(208): Homolog of NCBI NO: 15227038 NR Description: pumilio-family RNA-binding protein, putative; id: At2g29140.1 [Arabidopsis thaliana] >gi|25354254|pir||A84693
  misc_feature (357)..(941): Homolog of NCBI NO: 15227052 NR Description: pumilio-family RNA-binding protein, putative; id: At2g29200.1 [Arabidopsis thaliana] >gi|25354258|pir||F84693
  misc_feature (13)..(194): Homolog of NCBI NO: 15227052 NR Description: pumilio-family RNA-binding protein, putative; id: At2g29200.1 [Arabidopsis thaliana] >gi|25354258|pir||F84693
  misc_feature (391)..(947): Homolog of NCBI NO: 20513851 NR Description: BPM [Hordeum vulgare]
MRMVEGDHIKNWQASSDSGIFGSLDMAVEDLGFLMKRNRLDSGDQTGKFPSRSESAPPSMEGSFAALRNLLKQQEGSSSEVLSRAIENYDSEEEIRSDPAYVAYYLSNINLNPRLPPPLISRENQHLLRHFGDNNQSPTTSWDNMGIRSSLHSSRTALSTHREEPEDEASSGEQQSYASLAGRRKSIADMIQEDFPLTLSSVFKRPHSAGNRPIAQDIHAISSDTSSEHARRLPESDINSVNLLRETDSLSSDAIASEDPFTTDLASQSFTNAQTERLNARQASHEDNNLSVFGASPPSSVASRMRRNQEDQQSQGRRMPPQYTPSSYQVQASSPQQMSYPRIGGTQDMMQSLPKIATGEVHSTFQSPHGLAPPPMYTSTAAYMTSLSPFYHQNFQSSGMFVPQYNYGGYPPASGIVPQYMSGYPSHEATVPMPYDISSTSSGYNNPRLLPGVSSSGQNIPSLVDPFQLQYFQQAQVDAYAPPFQSSTDSFGQKDQQAVGYMANHEPLNSPLSPGYGLQSPRHMGNYFAVPPGVRVMPQYPGSPLASPVMPSSPVGGMMSHFGRRSETRYHQQGPSRNTGIYPGGWQGNRGGASSIVDDLKRHSFLDELKSPNARKLELSDIAGRVVEFRHVDQHGSRFIQQKLEHCSDEEKASVFSEVLPQASKLMTDVFGNYVIQKFIEHGTPAQREELVKQLAGQMVSLSLQMYGCRVIQKALEVIDVDQKTELIRELDGNVLKCVRDQNGNHVIQKCIESMPAGRIGFVIAAFRGQVATLSTHPYGCRVIQRILEHCSDDEETHCIIDEILESAFALAHDQYGNYVTQHVLERGKPDERRQIIEKLTGNVVQMSQHKYASNVVEKCLEHADSTEREFLIEEIMGKSEEDNHLLAMMKDQFANYVVQKVLEISKDQQREILVQRMKIHLQSLRKYTYGKHIVARFEQLFGEESEVSEEGTEG

SEQ ID NO: 96111 - protein, 953 aa, Arabidopsis thaliana
  peptide (1)..(953): Ceres Seq. ID no. 12731812
  misc_feature (764)..(799): Pfam Name: Pumilio-family RNA binding repeat Pfam Description: Pumilio-family RNA binding repeat
  misc_feature (131)..(920): Homolog of NCBI NO: 8071634 NR Description: pumilio domain-containing protein PPD1 [Populus
  misc_feature (386)..(939): Homolog of NCBI NO: 34908236 NR Description: putative pumilio/Mpt5 family RNA-binding protein
  misc_feature (15)..(271): Homolog of NCBI NO: 34908236 NR Description: putative pumilio/Mpt5 family RNA-binding protein
  misc_feature (389)..(939): Homolog of NCBI NO: 14719326 NR Description: putative pumilio/Mpt5 family RNA-binding protein
  misc_feature (50)..(145): Homolog of NCBI NO: 14719326 NR Description: putative pumilio/Mpt5 family RNA-binding protein
  misc_feature (357)..(939): Homolog of NCBI NO: 15227038 NR Description: pumilio-family RNA-binding protein, putative; id: At2g29140.1 [Arabidopsis thaliana] >gi|25354254|pir||A84693
  misc_feature (11)..(206): Homolog of NCBI NO: 15227038 NR Description: pumilio-family RNA-binding protein, putative; id: At2g29140.1 [Arabidopsis thaliana] >gi|25354254|pir||A84693
  misc_feature (355)..(939): Homolog of NCBI NO: 15227052 NR Description: pumilio-family RNA-binding protein, putative; id: At2g29200.1 [Arabidopsis thaliana] >gi|25354258|pir||F84693
  misc_feature (11)..(192): Homolog of NCBI NO: 15227052 NR Description: pumilio-family RNA-binding protein, putative; id: At2g29200.1 [Arabidopsis thaliana] >gi|25354258|pir||F84693
  misc_feature (389)..(945): Homolog of NCBI NO: 20513851 NR Description: BPM [Hordeum vulgare]
MVEGDHIKNWQASSDSGIFGSLDMAVEDLGFLMKRNRLDSGDQTGKFPSRSESAPPSMEGSFAALRNLLKQQEGSSSEVLSRAIENYDSEEEIRSDPAYVAYYLSNINLNPRLPPPLISRENQHLLRHFGDNNQSPTTSWDNMGIRSSLHSSRTALSTHREEPEDEASSGEQQSYASLAGRRKSIADMIQEDFPLTLSSVFKRPHSAGNRPIAQDIHAISSDTSSEHARRLPESDINSVNLLRETDSLSSDAIASEDPFTTDLASQSFTNAQTERLNARQASHEDNNLSVFGASPPSSVASRMRRNQEDQQSQGRRMPPQYTPSSYQVQASSPQQMSYPRIGGTQDMMQSLPKIATGEVHSTFQSPHGLAPPPMYTSTAAYMTSLSPFYHQNFQSSGMFVPQYNYGGYPPASGIVPQYMSGYPSHEATVPMPYDISSTSSGYNNPRLLPGVSSSGQNIPSLVDPFQLQYFQQAQVDAYAPPFQSSTDSFGQKDQQAVGYMANHEPLNSPLSPGYGLQSPRHMGNYFAVPPGVRVMPQYPGSPLASPVMPSSPVGGMMSHFGRRSETRYHQQGPSRNTGIYPGGWQGNRGGASSIVDDLKRHSFLDELKSPNARKLELSDIAGRVVEFRHVDQHGSRFIQQKLEHCSDEEKASVFSEVLPQASKLMTDVFGNYVIQKFIEHGTPAQREELVKQLAGQMVSLSLQMYGCRVIQKALEVIDVDQKTELIRELDGNVLKCVRDQNGNHVIQKCIESMPAGRIGFVIAAFRGQVATLSTHPYGCRVIQRILEHCSDDEETHCIIDEILESAFALAHDQYGNYVTQHVLERGKPDERRQIIEKLTGNVVQMSQHKYASNVVEKCLEHADSTEREFLIEEIMGKSEEDNHLLAMMKDQFANYVVQKVLEISKDQQREILVQRMKIHLQSLRKYTYGKHIVARFEQLFGEESEVSEEGTEG

SEQ ID NO: 96112 - DNA, 2110 bp, Arabidopsis thaliana
  misc_feature (1)..(2110): Ceres Seq. ID no. 12731845
  misc_feature: MA Experiment ID: 20000184 Result: Down-regulated in Transcription
  misc_feature: MA Experiment 20000184 PARAMETER Experiment Name: At_Shoots__P Parameter: Age (day) Value: 7
  misc_feature: MA Experiment 20000184 PARAMETER Experiment Name: At_Shoots__P Parameter: Tissue Value: Shoots vs. Whole Plant
  misc_feature: MA Experiment ID: 20000264 Result: Down-regulated in Transcription
  misc_feature: MA Experiment 20000264 PARAMETER Experiment Name: At_Open_Flower_P Parameter: Age (day) Value: 21
  misc_feature: MA Experiment 20000264 PARAMETER Experiment Name: At_Open_Flower_P Parameter: Plant Line Value: WS
  misc_feature: MA Experiment 20000264 PARAMETER Experiment Name: At_Open_Flower_P Parameter: Tissue Value: Open Flower vs. Whole Plant
  misc_feature: MA Experiment ID: 20000265 Result: Down-regulated in Transcription
  misc_feature: MA Experiment 20000265 PARAMETER Experiment Name: At_Open_Flower_P Parameter: Age (day) Value: 21
  misc_feature: MA Experiment 20000265 PARAMETER Experiment Name: At_Open_Flower_P Parameter: Plant Line Value: WS
  misc_feature: MA Experiment 20000265 PARAMETER Experiment Name: At_Open_Flower_P Parameter: Tissue Value: Closed Flower vs. Whole Plant
  misc_feature: MA Experiment ID: 20000286 Result: Down-regulated in Transcription
  misc_feature: MA Experiment 20000286 PARAMETER Experiment Name: At_Open_Flower_P Parameter: Age (day) Value: 21
  misc_feature: MA Experiment 20000286 PARAMETER Experiment Name: At_Open_Flower_P Parameter: Plant Line Value: WS
  misc_feature: MA Experiment 20000286 PARAMETER Experiment Name: At_Open_Flower_P Parameter: Tissue Value: Half Open vs. Whole Plant
  misc_feature: MA Experiment ID: 20000438 Result: Down-regulated in Transcription
  misc_feature: MA Experiment 20000438 PARAMETER Experiment Name: At_Shoots__P Parameter: Age (day) Value: 14
  misc_feature: MA Experiment 20000438 PARAMETER Experiment Name: At_Shoots__P Parameter: Tissue Value: Shoots vs. Whole Plant
  misc_feature: MA Experiment ID: 20001248 Result: Up-regulated in Transcription
  misc_feature: MA Experiment 20001248 PARAMETER Experiment Name: At_Far-red-induction_P Parameter: Age (day) Value: 7
  misc_feature: MA Experiment 20001248 PARAMETER Experiment Name: At_Far-red-induction_P Parameter: Light Value: Far-red vs. White
  misc_feature: MA Experiment 20001248 PARAMETER Experiment Name: At_Far-red-induction_P Parameter: Organism Value: A. thaliana
  misc_feature: MA Experiment 20001248 PARAMETER Experiment Name: At_Far-red-induction_P Parameter: Plant Line Value: Columbia
  misc_feature: MA Experiment 20001248 PARAMETER Experiment Name: At_Far-red-induction_P Parameter: Timepoint (hr) Value: 4
  misc_feature: MA Experiment 20001248 PARAMETER Experiment Name: At_Far-red-induction_P Parameter: Tissue Value: Whole Plant
attataatccctcaacaattttaaaaaaagatcctgactttcaattttctctcttgtttcttcttttgatcatcttcaacaaaaaaaagttacgatctttctctccgggtcatcggaatttgagctagcttagctaaagttccgatctttcctctctgggtcgtcggaatttgagctttttaaaatcatgggaaattgttttgccaagaaccatggattgatgaagccacagcaaaatggtaataccactagatcagttgaagtaggagtaaccaaccaagatccaccgtcgtatactccacaagcgagaaccactcagcagccggagaaaccaggttccgtgaatagtcaaccaccaccgtggagggcggcggctgcagcaccaggactaagtcccaagaccaccactaagagcaattcaatactagagaacgctttcgaagacgtgaagctcttttacacattgggtaaagagctaggtcgtggtcaatttggggtaacgtatctgtgcacagagaattccacggggaagaagtacgcttgcaaatcgatctcgaagaagaagctggtgactaaagctgataaggatgatatgaggagagagattcagataatgcagcatttgagtgggcagcctaatattgtggagtttaaaggagcttatgaggatgagaaagctgtgaatttggtgatggagctttgtgctggtggtgaattgtttgatagaatcattgctaagggacattacactgagagagctgctgcttctgtttgtagacagattgtgaatgttgtcaagatttgtcatttcatgggtgtgttgcatagagacttgaagcctgagaatttcttgctctctagcaaagatgagaaggctttgatcaaggctactgatttcggattgtctgtctttattgaagagggaaaagtatatagagatattgttgggagtgcatactatgttgctccagaagtcttacgtcgcagatatgggaaagaagttgatatctggagtgctggaatcatcttatacattctactcagcggtgtgcccccgttttgggctgagactgagaaaggaatatttgatgctatattggaaggccatatcgactttgagagccaaccatggccgtcaatctccagcagtgccaaagatttggtacgtagaatgttgactgcggatccaaaaaggcggatttctgctgctgatgttcttcagcatccatggcttagagaaggtggagaagcatcagacaagccaattgacagtgctgttctctcaaggatgaaacaatttagagcaatgaataagctaaagaaacttgctttaaaggtcatagcggagaatattgacacggaagaaatccaaggattgaaggcaatgtttgctaacatagacactgacaacagtggcacaatcacttatgaagaactgaaagaaggattagccaaattgggatctaaactcacagaggcagaagtgaaacagctcatggatgctgctgatgttgatgggaacgggtccatcgactacatagagtttattacagcaacaatgcataggcacaggcttgaaagtaatgagaatctttacaaagctttccagcattttgacaaagacagcagcggatacattacaatagacgaactggaatctgcattgaaggaatatggaatgggagatgatgcaacaatcaaagaggttttgtcagatgtcgactccgataacgatggtagaatcaactatgaagagttctgcgcaatgatgagaagtggaaatccacaacaacaacaacctcggctgttctagtggacattgttgctggattaaaagtctttttgtttgtatctaatccagaaaaatcaggagctgaattaatgtttgttcagacaaaaaccacgtaaagaggaagatactcaaaactctgattgcttgtgttttgtattttgttcttcacttcttctgttttgtcctttgtgttctgtactcaggctgttgtgatatgagagaaagagaggtttcatttttaccgttaagattttgatcctgactgtgttaacattttacctcagttcctccacttttaatgtgattctccattccatc

SEQ ID NO: 96113 - protein, 541 aa, Arabidopsis thaliana
  peptide (1)..(541): Ceres Seq. ID no. 12731846
  misc_feature (91)..(349): Pfam Name: Protein kinase domain Pfam Description: Protein kinase domain
  misc_feature (1)..(541): Homolog of NCBI NO: 15231140 NR Description: calmodulin-domain protein kinase CDPK isoform 9; id: At3g20410.1, supported by cDNA: gi_1399264 [Arabidopsis
  misc_feature (42)..(541): Homolog of NCBI NO: 15223629 NR Description: calcium-dependent protein kinase; protein id:
MGNCFAKNHGLMKPQQNGNTTRSVEVGVTNQDPPSYTPQARTTQQPEKPGSVNSQPPPWRAAAAAPGLSPKTTTKSNSILENAFEDVKLFYTLGKELGRGQFGVTYLCTENSTGKKYACKSISKKKLVTKADKDDMRREIQIMQHLSGQPNIVEFKGAYEDEKAVNLVMELCAGGELFDRIIAKGHYTERAAASVCRQIVNVVKICHFMGVLHRDLKPENFLLSSKDEKALIKATDFGLSVFIEEGKVYRDIVGSAYYVAPEVLRRRYGKEVDIWSAGIILYILLSGVPPFWAETEKGIFDAILEGHIDFESQPWPSISSSAKDLVRRMLTADPKRRISAADVLQHPWLREGGEASDKPIDSAVLSRMKQFRAMNKLKKLALKVIAENIDTEEIQGLKAMFANIDTDNSGTITYEELKEGLAKLGSKLTEAEVKQLMDAADVDGNGSIDYIEFITATMHRHRLESNENLYKAFQHFDKDSSGYITIDELESALKEYGMGDDATIKEVLSDVDSDNDGRINYEEFCAMMRSGNPQQQQPRLF

SEQ ID NO: 96114 - protein, 530 aa, Arabidopsis thaliana
  peptide (1)..(530): Ceres Seq. ID no. 12731847
  misc_feature (80)..(338): Pfam Name: Protein kinase domain Pfam Description: Protein kinase domain
  misc_feature (1)..(530): Homolog of NCBI NO: 15231140 NR Description: calmodulin-domain protein kinase CDPK isoform 9; id: At3g20410.1, supported by cDNA: gi_1399264 [Arabidopsis
  misc_feature (31)..(530): Homolog of NCBI NO: 15223629 NR Description: calcium-dependent protein kinase; protein id:
MKPQQNGNTTRSVEVGVTNQDPPSYTPQARTTQQPEKPGSVNSQPPPWRAAAAAPGLSPKTTTKSNSILENAFEDVKLFYTLGKELGRGQFGVTYLCTENSTGKKYACKSISKKKLVTKADKDDMRREIQIMQHLSGQPNIVEFKGAYEDEKAVNLVMELCAGGELFDRIIAKGHYTERAAASVCRQIVNVVKICHFMGVLHRDLKPENFLLSSKDEKALIKATDFGLSVFIEEGKVYRDIVGSAYYVAPEVLRRRYGKEVDIWSAGIILYILLSGVPPFWAETEKGIFDAILEGHIDFESQPWPSISSSAKDLVRRMLTADPKRRISAADVLQHPWLREGGEASDKPIDSAVLSRMKQFRAMNKLKKLALKVIAENIDTEEIQGLKAMFANIDTDNSGTITYEELKEGLAKLGSKLTEAEVKQLMDAADVDGNGSIDYIEFITATMHRHRLESNENLYKAFQHFDKDSSGYITIDELESALKEYGMGDDATIKEVLSDVDSDNDGRINYEEFCAMMRSGNPQQQQPRLF

SEQ ID NO: 96115 - protein, 406 aa, Arabidopsis thaliana
  peptide (1)..(406): Ceres Seq. ID no. 12731848
  misc_feature (1)..(214): Pfam Name: Protein kinase domain Pfam Description: Protein kinase domain
  misc_feature (1)..(406): Homolog of NCBI NO: 15231140 NR Description: calmodulin-domain protein kinase CDPK isoform 9; id: At3g20410.1, supported by cDNA: gi_1399264 [Arabidopsis
  misc_feature (1)..(406): Homolog of NCBI NO: 15223629 NR Description: calcium-dependent protein kinase; protein id:
MRREIQIMQHLSGQPNIVEFKGAYEDEKAVNLVMELCAGGELFDRIIAKGHYTERAAASVCRQIVNVVKICHFMGVLHRDLKPENFLLSSKDEKALIKATDFGLSVFIEEGKVYRDIVGSAYYVAPEVLRRRYGKEVDIWSAGIILYILLSGVPPFWAETEKGIFDAILEGHIDFESQPWPSISSSAKDLVRRMLTADPKRRISAADVLQHPWLREGGEASDKPIDSAVLSRMKQFRAMNKLKKLALKVIAENIDTEEIQGLKAMFANIDTDNSGTITYEELKEGLAKLGSKLTEAEVKQLMDAADVDGNGSIDYIEFITATMHRHRLESNENLYKAFQHFDKDSSGYITIDELESALKEYGMGDDATIKEVLSDVDSDNDGRINYEEFCAMMRSGNPQQQQPRLF

SEQ ID NO: 96116 - DNA, 721 bp, Arabidopsis thaliana
  misc_feature (1)..(721): Ceres Seq. ID no. 12731853
  misc_feature: MA Experiment ID: 20000185 Result: Down-regulated in Transcription
  misc_feature: MA Experiment 20000185 PARAMETER Experiment Name: At_Roots__P Parameter: Age (day) Value: 7 vs. 21
  misc_feature: MA Experiment 20000185 PARAMETER Experiment Name: At_Roots__P Parameter: Organism Value: A. thaliana
  misc_feature: MA Experiment 20000185 PARAMETER Experiment Name: At_Roots__P Parameter: Tissue Value: Roots vs. Whole Plant
  misc_feature: MA Experiment ID: 20000269 Result: Up-regulated in Transcription
  misc_feature: MA Experiment 20000269 PARAMETER Experiment Name: At_1mM_KNO3_L-vs-H_Roots_P Parameter: Age (day) Value: 7,10,12
  misc_feature: MA Experiment 20000269 PARAMETER Experiment Name: At_1mM_KNO3_L-vs-H_Roots_P Parameter: Organism Value: A. thaliana
  misc_feature: MA Experiment 20000269 PARAMETER Experiment Name: At_1mM_KNO3_L-vs-H_Roots_P Parameter: Plant Line Value: WS
  misc_feature: MA Experiment 20000269 PARAMETER Experiment Name: At_1mM_KNO3_L-vs-H_Roots_P Parameter: Timepoint (day) Value: 7,10,12
  misc_feature: MA Experiment 20000269 PARAMETER Experiment Name: At_1mM_KNO3_L-vs-H_Roots_P Parameter: Tissue Value: Roots
  misc_feature: MA Experiment 20000269 PARAMETER Experiment Name: At_1mM_KNO3_L-vs-H_Roots_P Parameter: Treatment Value: 1mM KNO3 vs. 50mM KNO3
  misc_feature: MA Experiment ID: 20000439 Result: Down-regulated in Transcription
  misc_feature: MA Experiment 20000439 PARAMETER Experiment Name: At_Roots__P Parameter: Age (day) Value: 14 vs. 21
  misc_feature: MA Experiment 20000439 PARAMETER Experiment Name: At_Roots__P Parameter: Organism Value: A. thaliana
  misc_feature: MA Experiment 20000439 PARAMETER Experiment Name: At_Roots__P Parameter: Tissue Value: Roots vs. Whole Plant
  misc_feature: MA Experiment ID: 20000441 Result: Down-regulated in Transcription
  misc_feature: MA Experiment 20000441 PARAMETER Experiment Name: At_1uM_BR-BRZ__P Parameter: Tissue Value: Shoot Apices
  misc_feature: MA Experiment 20000441 PARAMETER Experiment Name: At_1uM_BR-BRZ__P Parameter: Treatment Value: 1uM BR vs. No Treatment
  misc_feature: MA Experiment ID: 20000451 Result: Up-regulated in Transcription
  misc_feature: MA Experiment 20000451 PARAMETER Experiment Name: At_CS6879_Shoots-Roots_P Parameter: Age (day) Value: 14
  misc_feature: MA Experiment 20000451 PARAMETER Experiment Name: At_CS6879_Shoots-Roots_P Parameter: Organism Value: A. thaliana
  misc_feature: MA Experiment 20000451 PARAMETER Experiment Name: At_CS6879_Shoots-Roots_P Parameter: Plant Line Value: CS6879 vs. WS
  misc_feature: MA Experiment 20000451 PARAMETER Experiment Name: At_CS6879_Shoots-Roots_P Parameter: Tissue Value: Roots
  misc_feature: MA Experiment ID: 20000455 Result: Up-regulated in Transcription
  misc_feature: MA Experiment 20000455 PARAMETER Experiment Name: At_100uM_ABA_P Parameter: Age (day) Value: 16
  misc_feature: MA Experiment 20000455 PARAMETER Experiment Name: At_100uM_ABA_P Parameter: Organism Value: A. thaliana
  misc_feature: MA Experiment 20000455 PARAMETER Experiment Name: At_100uM_ABA_P Parameter: Plant Line Value: WS
  misc_feature: MA Experiment 20000455 PARAMETER Experiment Name: At_100uM_ABA_P Parameter: Timepoint (hr) Value: 48
  misc_feature: MA Experiment 20000455 PARAMETER Experiment Name: At_100uM_ABA_P Parameter: Tissue Value: Aerial
  misc_feature: MA Experiment 20000455 PARAMETER Experiment Name: At_100uM_ABA_P Parameter: Treatment Value: 100uM ABA vs. No Treatment
  misc_feature: MA Experiment ID: 20000460 Result: Up-regulated in Transcription
  misc_feature: MA Experiment 20000460 PARAMETER Experiment Name: At_10percent_PEG_P Parameter: Age (day) Value: 12
  misc_feature: MA Experiment 20000460 PARAMETER Experiment Name: At_10percent_PEG_P Parameter: Organism Value: A. thaliana
  misc_feature: MA Experiment 20000460 PARAMETER Experiment Name: At_10percent_PEG_P Parameter: Plant Line Value: WS
  misc_feature: MA Experiment 20000460 PARAMETER Experiment Name: At_10percent_PEG_P Parameter: Timepoint (day) Value: 12
  misc_feature: MA Experiment 20000460 PARAMETER Experiment Name: At_10percent_PEG_P Parameter: Tissue Value: Whole Plant
  misc_feature: MA Experiment 20000460 PARAMETER Experiment Name: At_10percent_PEG_P Parameter: Treatment Value: 10percent PEG vs. No Treatment
  misc_feature: MA Experiment ID: 20000794 Result: Down-regulated in Transcription
  misc_feature: MA Experiment 20000794 PARAMETER Experiment Name: At_Petals_P Parameter: Age (day) Value: 23-25 days
  misc_feature: MA Experiment 20000794 PARAMETER Experiment Name: At_Petals_P Parameter: Plant Line Value: WS
  misc_feature: MA Experiment 20000794 PARAMETER Experiment Name: At_Petals_P Parameter: Tissue Value: Petals vs. Whole plant
  misc_feature: MA Experiment ID: 20001451 Result: Up-regulated in Transcription
  misc_feature: MA Experiment 20001451 PARAMETER Experiment Name: At_Far-red-induction_P Parameter: Age (day) Value: 7
  misc_feature: MA Experiment 20001451 PARAMETER Experiment Name: At_Far-red-induction_P Parameter: Light Value: Far-red vs. White
  misc_feature: MA Experiment 20001451 PARAMETER Experiment Name: At_Far-red-induction_P Parameter: Organism Value: A. thaliana
  misc_feature: MA Experiment 20001451 PARAMETER Experiment Name: At_Far-red-induction_P Parameter: Plant Line Value: Columbia
  misc_feature: MA Experiment 20001451 PARAMETER Experiment Name: At_Far-red-induction_P Parameter: Timepoint (hr) Value: 24
  misc_feature: MA Experiment 20001451 PARAMETER Experiment Name: At_Far-red-induction_P Parameter: Tissue Value: Whole Plant
  misc_feature: MA Experiment ID: 20001556 Result: Down-regulated in Transcription
  misc_feature: MA Experiment 20001556 PARAMETER Experiment Name: At_Drought_Soil_Dry_P Parameter: Age (day) Value: 26
  misc_feature: MA Experiment 20001556 PARAMETER Experiment Name: At_Drought_Soil_Dry_P Parameter: Organism Value: A. thaliana
  misc_feature: MA Experiment 20001556 PARAMETER Experiment Name: At_Drought_Soil_Dry_P Parameter: Plant Line Value: WS
  misc_feature: MA Experiment 20001556 PARAMETER Experiment Name: At_Drought_Soil_Dry_P Parameter: Post Timepoint (hr) Value: None
  misc_feature: MA Experiment 20001556 PARAMETER Experiment Name: At_Drought_Soil_Dry_P Parameter: Post-Treatment Value: None
  misc_feature: MA Experiment 20001556 PARAMETER Experiment Name: At_Drought_Soil_Dry_P Parameter: Timepoint (day) Value: 12
  misc_feature: MA Experiment 20001556 PARAMETER Experiment Name: At_Drought_Soil_Dry_P Parameter: Treatment Value: Drought vs. No Drought
  misc_feature: MA Experiment ID: 20001757 Result: Up-regulated in Transcription
  misc_feature: MA Experiment 20001757 PARAMETER Experiment Name: At_50mM_NH4NO3_L-to-H_P Parameter: Timepoint (hr) Value: 6
  misc_feature: MA Experiment 20001757 PARAMETER Experiment Name: At_50mM_NH4NO3_L-to-H_P Parameter: Tissue Value: Leaf
  misc_feature: MA Experiment 20001757 PARAMETER Experiment Name: At_50mM_NH4NO3_L-to-H_P Parameter: Treatment Value: 50mM NH4NO3 vs 100mM Mannitol
  misc_feature: MA Experiment ID: 20001904 Result: Up-regulated in Transcription
  misc_feature: MA Experiment 20001904 PARAMETER Experiment Name: At_Drought_Reproduction_P Parameter: Age (day) Value: 37
  misc_feature: MA Experiment 20001904 PARAMETER Experiment Name: At_Drought_Reproduction_P Parameter: Organism Value: A. thaliana
  misc_feature: MA Experiment 20001904 PARAMETER Experiment Name: At_Drought_Reproduction_P Parameter: Plant Line Value: WS
  misc_feature: MA Experiment 20001904 PARAMETER Experiment Name: At_Drought_Reproduction_P Parameter: Timepoint (day) Value: 7
  misc_feature: MA Experiment 20001904 PARAMETER Experiment Name: At_Drought_Reproduction_P Parameter: Tissue Value: Rosettes
  misc_feature: MA Experiment 20001904 PARAMETER Experiment Name: At_Drought_Reproduction_P Parameter: Treatment Value: Drought vs. No Drought
  misc_feature: MA Experiment ID: 20001905 Result: Down-regulated in Transcription
  misc_feature: MA Experiment 20001905 PARAMETER Experiment Name: At_Drought_Reproduction_P Parameter: Age (day) Value: 40
  misc_feature: MA Experiment 20001905 PARAMETER Experiment Name: At_Drought_Reproduction_P Parameter: Organism Value: A. thaliana
  misc_feature: MA Experiment 20001905 PARAMETER Experiment Name: At_Drought_Reproduction_P Parameter: Plant Line Value: WS
  misc_feature: MA Experiment 20001905 PARAMETER Experiment Name: At_Drought_Reproduction_P Parameter: Timepoint (day) Value: 10
  misc_feature: MA Experiment 20001905 PARAMETER Experiment Name: At_Drought_Reproduction_P Parameter: Tissue Value: Rosettes
  misc_feature: MA Experiment 20001905 PARAMETER Experiment Name: At_Drought_Reproduction_P Parameter: Treatment Value: Drought vs. No Drought
atcatcacatacgcaaaacacaaaaatcgacatggcttccaagtcactctttcttgttgccttacttgtcggctcttttgctttcacttcatttgccagtgtcgctaacaggaagctgaagagtggtctcgaggaccaaaagacattcttccaccatccaggcggaggtctcggtggaggaggcggtattggtggaggcagtggtcttggtggaggaggcggctttggtggaggaggcggtcttggcggaggagctggaggcggtggcggtttaggaggaggagctggtggtggagctggaggaggatttggtggaggagctgggagcggtggtggtcttggtgggggtggtggtgctggtggaggatttggcggtggggctggtggtggttcaggtggagggtttggaggaggagctggtgctgggggtggactcggaggaggaggtggagctggtggcggtggtgggtttggaggaggaggcggaagcggtattggtggtggtttcggtgggggagccggtgccggaggtggtttcggtggtggacatcattgatgagaagctataagatcttgacgttaaaccatggaatggaatgcatggcaatgggttttacgtaccaaagtcttatgaaaaaagattaatatattattcatctaaagtgattcggtccatgattttgtgttattatcggcctttgaggaaataaatgaatgaatt

SEQ ID NO: 96117 - protein, 184 aa, Arabidopsis thaliana
  peptide (1)..(184): Ceres Seq. ID no. 12731854
  misc_feature (58)..(183): Pfam Name: Herpesvirus latent membrane protein 1 (LMP1) Pfam Description: Herpesvirus latent membrane protein 1 (LMP1)
  misc_feature (11)..(184): Homolog of NCBI NO: 15231146 NR Description: glycine-rich protein, putative; protein id: supported by cDNA: gi_15010655, supported by cDNA: gi_16323289 thaliana] >gi|9294567|dbj|BAB02830.1|
  misc_feature (12)..(184): Homolog of NCBI NO: 81627 NR Description: glycine-rich protein 5 - Arabidopsis thaliana
  misc_feature (54)..(182): Homolog of NCBI NO: 34898126 NR Description: putative glycine-rich cell wall protein precursor
  misc_feature (54)..(182): Homolog of NCBI NO: 121627 NR Description: GLYCINE-RICH CELL WALL STRUCTURAL PROTEIN 1
  misc_feature (54)..(184): Homolog of NCBI NO: 15225728 NR Description: unknown protein; protein id: At2g32690.1
  misc_feature (54)..(182): Homolog of NCBI NO: 34898126 NR Description: putative glycine-rich cell wall protein precursor
  misc_feature (54)..(183): Homolog of NCBI NO: 7636182 NR Description: glycine-rich protein [Triticum aestivum]
  misc_feature (54)..(183): Homolog of NCBI NO: 15225728 NR Description: unknown protein; protein id: At2g32690.1
  misc_feature (54)..(183): Homolog of NCBI NO: 81623 NR Description: glycine-rich protein 1 - Arabidopsis thaliana
  misc_feature (54)..(182): Homolog of NCBI NO: 34898126 NR Description: putative glycine-rich cell wall protein precursor
SSHTQNTKIDMASKSLFLVALLVGSFAFTSFASVANRKLKSGLEDQKTFFHHPGGGLGGGGGIGGGSGLGGGGGFGGGGGLGGGAGGGGGLGGGAGGGAGGGFGGGAGSGGGLGGGGGAGGGFGGGAGGGSGGGFGGGAGAGGGLGGGGGAGGGGGFGGGGGSGIGGGFGGGAGAGGGFGGGHH

SEQ ID NO: 96118 - protein, 174 aa, Arabidopsis thaliana
  peptide (1)..(174): Ceres Seq. ID no. 12731855
  misc_feature (48)..(173): Pfam Name: Herpesvirus latent membrane protein 1 (LMP1) Pfam Description: Herpesvirus latent membrane protein 1 (LMP1)
  misc_feature (1)..(174): Homolog of NCBI NO: 15231146 NR Description: glycine-rich protein, putative; protein id: supported by cDNA: gi_15010655, supported by cDNA: gi_16323289 thaliana] >gi|9294567|dbj|BAB02830.1|
  misc_feature (2)..(174): Homolog of NCBI NO: 81627 NR Description: glycine-rich protein 5 - Arabidopsis thaliana
  misc_feature (44)..(172): Homolog of NCBI NO: 34898126 NR Description: putative glycine-rich cell wall protein precursor
  misc_feature (44)..(172): Homolog of NCBI NO: 121627 NR Description: GLYCINE-RICH CELL WALL STRUCTURAL PROTEIN 1
  misc_feature (44)..(174): Homolog of NCBI NO: 15225728 NR Description: unknown protein; protein id: At2g32690.1
  misc_feature (44)..(172): Homolog of NCBI NO: 34898126 NR Description: putative glycine-rich cell wall protein precursor
  misc_feature (44)..(173): Homolog of NCBI NO: 7636182 NR Description: glycine-rich protein [Triticum aestivum]
  misc_feature (44)..(173): Homolog of NCBI NO: 15225728 NR Description: unknown protein; protein id: At2g32690.1
  misc_feature (44)..(173): Homolog of NCBI NO: 81623 NR Description: glycine-rich protein 1 - Arabidopsis thaliana
  misc_feature (44)..(172): Homolog of NCBI NO: 34898126 NR Description: putative glycine-rich cell wall protein precursor
MASKSLFLVALLVGSFAFTSFASVANRKLKSGLEDQKTFFHHPGGGLGGGGGIGGGSGLGGGGGFGGGGGLGGGAGGGGGLGGGAGGGAGGGFGGGAGSGGGLGGGGGAGGGFGGGAGGGSGGGFGGGAGAGGGLGGGGGAGGGGGFGGGGGSGIGGGFGGGAGAGGGFGGGHH

SEQ ID NO: 96119 - DNA, 1581 bp, Arabidopsis thaliana
  misc_feature (1)..(1581): Ceres Seq. ID no. 12731901
atggcagcaatgatcactgttgactttcaaaatagcttcatcttcatcctcttttgtctcttctctctcatttgttactctctcttcttcaggaaaccaaaagattcacgagctggtcgtgatcttcctccgagccctccttcttttccggttggaagcccacagtctaataatcttcaccttcttctctctgctcttgttcacaagtcttttcaaaaaatctcctacaagtatggacctctcctccatctccgtgtctttcatgttcccatagtcctagcctcctcggcctcagtggcctacgaaattttcaaggcccaagatgtgaatgtctcctctcgcggtcacgctccagccggggagtctctcttgtttggatcttctagcttcttcttcgctccctatggagattactttaaatttatgaggaagctcatagccacaaagcttcttggaccgcaggcactcgagcgttcaagaaaaatccgtgcagatgagctagatcggttttacagaaatctgcttgacaaggcgatgaagaaggagagtgtcgatatcgttgaggaagcagcgaagcttaataacaatatcatctgcaagatgatcatggggaggagttgttctgaggacaacggtgaggcggagagagtcagaggcttggtgattgagtctacggccttgacaaagcaaatcttcttgggtatgatctttgataaaccgcttaagaagcttgggatctcattgttccaaaaggatataaaaagtgtttcccgcttcgacgagctgctggagaagattcttgttgaacacgaagagagaatggggaagcattataaagctaatgacatgatggatttgttgttggaagcttatggagatgaaaatgcagagtataaaatcacaagaaaccatatcaagtccttgttcgtggatcttgtcattgccggcactgacacctcggcgcaaacaatagagtggacaatggcggagcttattaacaaccctaacattcttgagagattgagagaagaaatagaatcggttgtagggaacacaaggttagttcaagaaaccgatctaccaaacctcccttacttgcaagcggtagtcaaagaagggctaaggttgcatccgccaggggctgtgttcttaagaacgttccaagaaaggtgtgaactcaaagggttctacataccggaaaagacattgcttgttgttaatgtttatgctataatgagagatcctaagctttgggaagatcctgaggagtttaaacctgagaggtttatagcatcttcaagatcagggcaagaggacgagataagagaggaagtcctgaaatacatgcctttctcaactggaaggagaggctgtcctggatccaatctagcttatgtctctgtaggaaccgcgattggagtaatggcgcaatgctttgattggagaatcaaaggagagaaagtaaacatgaacgaggctgctggaacattggtgttgactatggctcagcctcttatgtgcactcctggtcctcgaaccctaaaccctttaccttcaagtctgcatgtacccatttcttga

SEQ ID NO: 96120 - protein, 526 aa, Arabidopsis thaliana
  peptide (1)..(526): Ceres Seq. ID no. 12731902
  misc_feature (1)..(526): Homolog of NCBI NO: 15232418 NR Description: cytochrome P450, putative; protein id: At3g20950.1
  misc_feature (1)..(526): Homolog of NCBI NO: 30685997 NR Description: cytochrome P450 family [Arabidopsis thaliana]
  misc_feature (14)..(518): Homolog of NCBI NO: 15233774 NR Description: cytochrome p450 family; protein id: At4g15350.1
  misc_feature (14)..(518): Homolog of NCBI NO: 7430617 NR Description: cytochrome P450 - Arabidopsis thaliana
  misc_feature (1)..(515): Homolog of NCBI NO: 15238866 NR Description: cytochrome p450 family; protein id: At5g47990.1 thaliana] >gi|10177750|dbj|BAB11063.1| cytochrome P450
  misc_feature (1)..(513): Homolog of NCBI NO: 15231047 NR Description: cytochrome P450, putative; protein id: At3g20090.1
  misc_feature (1)..(526): Homolog of NCBI NO: 9294003 NR Description: cytochrome P450-like protein [Arabidopsis
  misc_feature (4)..(516): Homolog of NCBI NO: 15231049 NR Description: cytochrome p450 family; protein id: At3g20100.1, by cDNA: 149380., supported by cDNA: gi_15215771 [Arabidopsis
  misc_feature (4)..(516): Homolog of NCBI NO: 21553521 NR Description: cytochrome P450, putative [Arabidopsis thaliana]
  misc_feature (1)..(517): Homolog of NCBI NO: 9293969 NR Description: cytochrome P450-like protein [Arabidopsis
MAAMITVDFQNSFIFILFCLFSLICYSLFFRKPKDSRAGRDLPPSPPSFPVGSPQSNNLHLLLSALVHKSFQKISYKYGPLLHLRVFHVPIVLASSASVAYEIFKAQDVNVSSRGHAPAGESLLFGSSSFFFAPYGDYFKFMRKLIATKLLGPQALERSRKIRADELDRFYRNLLDKAMKKESVDIVEEAAKLNNNIICKMIMGRSCSEDNGEAERVRGLVIESTALTKQIFLGMIFDKPLKKLGISLFQKDIKSVSRFDELLEKILVEHEERMGKHYKANDMMDLLLEAYGDENAEYKITRNHIKSLFVDLVIAGTDTSAQTIEWTMAELINNPNILERLREEIESVVGNTRLVQETDLPNLPYLQAVVKEGLRLHPPGAVFLRTFQERCELKGFYIPEKTLLVVNVYAIMRDPKLWEDPEEFKPERFIASSRSGQEDEIREEVLKYMPFSTGRRGCPGSNLAYVSVGTAIGVMAQCFDWRIKGEKVNMNEAAGTLVLTMAQPLMCTPGPRTLNPLPSSLHVPIS

SEQ ID NO: 96121 - protein, 523 aa, Arabidopsis thaliana
  peptide (1)..(523): Ceres Seq. ID no. 12731903
  misc_feature (1)..(523): Homolog of NCBI NO: 15232418 NR Description: cytochrome P450, putative; protein id: At3g20950.1
  misc_feature (1)..(523): Homolog of NCBI NO: 30685997 NR Description: cytochrome P450 family [Arabidopsis thaliana]
  misc_feature (11)..(515): Homolog of NCBI NO: 15233774 NR Description: cytochrome p450 family; protein id: At4g15350.1
  misc_feature (11)..(515): Homolog of NCBI NO: 7430617 NR Description: cytochrome P450 - Arabidopsis thaliana
  misc_feature (1)..(512): Homolog of NCBI NO: 15238866 NR Description: cytochrome p450 family; protein id: At5g47990.1 thaliana] >gi|10177750|dbj|BAB11063.1| cytochrome P450
  misc_feature (1)..(510): Homolog of NCBI NO: 15231047 NR Description: cytochrome P450, putative; protein id: At3g20090.1
  misc_feature (1)..(523): Homolog of NCBI NO: 9294003 NR Description: cytochrome P450-like protein [Arabidopsis
  misc_feature (1)..(513): Homolog of NCBI NO: 15231049 NR Description: cytochrome p450 family; protein id: At3g20100.1, by cDNA: 149380., supported by cDNA: gi_15215771 [Arabidopsis
  misc_feature (1)..(513): Homolog of NCBI NO: 21553521 NR Description: cytochrome P450, putative [Arabidopsis thaliana]
  misc_feature (1)..(514): Homolog of NCBI NO: 9293969 NR Description: cytochrome P450-like protein [Arabidopsis
MITVDFQNSFIFILFCLFSLICYSLFFRKPKDSRAGRDLPPSPPSFPVGSPQSNNLHLLLSALVHKSFQKISYKYGPLLHLRVFHVPIVLASSASVAYEIFKAQDVNVSSRGHAPAGESLLFGSSSFFFAPYGDYFKFMRKLIATKLLGPQALERSRKIRADELDRFYRNLLDKAMKKESVDIVEEAAKLNNNIICKMIMGRSCSEDNGEAERVRGLVIESTALTKQIFLGMIFDKPLKKLGISLFQKDIKSVSRFDELLEKILVEHEERMGKHYKANDMMDLLLEAYGDENAEYKITRNHIKSLFVDLVIAGTDTSAQTIEWTMAELINNPNILERLREEIESVVGNTRLVQETDLPNLPYLQAVVKEGLRLHPPGAVFLRTFQERCELKGFYIPEKTLLVVNVYAIMRDPKLWEDPEEFKPERFIASSRSGQEDEIREEVLKYMPFSTGRRGCPGSNLAYVSVGTAIGVMAQCFDWRIKGEKVNMNEAAGTLVLTMAQPLMCTPGPRTLNPLPSSLHVPIS

SEQ ID NO: 96122 - protein, 385 aa, Arabidopsis thaliana
  peptide (1)..(385): Ceres Seq. ID no. 12731904
  misc_feature (1)..(385): Homolog of NCBI NO: 15232418 NR Description: cytochrome P450, putative; protein id: At3g20950.1
  misc_feature (1)..(385): Homolog of NCBI NO: 30685997 NR Description: cytochrome P450 family [Arabidopsis thaliana]
  misc_feature (1)..(377): Homolog of NCBI NO: 15233774 NR Description: cytochrome p450 family; protein id: At4g15350.1
  misc_feature (1)..(377): Homolog of NCBI NO: 7430617 NR Description: cytochrome P450 - Arabidopsis thaliana
  misc_feature (1)..(374): Homolog of NCBI NO: 15238866 NR Description: cytochrome p450 family; protein id: At5g47990.1 thaliana] >gi|10177750|dbj|BAB11063.1| cytochrome P450
  misc_feature (1)..(372): Homolog of NCBI NO: 15231047 NR Description: cytochrome P450, putative; protein id: At3g20090.1
  misc_feature (1)..(385): Homolog of NCBI NO: 9294003 NR Description: cytochrome P450-like protein [Arabidopsis
  misc_feature (1)..(375): Homolog of NCBI NO: 15231049 NR Description: cytochrome p450 family; protein id: At3g20100.1, by cDNA: 149380., supported by cDNA: gi_15215771 [Arabidopsis
  misc_feature (1)..(375): Homolog of NCBI NO: 21553521 NR Description: cytochrome P450, putative [Arabidopsis thaliana]
  misc_feature (1)..(376): Homolog of NCBI NO: 9293969 NR Description: cytochrome P450-like protein [Arabidopsis
MRKLIATKLLGPQALERSRKIRADELDRFYRNLLDKAMKKESVDIVEEAAKLNNNIICKMIMGRSCSEDNGEAERVRGLVIESTALTKQIFLGMIFDKPLKKLGISLFQKDIKSVSRFDELLEKILVEHEERMGKHYKANDMMDLLLEAYGDENAEYKITRNHIKSLFVDLVIAGTDTSAQTIEWTMAELINNPNILERLREEIESVVGNTRLVQETDLPNLPYLQAVVKEGLRLHPPGAVFLRTFQERCELKGFYIPEKTLLVVNVYAIMRDPKLWEDPEEFKPERFIASSRSGQEDEIREEVLKYMPFSTGRRGCPGSNLAYVSVGTAIGVMAQCFDWRIKGEKVNMNEAAGTLVLTMAQPLMCTPGPRTLNPLPSSLHVPIS

SEQ ID NO: 96123 - DNA, 2369 bp, Arabidopsis thaliana
  misc_feature (1)..(2369): Ceres Seq. ID no. 12731913
  misc_feature: MA Experiment ID: 20001557 Result: Up-regulated in Transcription
  misc_feature: MA Experiment 20001557 PARAMETER Experiment Name: At_Drought_Soil_Dry_P Parameter: Age (day) Value: 27
  misc_feature: MA Experiment 20001557 PARAMETER Experiment Name: At_Drought_Soil_Dry_P Parameter: Organism Value: A. thaliana
  misc_feature: MA Experiment 20001557 PARAMETER Experiment Name: At_Drought_Soil_Dry_P Parameter: Plant Line Value: WS
  misc_feature: MA Experiment 20001557 PARAMETER Experiment Name: At_Drought_Soil_Dry_P Parameter: Post Timepoint (hr) Value: 3
  misc_feature: MA Experiment 20001557 PARAMETER Experiment Name: At_Drought_Soil_Dry_P Parameter: Post-Treatment Value: Re-Water vs. No Drought
  misc_feature: MA Experiment 20001557 PARAMETER Experiment Name: At_Drought_Soil_Dry_P Parameter: Timepoint (day) Value: 13
  misc_feature: MA Experiment 20001557 PARAMETER Experiment Name: At_Drought_Soil_Dry_P Parameter: Treatment Value: Drought vs. No Drought
gagagatttgtgtttggtgttaaaaatcgcatgaatgctggaaatggaaagagttgctgagctcaagagacttcctagtaaaggtcctgtctctggtcacttatcaagaagaccatacttagactttgaaactagagatgccccgggtatgcatttggagagtttgagggaacgagctgctcgatacaacacgggaagatctgtgaatccaactacgacattggggagagaactaagccaagttctgaatgtgcatagggaagatatgatgatgactcagtttggtggtaacatgaatgattttcaggagtttgagcctgttgtatcgtctgttagaacgatgaaggccaagtatcctttgttggagattgaagaaattggagctgctgatgatgatgttacttgtaagggaagcaatgatatgtctgaggaagctggttctagctccttccgtggagttagtcatcctccagagcctgacgatatggatctaataacaactgtttatgtgcccatcagcgagaaaaacaaacctgattcggtttgcttgatgaagagcatgtctactactaaaggaccctttatcgaggatatttcgctctgtgtgcctccaaagaagccaagcccgagagtactttcacctgcagaaagcatagttgaggaacctgctacatcgctgtccccgttctctgtggctcgtgcatcgcagaacactgaaaactctctgctaccaccagattcagacaaagaatgtgtttgggatgcttctctgcctcccagtaccaatgtgagcccacatagcagtagtgttgaaagtatgaatttggctcgggctatgagtattgctaatagctcttctgcaacaagtactactcagcggagcgatgttgtgcttagtatggacaagaactactttgacaggagtatcagtatggttttggattcgtttgaaagcaccaagaccagtgcaagcagagcaagtgatagtagcggcctaagcgaagagagcagctggagcaatttcacgggaagccttaataagccacacaaagggaatgatccttggtggaatgctatcttggctatccgaacccgagatgggattttgggaatgagccacttcaagttgctgaaacgattaggttgtggtgatattgggagtgtctatctggctgaattaagcggaactcgatgccattttgctgtgaaagtcatggataaagcgtctcttgaggaccggaagaagttgaatcgagctcagaccgagagggatattctacaactattggatcatccgtttctaccgacattgtacactcattttgagactgacagattctcgtgtttggtcatggaatactgtcctggaggtgatctgcacactctaaggcaacgtcaacccgggaagcatttctcggagtacgctgctcgattttacgctgcagaggtgttgctagcactagagtatctccacatgctcggtgttgtttacagagacttgaagcctgagaatgttctggttcgagatgatggtcacataatgctttcagactttgatctctccttgaggtgcgcggtttcgccaacactgatcaaaacattcgactccgatccatctagacgaggcgcattctgcgttcaacctgcttgtatggagcctacatcagcttgcatcattcaaccctcatgcttcttaccgcgcagcatcttccctaacaaaaacaaaaaaaacaagtcccgtaaaacccaggcggatttcttcaaatcacactctggttctctcccagagctagtagctgaacctaacacacggtccatgtcctttgttggaacccacgagtacttagctccagagatcatcaaaggagaaggacatggaagcgcagtggattggtggacttttggtatctttgtgcatgagctcctatatgggaaaaccccgtttaaaggatcaggaaatcgagctactctgttcaatgtagtcggcgaacagttgaaattccccgagtcaccagcaactagctatgcaggcagggacttgatacaggctttactggtgaaagatccaaagaacaggttagggacaaagagaggagcaacggagataaagcagcatccattctttgaaggtgtgaattgggcattgataaggtgtagcactccacctgaagtaccgagacagatggagaccgaaccgccaccaaagtatggaccgattgatccggttgggtttggtagtaatagcaaaaggatgatgggaccaccagcagtatcagcagcagcagcagacacgaaatctggtggtaaatttctagactttgagtttttctaaagcttccaagatttggttccgtagtagccatttttag

SEQ ID NO: 96124 - protein, 765 aa, Arabidopsis thaliana
  peptide (1)..(765): Ceres Seq. ID no. 12731914
  misc_feature (363)..(697): Pfam Name: Protein kinase domain Pfam Description: Protein kinase domain
  misc_feature (459)..(765): Homolog of NCBI NO: 14140137 NR Description: putative protein kinase [Oryza sativa]
  misc_feature (127)..(394): Homolog of NCBI NO: 14140137 NR Description: putative protein kinase [Oryza sativa]
  misc_feature (176)..(765): Homolog of NCBI NO: 15238798 NR Description: protein kinase (EC 2.7.1.37) 5 (pir||JN0505); id: At5g47750.1, supported by cDNA: gi_15809918, supported by gi_17064849, supported by cDNA: gi_20259909 [Arabidopsis
  misc_feature (176)..(765): Homolog of NCBI NO: 17064850 NR Description: protein kinase 5 [Arabidopsis thaliana]
  misc_feature (246)..(765): Homolog of NCBI NO: 7446383 NR Description: probable protein kinase PK1 - potato
  misc_feature (310)..(760): Homolog of NCBI NO: 1346057 NR Description: Protein kinase G11A >gi|100705|pir||B30311
  misc_feature (271)..(721): Homolog of NCBI NO: 125568 NR Description: Protein kinase PVPK-1 >gi|100013|pir||A30311
  misc_feature (304)..(723): Homolog of NCBI NO: 15236802 NR Description: putative protein kinase; protein id: At4g26610.1, by cDNA: gi_17380933, supported by cDNA: gi_20258942 [Arabidopsis >gi|7488161|pir||T08927 probable protein kinase T15N24.60
  misc_feature (307)..(765): Homolog of NCBI NO: 7446457 NR Description: hypothetical protein YUP8H12R.15 - Arabidopsis >gi|3152560|gb|AAC17041.1| Strong similarity to ser/thr protein especially gb|X97980 from solanum berthaultii, gb|X90990
  misc_feature (307)..(714): Homolog of NCBI NO: 15227639 NR Description: putative protein kinase; protein id: At2g36350.1
MLEMERVAELKRLPSKGPVSGHLSRRPYLDFETRDAPGMHLESLRERAARYNTGRSVNPTTTLGRELSQVLNVHREDMMMTQFGGNMNDFQEFEPVVSSVRTMKAKYPLLEIEEIGAADDDVTCKGSNDMSEEAGSSSFRGVSHPPEPDDMDLITTVYVPISEKNKPDSVCLMKSMSTTKGPFIEDISLCVPPKKPSPRVLSPAESIVEEPATSLSPFSVARASQNTENSLLPPDSDKECVWDASLPPSTNVSPHSSSVESMNLARAMSIANSSSATSTTQRSDVVLSMDKNYFDRSISMVLDSFESTKTSASRASDSSGLSEESSWSNFTGSLNKPHKGNDPWWNAILAIRTRDGILGMSHFKLLKRLGCGDIGSVYLAELSGTRCHFAVKVMDKASLEDRKKLNRAQTERDILQLLDHPFLPTLYTHFETDRFSCLVMEYCPGGDLHTLRQRQPGKHFSEYAARFYAAEVLLALEYLHMLGVVYRDLKPENVLVRDDGHIMLSDFDLSLRCAVSPTLIKTFDSDPSRRGAFCVQPACMEPTSACIIQPSCFLPRSIFPNKNKKNKSRKTQADFFKSHSGSLPELVAEPNTRSMSFVGTHEYLAPEIIKGEGHGSAVDWWTFGIFVHELLYGKTPFKGSGNRATLFNVVGEQLKFPESPATSYAGRDLIQALLVKDPKNRLGTKRGATEIKQHPFFEGVNWALIRCSTPPEVPRQMETEPPPKYGPIDPVGFGSNSKRMMGPPAVSAAAADTKSGGKFLDFEFF

SEQ ID NO: 96125 - protein, 762 aa, Arabidopsis thaliana
  peptide (1)..(762): Ceres Seq. ID no. 12731915
  misc_feature (360)..(694): Pfam Name: Protein kinase domain Pfam Description: Protein kinase domain
  misc_feature (456)..(762): Homolog of NCBI NO: 14140137 NR Description: putative protein kinase [Oryza sativa]
  misc_feature (124)..(391): Homolog of NCBI NO: 14140137 NR Description: putative protein kinase [Oryza sativa]
  misc_feature (173)..(762): Homolog of NCBI NO: 15238798 NR Description: protein kinase (EC 2.7.1.37) 5 (pir||JN0505); id: At5g47750.1, supported by cDNA: gi_15809918, supported by gi_17064849, supported by cDNA: gi_20259909 [Arabidopsis
  misc_feature (173)..(762): Homolog of NCBI NO: 17064850 NR Description: protein kinase 5 [Arabidopsis thaliana]
  misc_feature (243)..(762): Homolog of NCBI NO: 7446383 NR Description: probable protein kinase PK1 - potato
  misc_feature (307)..(757): Homolog of NCBI NO: 1346057 NR Description: Protein kinase G11A >gi|100705|pir||B30311
  misc_feature (268)..(718): Homolog of NCBI NO: 125568 NR Description: Protein kinase PVPK-1 >gi|100013|pir||A30311
  misc_feature (301)..(720): Homolog of NCBI NO: 15236802 NR Description: putative protein kinase; protein id: At4g26610.1, by cDNA: gi_17380933, supported by cDNA: gi_20258942 [Arabidopsis >gi|7488161|pir||T08927 probable protein kinase T15N24.60
  misc_feature (304)..(762): Homolog of NCBI NO: 7446457 NR Description: hypothetical protein YUP8H12R.15 - Arabidopsis >gi|3152560|gb|AAC17041.1| Strong similarity to ser/thr protein especially gb|X97980 from solanum berthaultii, gb|X90990
  misc_feature (304)..(711): Homolog of NCBI NO: 15227639 NR Description: putative protein kinase; protein id: At2g36350.1
MERVAELKRLPSKGPVSGHLSRRPYLDFETRDAPGMHLESLRERAARYNTGRSVNPTTTLGRELSQVLNVHREDMMMTQFGGNMNDFQEFEPVVSSVRTMKAKYPLLEIEEIGAADDDVTCKGSNDMSEEAGSSSFRGVSHPPEPDDMDLITTVYVPISEKNKPDSVCLMKSMSTTKGPFIEDISLCVPPKKPSPRVLSPAESIVEEPATSLSPFSVARASQNTENSLLPPDSDKECVWDASLPPSTNVSPHSSSVESMNLARAMSIANSSSATSTTQRSDVVLSMDKNYFDRSISMVLDSFESTKTSASRASDSSGLSEESSWSNFTGSLNKPHKGNDPWWNAILAIRTRDGILGMSHFKLLKRLGCGDIGSVYLAELSGTRCHFAVKVMDKASLEDRKKLNRAQTERDILQLLDHPFLPTLYTHFETDRFSCLVMEYCPGGDLHTLRQRQPGKHFSEYAARFYAAEVLLALEYLHMLGVVYRDLKPENVLVRDDGHIMLSDFDLSLRCAVSPTLIKTFDSDPSRRGAFCVQPACMEPTSACIIQPSCFLPRSIFPNKNKKNKSRKTQADFFKSHSGSLPELVAEPNTRSMSFVGTHEYLAPEIIKGEGHGSAVDWWTFGIFVHELLYGKTPFKGSGNRATLFNVVGEQLKFPESPATSYAGRDLIQALLVKDPKNRLGTKRGATEIKQHPFFEGVNWALIRCSTPPEVPRQMETEPPPKYGPIDPVGFGSNSKRMMGPPAVSAAAADTKSGGKFLDFEFF

SEQ ID NO: 96126 - protein, 727 aa, Arabidopsis thaliana
  peptide (1)..(727): Ceres Seq. ID no. 12731916
  misc_feature (325)..(659): Pfam Name: Protein kinase domain Pfam Description: Protein kinase domain
  misc_feature (421)..(727): Homolog of NCBI NO: 14140137 NR Description: putative protein kinase [Oryza sativa]
  misc_feature (89)..(356): Homolog of NCBI NO: 14140137 NR Description: putative protein kinase [Oryza sativa]
  misc_feature (138)..(727): Homolog of NCBI NO: 15238798 NR Description: protein kinase (EC 2.7.1.37) 5 (pir||JN0505); id: At5g47750.1, supported by cDNA: gi_15809918, supported by gi_17064849, supported by cDNA: gi_20259909 [Arabidopsis
  misc_feature (138)..(727): Homolog of NCBI NO: 17064850 NR Description: protein kinase 5 [Arabidopsis thaliana]
  misc_feature (208)..(727): Homolog of NCBI NO: 7446383 NR Description: probable protein kinase PK1 - potato
  misc_feature (272)..(722): Homolog of NCBI NO: 1346057 NR Description: Protein kinase G11A >gi|100705|pir||B30311
  misc_feature (233)..(683): Homolog of NCBI NO: 125568 NR Description: Protein kinase PVPK-1 >gi|100013|pir||A30311
  misc_feature (266)..(685): Homolog of NCBI NO: 15236802 NR Description: putative protein kinase; protein id: At4g26610.1, by cDNA: gi_17380933, supported by cDNA: gi_20258942 [Arabidopsis >gi|7488161|pir||T08927 probable protein kinase T15N24.60
  misc_feature (269)..(727): Homolog of NCBI NO: 7446457 NR Description: hypothetical protein YUP8H12R.15 - Arabidopsis >gi|3152560|gb|AAC17041.1| Strong similarity to ser/thr protein especially gb|X97980 from solanum berthaultii, gb|X90990
  misc_feature (269)..(676): Homolog of NCBI NO: 15227639 NR Description: putative protein kinase; protein id: At2g36350.1
MHLESLRERAARYNTGRSVNPTTTLGRELSQVLNVHREDMMMTQFGGNMNDFQEFEPVVSSVRTMKAKYPLLEIEEIGAADDDVTCKGSNDMSEEAGSSSFRGVSHPPEPDDMDLITTVYVPISEKNKPDSVCLMKSMSTTKGPFIEDISLCVPPKKPSPRVLSPAESIVEEPATSLSPFSVARASQNTENSLLPPDSDKECVWDASLPPSTNVSPHSSSVESMNLARAMSIANSSSATSTTQRSDVVLSMDKNYFDRSISMVLDSFESTKTSASRASDSSGLSEESSWSNFTGSLNKPHKGNDPWWNAILAIRTRDGILGMSHFKLLKRLGCGDIGSVYLAELSGTRCHFAVKVMDKASLEDRKKLNRAQTERDILQLLDHPFLPTLYTHFETDRFSCLVMEYCPGGDLHTLRQRQPGKHFSEYAARFYAAEVLLALEYLHMLGVVYRDLKPENVLVRDDGHIMLSDFDLSLRCAVSPTLIKTFDSDPSRRGAFCVQPACMEPTSACIIQPSCFLPRSIFPNKNKKNKSRKTQADFFKSHSGSLPELVAEPNTRSMSFVGTHEYLAPEIIKGEGHGSAVDWWTFGIFVHELLYGKTPFKGSGNRATLFNVVGEQLKFPESPATSYAGRDLIQALLVKDPKNRLGTKRGATEIKQHPFFEGVNWALIRCSTPPEVPRQMETEPPPKYGPIDPVGFGSNSKRMMGPPAVSAAAADTKSGGKFLDFEFF

SEQ ID NO: 96127 - DNA, 957 bp, Arabidopsis thaliana
  misc_feature (1)..(957): Ceres Seq. ID no. 12731929
  misc_feature: MA Experiment ID: 20000180 Result: Down-regulated in Transcription
  misc_feature: MA Experiment 20000180 PARAMETER Experiment Name: At_Germinating_Seeds_P Parameter: Age (hr) Value: 24 vs. 0
  misc_feature: MA Experiment 20000180 PARAMETER Experiment Name: At_Germinating_Seeds_P Parameter: Tissue Value: Germinating Seeds
  misc_feature: MA Experiment ID: 20000184 Result: Up-regulated in Transcription
  misc_feature: MA Experiment 20000184 PARAMETER Experiment Name: At_Shoots__P Parameter: Age (day) Value: 7
  misc_feature: MA Experiment 20000184 PARAMETER Experiment Name: At_Shoots__P Parameter: Tissue Value: Shoots vs. Whole Plant
  misc_feature: MA Experiment ID: 20000438 Result: Up-regulated in Transcription
  misc_feature: MA Experiment 20000438 PARAMETER Experiment Name: At_Shoots__P Parameter: Age (day) Value: 14
  misc_feature: MA Experiment 20000438 PARAMETER Experiment Name: At_Shoots__P Parameter: Tissue Value: Shoots vs. Whole Plant
  misc_feature: MA Experiment ID: 20001248 Result: Up-regulated in Transcription
  misc_feature: MA Experiment 20001248 PARAMETER Experiment Name: At_Far-red-induction_P Parameter: Age (day) Value: 7
  misc_feature: MA Experiment 20001248 PARAMETER Experiment Name: At_Far-red-induction_P Parameter: Light Value: Far-red vs. White
  misc_feature: MA Experiment 20001248 PARAMETER Experiment Name: At_Far-red-induction_P Parameter: Organism Value: A. thaliana
  misc_feature: MA Experiment 20001248 PARAMETER Experiment Name: At_Far-red-induction_P Parameter: Plant Line Value: Columbia
  misc_feature: MA Experiment 20001248 PARAMETER Experiment Name: At_Far-red-induction_P Parameter: Timepoint (hr) Value: 4
  misc_feature: MA Experiment 20001248 PARAMETER Experiment Name: At_Far-red-induction_P Parameter: Tissue Value: Whole Plant
  misc_feature: MA Experiment ID: 20001768 Result: Up-regulated in Transcription
  misc_feature: MA Experiment 20001768 PARAMETER Experiment Name: At_Far-red-enriched-adult_P Parameter: Age (day) Value: 28
  misc_feature: MA Experiment 20001768 PARAMETER Experiment Name: At_Far-red-enriched-adult_P Parameter: Light Value: Far-red enriched vs. White
  misc_feature: MA Experiment 20001768 PARAMETER Experiment Name: At_Far-red-enriched-adult_P Parameter: Organism Value: A. thaliana
  misc_feature: MA Experiment 20001768 PARAMETER Experiment Name: At_Far-red-enriched-adult_P Parameter: Plant Line Value: Columbia
  misc_feature: MA Experiment 20001768 PARAMETER Experiment Name: At_Far-red-enriched-adult_P Parameter: Timepoint (hr) Value: 1
  misc_feature: MA Experiment 20001768 PARAMETER Experiment Name: At_Far-red-enriched-adult_P Parameter: Tissue Value: Aerial
atgggggaaagagatgatgggttgggtttgagtctaagcttgggaaatagtcaacaaaaagaaccatctctgaggttgaatcttatgccgttgacaacttcttcttcttcttcttcgtttcaacacatgcacaatcagaataacaatagccatccccagaagattcataacatctcttggactcatctgtttcaatcttctgggattaaacgtacaactgcagagagaaactccgacgccgggtcatttctaagaggtttcaacgtgaacagagctcagtcttcggtggcggtagtggacttggaagaagaagccgccgtcgtctcgtctccaaacagcgccgtttcgagtctgagtggaaataaaagggatcttgcggtggcgagaggaggagatgaaaacgaggcggagagagcttcttgctcacgcggagggggaagcggtggtagcgacgatgaagacggcggaaacggcgacggatcaaggaagaaactacggttatcgaaggatcaagctcttgttctcgaggagacttttaaagaacatagcactcttaatccgaagcaaaagctggctctagcaaaacagttgaatctaagggcaagacaagttgaagtgtggtttcagaaccgtagggcaaggacgaagctgaaacaaacggaggttgattgtgagtatttaaagagatgttgcgataatctgaccgaggagaatcgacggctgcagaaagaagtgtcggagctgagggcgttgaagttgtctccacatctctacatgcacatgactcctcctactactctcaccatgtgcccttcttgcgaacgtgtctcctcctctgccgccactgtgaccgctgctccttccactactactactcctacggtggtggggcggccaagtccacagcgattaactccttggactgctatttctctccagcaaaaatcaggtcgctag

SEQ ID NO: 96128 - protein, 318 aa, Arabidopsis thaliana
  peptide (1)..(318): Ceres Seq. ID no. 12731930
  misc_feature (1)..(128): Pfam Name: HD-ZIP protein N terminus Pfam Description: HD-ZIP protein N terminus
  misc_feature (1)..(318): Homolog of NCBI NO: 15225368 NR Description: homeobox-leucine zipper protein, Athb-4; protein
  misc_feature (1)..(315): Homolog of NCBI NO: 25453563 NR Description: homeobox protein HAT3 [imported] - Arabidopsis >gi|549889|gb|AAA56904.1| homeobox protein
  misc_feature (1)..(315): Homolog of NCBI NO: 15232311 NR Description: homeobox-leucine zipper protein HAT3; protein id:
MGERDDGLGLSLSLGNSQQKEPSLRLNLMPLTTSSSSSSFQHMHNQNNNSHPQKIHNISWTHLFQSSGIKRTTAERNSDAGSFLRGFNVNRAQSSVAVVDLEEEAAVVSSPNSAVSSLSGNKRDLAVARGGDENEAERASCSRGGGSGGSDDEDGGNGDGSRKKLRLSKDQALVLEETFKEHSTLNPKQKLALAKQLNLRARQVEVWFQNRRARTKLKQTEVDCEYLKRCCDNLTEENRRLQKEVSELRALKLSPHLYMHMTPPTTLTMCPSCERVSSSAATVTAAPSTTTTPTVVGRPSPQRLTPWTAISLQQKSGR

SEQ ID NO: 96129 - protein, 290 aa, Arabidopsis thaliana
  peptide (1)..(290): Ceres Seq. ID no. 12731931
  misc_feature (1)..(100): Pfam Name: HD-ZIP protein N terminus Pfam Description: HD-ZIP protein N terminus
  misc_feature (1)..(290): Homolog of NCBI NO: 15225368 NR Description: homeobox-leucine zipper protein, Athb-4; protein
  misc_feature (1)..(287): Homolog of NCBI NO: 25453563 NR Description: homeobox protein HAT3 [imported] - Arabidopsis >gi|549889|gb|AAA56904.1| homeobox protein
  misc_feature (1)..(287): Homolog of NCBI NO: 15232311 NR Description: homeobox-leucine zipper protein HAT3; protein id:
MPLTTSSSSSSFQHMHNQNNNSHPQKIHNISWTHLFQSSGIKRTTAERNSDAGSFLRGFNVNRAQSSVAVVDLEEEAAVVSSPNSAVSSLSGNKRDLAVARGGDENEAERASCSRGGGSGGSDDEDGGNGDGSRKKLRLSKDQALVLEETFKEHSTLNPKQKLALAKQLNLRARQVEVWFQNRRARTKLKQTEVDCEYLKRCCDNLTEENRRLQKEVSELRALKLSPHLYMHMTPPTTLTMCPSCERVSSSAATVTAAPSTTTTPTVVGRPSPQRLTPWTAISLQQKSGR

SEQ ID NO: 96130 - protein, 276 aa, Arabidopsis thaliana
  peptide (1)..(276): Ceres Seq. ID no. 12731932
  misc_feature (1)..(86): Pfam Name: HD-ZIP protein N terminus Pfam Description: HD-ZIP protein N terminus
  misc_feature (1)..(276): Homolog of NCBI NO: 15225368 NR Description: homeobox-leucine zipper protein, Athb-4; protein
  misc_feature (1)..(273): Homolog of NCBI NO: 25453563 NR Description: homeobox protein HAT3 [imported] - Arabidopsis >gi|549889|gb|AAA56904.1| homeobox protein
  misc_feature (1)..(273): Homolog of NCBI NO: 15232311 NR Description: homeobox-leucine zipper protein HAT3; protein id:
MHNQNNNSHPQKIHNISWTHLFQSSGIKRTTAERNSDAGSFLRGFNVNRAQSSVAVVDLEEEAAVVSSPNSAVSSLSGNKRDLAVARGGDENEAERASCSRGGGSGGSDDEDGGNGDGSRKKLRLSKDQALVLEETFKEHSTLNPKQKLALAKQLNLRARQVEVWFQNRRARTKLKQTEVDCEYLKRCCDNLTEENRRLQKEVSELRALKLSPHLYMHMTPPTTLTMCPSCERVSSSAATVTAAPSTTTTPTVVGRPSPQRLTPWTAISLQQKSGR

SEQ ID NO: 96131 - DNA, 471 bp, Arabidopsis thaliana
  misc_feature (1)..(471): Ceres Seq. ID no. 12731953
  misc_feature: MA Experiment ID: 20000451 Result: Up-regulated in Transcription
  misc_feature: MA Experiment 20000451 PARAMETER Experiment Name: At_CS6879_Shoots-Roots_P Parameter: Age (day) Value: 14
  misc_feature: MA Experiment 20000451 PARAMETER Experiment Name: At_CS6879_Shoots-Roots_P Parameter: Organism Value: A. thaliana
  misc_feature: MA Experiment 20000451 PARAMETER Experiment Name: At_CS6879_Shoots-Roots_P Parameter: Plant Line Value: CS6879 vs. WS
  misc_feature: MA Experiment 20000451 PARAMETER Experiment Name: At_CS6879_Shoots-Roots_P Parameter: Tissue Value: Roots
  misc_feature: MA Experiment ID: 20000452 Result: Up-regulated in Transcription
  misc_feature: MA Experiment 20000452 PARAMETER Experiment Name: At_CS6879_Shoots-Roots_P Parameter: Age (day) Value: 14
  misc_feature: MA Experiment 20000452 PARAMETER Experiment Name: At_CS6879_Shoots-Roots_P Parameter: Organism Value: A. thaliana
  misc_feature: MA Experiment 20000452 PARAMETER Experiment Name: At_CS6879_Shoots-Roots_P Parameter: Plant Line Value: CS6879 vs. WS
  misc_feature: MA Experiment 20000452 PARAMETER Experiment Name: At_CS6879_Shoots-Roots_P Parameter: Tissue Value: Shoots
  misc_feature: MA Experiment ID: 20000495 Result: Down-regulated in Transcription
  misc_feature: MA Experiment 20000495 PARAMETER Experiment Name: At_Guard_Cells_P Parameter: Harvest Date Value: 8/2/2002
  misc_feature: MA Experiment 20000495 PARAMETER Experiment Name: At_Guard_Cells_P Parameter: Organism Value: A. thaliana
  misc_feature: MA Experiment 20000495 PARAMETER Experiment Name: At_Guard_Cells_P Parameter: Tissue Value: Guard Cells vs. Leaves
  misc_feature: MA Experiment ID: 20000496 Result: Down-regulated in Transcription
  misc_feature: MA Experiment 20000496 PARAMETER Experiment Name: At_Guard_Cells_P Parameter: Harvest Date Value: 7/19/2002
  misc_feature: MA Experiment 20000496 PARAMETER Experiment Name: At_Guard_Cells_P Parameter: Organism Value: Canola
  misc_feature: MA Experiment 20000496 PARAMETER Experiment Name: At_Guard_Cells_P Parameter: Tissue Value: Guard Cells vs. Leaves
  misc_feature: MA Experiment ID: 20001451 Result: Down-regulated in Transcription
  misc_feature: MA Experiment 20001451 PARAMETER Experiment Name: At_Far-red-induction_P Parameter: Age (day) Value: 7
  misc_feature: MA Experiment 20001451 PARAMETER Experiment Name: At_Far-red-induction_P Parameter: Light Value: Far-red vs. White
  misc_feature: MA Experiment 20001451 PARAMETER Experiment Name: At_Far-red-induction_P Parameter: Organism Value: A. thaliana
  misc_feature: MA Experiment 20001451 PARAMETER Experiment Name: At_Far-red-induction_P Parameter: Plant Line Value: Columbia
  misc_feature: MA Experiment 20001451 PARAMETER Experiment Name: At_Far-red-induction_P Parameter: Timepoint (hr) Value: 24
  misc_feature: MA Experiment 20001451 PARAMETER Experiment Name: At_Far-red-induction_P Parameter: Tissue Value: Whole Plant
atgtgtcacgcagctctcaagtatcttaagaaagtagcgcctggaagagactcatcaagcggtggcggttcgattattaacataagcgctactttgcactacacagcttctaggtatcaaatacatgtatctgcagccaaggttgcagttgatgctaccacaagaaacttggcattggagtggggaactgactatgatattagagtgaacggaattgctacaggtcctattggaggtacaccgggaatgagtaaacttgtacctgaggagattgaaaacaaaaccagagagtacatgcctctttataaacttggagagaagtgggatatcgcaatggctgcactctacttgagctgtgattctgggaaatatatgagtggactaacaatggtggtagatggaggactgtgtcttagcaaacctcgccatttggccaaagagtggagaagaggtctagggccaggcgaatga

SEQ ID NO: 96132 - protein, 156 aa, Arabidopsis thaliana
  peptide (1)..(156): Ceres Seq. ID no. 12731954
  misc_feature (1)..(156): Homolog of NCBI NO: 15226036 NR Description: unknown protein; protein id: At2g07640.1
  misc_feature (1)..(147): Homolog of NCBI NO: 30682333 NR Description: expressed protein [Arabidopsis thaliana]
  misc_feature (1)..(147): Homolog of NCBI NO: 38347363 NR Description: OSJNBa0070C17.24 [Oryza sativa (japonica
  misc_feature (35)..(147): Homolog of NCBI NO: 25518735 NR Description: hypothetical protein F28J9.2 - Arabidopsis >gi|6272372|gb|AAF06078.1|AC007918_2 Contains PF|00678 Short
  misc_feature (104)..(147): Homolog of NCBI NO: 15220465 NR Description: unknown protein; protein id: At1g36580.1
  misc_feature (49)..(78): Homolog of NCBI NO: 15220465 NR Description: unknown protein; protein id: At1g36580.1
  misc_feature (1)..(44): Homolog of NCBI NO: 15220465 NR Description: unknown protein; protein id: At1g36580.1
  misc_feature (1)..(81): Homolog of NCBI NO: 25518735 NR Description: hypothetical protein F28J9.2 - Arabidopsis >gi|6272372|gb|AAF06078.1|AC007918_2 Contains PF|00678 Short
  misc_feature (22)..(152): Homolog of NCBI NO: 39795780 NR Description: Unknown (protein for IMAGE:5307739) [Silurana
  misc_feature (22)..(141): Homolog of NCBI NO: 6753622 NR Description: 2-4-dienoyl-Coenzyme A reductase 2, peroxisomal
MCHAALKYLKKVAPGRDSSSGGGSIINISATLHYTASRYQIHVSAAKVAVDATTRNLALEWGTDYDIRVNGIATGPIGGTPGMSKLVPEEIENKTREYMPLYKLGEKWDIAMAALYLSCDSGKYMSGLTMVVDGGLCLSKPRHLAKEWRRGLGPGE

SEQ ID NO: 96133 - DNA, 1050 bp, Arabidopsis thaliana
  misc_feature (1)..(1050): Ceres Seq. ID no. 12732148
  misc_feature: MA Experiment ID: 20000286 Result: Up-regulated in Transcription
  misc_feature: MA Experiment 20000286 PARAMETER Experiment Name: At_Open_Flower_P Parameter: Age (day) Value: 21
  misc_feature: MA Experiment 20000286 PARAMETER Experiment Name: At_Open_Flower_P Parameter: Plant Line Value: WS
  misc_feature: MA Experiment 20000286 PARAMETER Experiment Name: At_Open_Flower_P Parameter: Tissue Value: Half Open vs. Whole Plant
atggccgaggcaatattcaaagcgttgttgttggtcattgcgaccaccgcatttgcaacgaccgaggcggctcttggacagcgagtgccttgctattttgttttcggagactccgtcttcgacaatggtaacaacaatgtcctgaatacctcggccaaagtcaactattcaccctacggtattgattttgctagaggtcctaccggccgtttcagcaatggtcgtaacattcctgacattatcgctgagctaatgagattcagtgattacattccaccgttcacgggagcatcaccggaacaagctcacatcggaataaactacgcttctggtggaggcggaatacgtgaagaaactagccaacatttgggtgaaataatcagttttaaaaagcaaataaagaatcaccggtcgatgattatgacggctaaggttccagaggagaagctgaataaatgtctatacacaattaatattggaagcaatgattatctcaacaactattttatgccggctccatatatgaccaataagaagttcagtttcgatgaatatgcagattctctcattcgaagttatcgctcttatttgaagtcattgtacgttctaggagcaaggaaggtcgctgtgtttggggtgagtaagctcggatgcacgccgcgtatgattgcctcccatggtggtggtaatggttgtgctgctgaagtgaacaaagctgtagaacctttcaataagaacctcaaagctcttgtctatgaattcaaccgagattttgctgatgctaagttcaccttcgttgatatctttagcggccaaagtcctttcgcgtttttcatgttagggtttagggtaacagacaaaagttgttgtacggtaaaaccaggggaagaactttgtgcgacaaatgaaccggtctgtccagttcaaagacggtatgtgtactgggacaatgtccacagcacagaagcagccaatatggtggttgcaaaggctgcttatgccggactcattacgtctccttacagtctttcttggcttgcaagattatag

SEQ ID NO: 96134 - protein, 349 aa, Arabidopsis thaliana
  peptide (1)..(349): Ceres Seq. ID no. 12732149
  misc_feature (32)..(332): Pfam Name: GDSL-like Lipase/Acylhydrolase Pfam Description: GDSL-like Lipase/Acylhydrolase
  misc_feature (1)..(349): Homolog of NCBI NO: 15224705 NR Description: putative GDSL-motif lipase/hydrolase; protein id:
  misc_feature (1)..(343): Homolog of NCBI NO: 15224707 NR Description: putative GDSL-motif lipase/hydrolase; protein id:
  misc_feature (7)..(348): Homolog of NCBI NO: 15224697 NR Description: putative GDSL-motif lipase hydrolase; protein id:
  misc_feature (1)..(346): Homolog of NCBI NO: 15234641 NR Description: putative protein; protein id: At4g30140.1, by cDNA: 21878., supported by cDNA: gi_13877600 [Arabidopsis
  misc_feature (1)..(346): Homolog of NCBI NO: 21554289 NR Description: putative GDSL-motif lipase/hydrolase [Arabidopsis
  misc_feature (10)..(349): Homolog of NCBI NO: 34909504 NR Description: putative GDSL-motif lipase/hydrolase-like protein
  misc_feature (9)..(349): Homolog of NCBI NO: 21592417 NR Description: lipase/hydrolase, putative [Arabidopsis thaliana]
  misc_feature (9)..(349): Homolog of NCBI NO: 15220514 NR Description: lipase/hydrolase, putative; protein id: supported by cDNA: 23556., supported by cDNA: gi_18086454
  misc_feature (1)..(349): Homolog of NCBI NO: 15242458 NR Description: GDSL-motif lipase/hydrolase-like protein; protein At5g45670.1, supported by cDNA: 18389., supported by cDNA:
  misc_feature (1)..(349): Homolog of NCBI NO: 21553940 NR Description: GDSL-motif lipase/hydrolase-like protein
MAEAIFKALLLVIATTAFATTEAALGQRVPCYFVFGDSVFDNGNNNVLNTSAKVNYSPYGIDFARGPTGRFSNGRNIPDIIAELMRFSDYIPPFTGASPEQAHIGINYASGGGGIREETSQHLGEIISFKKQIKNHRSMIMTAKVPEEKLNKCLYTINIGSNDYLNNYFMPAPYMTNKKFSFDEYADSLIRSYRSYLKSLYVLGARKVAVFGVSKLGCTPRMIASHGGGNGCAAEVNKAVEPFNKNLKALVYEFNRDFADAKFTFVDIFSGQSPFAFFMLGFRVTDKSCCTVKPGEELCATNEPVCPVQRRYVYWDNVHSTEAANMVVAKAAYAGLITSPYSLSWLARL

SEQ ID NO: 96135 - protein, 265 aa, Arabidopsis thaliana
  peptide (1)..(265): Ceres Seq. ID no. 12732150
  misc_feature (1)..(248): Pfam Name: GDSL-like Lipase/Acylhydrolase Pfam Description: GDSL-like Lipase/Acylhydrolase
  misc_feature (1)..(265): Homolog of NCBI NO: 15224705 NR Description: putative GDSL-motif lipase/hydrolase; protein id:
  misc_feature (1)..(259): Homolog of NCBI NO: 15224707 NR Description: putative GDSL-motif lipase/hydrolase; protein id:
  misc_feature (1)..(264): Homolog of NCBI NO: 15224697 NR Description: putative GDSL-motif lipase hydrolase; protein id:
  misc_feature (1)..(262): Homolog of NCBI NO: 15234641 NR Description: putative protein; protein id: At4g30140.1, by cDNA: 21878., supported by cDNA: gi_13877600 [Arabidopsis
  misc_feature (1)..(262): Homolog of NCBI NO: 21554289 NR Description: putative GDSL-motif lipase/hydrolase [Arabidopsis
  misc_feature (1)..(265): Homolog of NCBI NO: 34909504 NR Description: putative GDSL-motif lipase/hydrolase-like protein
  misc_feature (1)..(265): Homolog of NCBI NO: 21592417 NR Description: lipase/hydrolase, putative [Arabidopsis thaliana]
  misc_feature (1)..(265): Homolog of NCBI NO: 15220514 NR Description: lipase/hydrolase, putative; protein id: supported by cDNA: 23556., supported by cDNA: gi_18086454
  misc_feature (1)..(265): Homolog of NCBI NO: 15242458 NR Description: GDSL-motif lipase/hydrolase-like protein; protein At5g45670.1, supported by cDNA: 18389., supported by cDNA:
  misc_feature (1)..(265): Homolog of NCBI NO: 21553940 NR Description: GDSL-motif lipase/hydrolase-like protein
MRFSDYIPPFTGASPEQAHIGINYASGGGGIREETSQHLGEIISFKKQIKNHRSMIMTAKVPEEKLNKCLYTINIGSNDYLNNYFMPAPYMTNKKFSFDEYADSLIRSYRSYLKSLYVLGARKVAVFGVSKLGCTPRMIASHGGGNGCAAEVNKAVEPFNKNLKALVYEFNRDFADAKFTFVDIFSGQSPFAFFMLGFRVTDKSCCTVKPGEELCATNEPVCPVQRRYVYWDNVHSTEAANMVVAKAAYAGLITSPYSLSWLARL

SEQ ID NO: 96136 - protein, 211 aa, Arabidopsis thaliana
  peptide (1)..(211): Ceres Seq. ID no. 12732151
  misc_feature (1)..(194): Pfam Name: GDSL-like Lipase/Acylhydrolase Pfam Description: GDSL-like Lipase/Acylhydrolase
  misc_feature (1)..(211): Homolog of NCBI NO: 15224705 NR Description: putative GDSL-motif lipase/hydrolase; protein id:
  misc_feature (1)..(205): Homolog of NCBI NO: 15224707 NR Description: putative GDSL-motif lipase/hydrolase; protein id:
  misc_feature (1)..(210): Homolog of NCBI NO: 15224697 NR Description: putative GDSL-motif lipase hydrolase; protein id:
  misc_feature (1)..(208): Homolog of NCBI NO: 15234641 NR Description: putative protein; protein id: At4g30140.1, by cDNA: 21878., supported by cDNA: gi_13877600 [Arabidopsis
  misc_feature (1)..(208): Homolog of NCBI NO: 21554289 NR Description: putative GDSL-motif lipase/hydrolase [Arabidopsis
  misc_feature (1)..(211): Homolog of NCBI NO: 34909504 NR Description: putative GDSL-motif lipase/hydrolase-like protein
  misc_feature (1)..(211): Homolog of NCBI NO: 21592417 NR Description: lipase/hydrolase, putative [Arabidopsis thaliana]
  misc_feature (1)..(211): Homolog of NCBI NO: 15220514 NR Description: lipase/hydrolase, putative; protein id: supported by cDNA: 23556., supported by cDNA: gi_18086454
  misc_feature (1)..(211): Homolog of NCBI NO: 15242458 NR Description: GDSL-motif lipase/hydrolase-like protein; protein At5g45670.1, supported by cDNA: 18389., supported by cDNA:
  misc_feature (1)..(211): Homolog of NCBI NO: 21553940 NR Description: GDSL-motif lipase/hydrolase-like protein
MIMTAKVPEEKLNKCLYTINIGSNDYLNNYFMPAPYMTNKKFSFDEYADSLIRSYRSYLKSLYVLGARKVAVFGVSKLGCTPRMIASHGGGNGCAAEVNKAVEPFNKNLKALVYEFNRDFADAKFTFVDIFSGQSPFAFFMLGFRVTDKSCCTVKPGEELCATNEPVCPVQRRYVYWDNVHSTEAANMVVAKAAYAGLITSPYSLSWLARL

SEQ ID NO: 96137 - DNA, 2487 bp, Arabidopsis thaliana
  misc_feature (1)..(2487): Ceres Seq. ID no. 12732156
  misc_feature: MA Experiment ID: 20000182 Result: Up-regulated in Transcription
  misc_feature: MA Experiment 20000182 PARAMETER Experiment Name: At_2mM_SA_P Parameter: Age (day) Value: 14
  misc_feature: MA Experiment 20000182 PARAMETER Experiment Name: At_2mM_SA_P Parameter: Organism Value: A. thaliana
  misc_feature: MA Experiment 20000182 PARAMETER Experiment Name: At_2mM_SA_P Parameter: Plant Line Value: WS
  misc_feature: MA Experiment 20000182 PARAMETER Experiment Name: At_2mM_SA_P Parameter: Timepoint (hr) Value: 6
  misc_feature: MA Experiment 20000182 PARAMETER Experiment Name: At_2mM_SA_P Parameter: Tissue Value: Aerial
  misc_feature: MA Experiment 20000182 PARAMETER Experiment Name: At_2mM_SA_P Parameter: Treatment Value: 2mM SA vs. No Treatment
  misc_feature: MA Experiment ID: 20000184 Result: Down-regulated in Transcription
  misc_feature: MA Experiment 20000184 PARAMETER Experiment Name: At_Shoots__P Parameter: Age (day) Value: 7
  misc_feature: MA Experiment 20000184 PARAMETER Experiment Name: At_Shoots__P Parameter: Tissue Value: Shoots vs. Whole Plant
  misc_feature: MA Experiment ID: 20000234 Result: Down-regulated in Transcription
  misc_feature: MA Experiment 20000234 PARAMETER Experiment Name: At_Siliques_P Parameter: Age (day) Value: 21
  misc_feature: MA Experiment 20000234 PARAMETER Experiment Name: At_Siliques_P Parameter: Organism Value: A. thaliana
  misc_feature: MA Experiment 20000234 PARAMETER Experiment Name: At_Siliques_P Parameter: Plant Line Value: WS
  misc_feature: MA Experiment 20000234 PARAMETER Experiment Name: At_Siliques_P Parameter: Tissue Value: Less Than 5mm Siliques vs. Whole Plant
  misc_feature: MA Experiment ID: 20000235 Result: Down-regulated in Transcription
  misc_feature: MA Experiment 20000235 PARAMETER Experiment Name: At_Siliques_P Parameter: Age (day) Value: 21
  misc_feature: MA Experiment 20000235 PARAMETER Experiment Name: At_Siliques_P Parameter: Organism Value: A. thaliana
  misc_feature: MA Experiment 20000235 PARAMETER Experiment Name: At_Siliques_P Parameter: Plant Line Value: WS
  misc_feature: MA Experiment 20000235 PARAMETER Experiment Name: At_Siliques_P Parameter: Tissue Value: 5-10mm Siliques vs. Whole Plant
  misc_feature: MA Experiment ID: 20000264 Result: Down-regulated in Transcription
  misc_feature: MA Experiment 20000264 PARAMETER Experiment Name: At_Open_Flower_P Parameter: Age (day) Value: 21
  misc_feature: MA Experiment 20000264 PARAMETER Experiment Name: At_Open_Flower_P Parameter: Plant Line Value: WS
  misc_feature: MA Experiment 20000264 PARAMETER Experiment Name: At_Open_Flower_P Parameter: Tissue Value: Open Flower vs. Whole Plant
  misc_feature: MA Experiment ID: 20000265 Result: Down-regulated in Transcription
  misc_feature: MA Experiment 20000265 PARAMETER Experiment Name: At_Open_Flower_P Parameter: Age (day) Value: 21
  misc_feature: MA Experiment 20000265 PARAMETER Experiment Name: At_Open_Flower_P Parameter: Plant Line Value: WS
  misc_feature: MA Experiment 20000265 PARAMETER Experiment Name: At_Open_Flower_P Parameter: Tissue Value: Closed Flower vs. Whole Plant
  misc_feature: MA Experiment ID: 20000286 Result: Down-regulated in Transcription
  misc_feature: MA Experiment 20000286 PARAMETER Experiment Name: At_Open_Flower_P Parameter: Age (day) Value: 21
  misc_feature: MA Experiment 20000286 PARAMETER Experiment Name: At_Open_Flower_P Parameter: Plant Line Value: WS
  misc_feature: MA Experiment 20000286 PARAMETER Experiment Name: At_Open_Flower_P Parameter: Tissue Value: Half Open vs. Whole Plant
  misc_feature: MA Experiment ID: 20000438 Result: Down-regulated in Transcription
  misc_feature: MA Experiment 20000438 PARAMETER Experiment Name: At_Shoots__P Parameter: Age (day) Value: 14
  misc_feature: MA Experiment 20000438 PARAMETER Experiment Name: At_Shoots__P Parameter: Tissue Value: Shoots vs. Whole Plant
  misc_feature: MA Experiment ID: 20000794 Result: Down-regulated in Transcription
  misc_feature: MA Experiment 20000794 PARAMETER Experiment Name: At_Petals_P Parameter: Age (day) Value: 23-25 days
  misc_feature: MA Experiment 20000794 PARAMETER Experiment Name: At_Petals_P Parameter: Plant Line Value: WS
  misc_feature: MA Experiment 20000794 PARAMETER Experiment Name: At_Petals_P Parameter: Tissue Value: Petals vs. Whole plant
atggtttcgttcttgaccctcacttccttctttttcatctgcttcttcatccatggctcttccgccgtcgacacaatctccggcgactttactctctccggcgaccagactattgtctcctccgacggaacttacgaaatgggtttctttaaaccaggttcttcttcaaacttctacataggtatgtggtataagcaactctctcaaaccatactatgggtagccaatcgagacaaagcagtttccgacaaaaactcatcagttttcaaaatctccaacggaaacttaatcctactcgacggtaattaccagactccggtttggtccaccggtctcaactccacttcctctgtttctgctcttgaagcggttttgcaagacgacggcaatcttgttctcagaaccggcggctctagcttatcagctaacgtattgtggcaaagctttgatcacccgggagacacgtggcttcccggagtgaagatccggttagataaacgaaccggaaagagccagcgactcacttcgtggaagagtctcgaagatccatcaccaggtttgttctctctcgagctagacgaatccacagcttacaaaattctctggaacggatctaatgagtactggtcaagtggtccttggaaccctcagagcaggatctttgattcggttcccgagatgagactcaattacatctacaacttcagctttttctctaacaccacagactcatacttcacgtactctatctataaccagttgaacgtgtcacgcttcgtcatggacgtgtctggacagatcaaacagttcacttggttagaaggaaacaaggcatggaacttgttctggtctcaacctcgacaacaatgtcaggtctataggtattgtggctcctttggaatttgcagtgacaagtctgagcctttttgccgttgcccacaagggtttaggcctatgtcgcagaaagactgggacttgaaggattactctgcaggctgcgttagaaagactgaactacaatgctctcgtggagacattaaccagttttttcgtcttccgaacatgaaactagctgataattcagaggtattgacaagaactagtcttagtatttgtgcctctgcttgccaaggagattgttcttgtaaggcttatgcatatgatgaaggctcgagcaaatgcttggtttggtctaaagatgtcttgaatctacagcaacttgaagatgaaaacagtgaggggaacatattttatcttagactcgctgcttctgacgttcctaatgttggtgcttcgggtaagagtaacaataaaggtttgatatttggggcggttctaggctcgttaggagtaatagtccttgttctgttggtggtaatcttgatcttaaggtacaggaggaggaagagaatgagaggagagaagggtgatggtacattgagtgcgtttagctatagagaattacagaatgcgacaaagaatttctcggataagttaggaggaggaggttttggttcagtgttcaaaggtgctttaccggattctagtgatatagcggtgaagaggcttgagggtattagccaaggggagaagcagtttaggacggaagtagtgacgataggaacgatccaacacgttaatctagtgaggcttcgcgggttttgctccgaaggaagcaagaaattgttggtttatgattacatgcctaatggttctttggattctcatcttttcttaaaccaagttgaagaaaagatcgtcctcgggtggaaactgcggttccaaatcgcgttagggacagctagaggattagcttatctacacgatgaatgtagagactgtatcattcactgcgatataaaacccgaaaacattttgttagattcacagttttgtcccaaagttgctgatttcggtttggccaagctcgtgggtcgagattttagtagggttttgacgacaatgagaggcacaagagggtatcttgcaccggaatggatatcgggagttgcgataacagcgaaagccgatgtttacagctacgggatgatgttatttgagcttgtttccgggaggagaaacacagagcaatcagagaacgagaaagtcagattctttccaagttgggccgcgaccatactcaccaaagatggagacattcgctcactggttgaccctagactagagggagatgcagtggacatagaggaggtcacgagagcttgtaaagtggcgtgttggtgcatacaagacgaagagagtcataggccagcgatgagtcaagttgttcagattcttgaaggtgtcttggaagtgaatccaccgccttttccaagatcaattcaagctttagtcgtttccgatgaagacgtggtcttctttactgagtcgtcatcttcgtcaagccataattcttcacagaatcacaagcattcttcttcttcttcttcttccaagaaaatgaccaacgataactcttctgcttag

SEQ ID NO: 96138 - protein, 828 aa, Arabidopsis thaliana
  peptide (1)..(828): Ceres Seq. ID no. 12732157
  misc_feature (68)..(184): Pfam Name: D-mannose binding lectin Pfam Description: D-mannose binding lectin
  misc_feature (21)..(818): Homolog of NCBI NO: 7428025 NR Description: S-receptor kinase (EC 2.7.1.-) PK3 precursor -
  misc_feature (20)..(801): Homolog of NCBI NO: 34907514 NR Description: putative S-receptor kinase [Oryza sativa
  misc_feature (24)..(789): Homolog of NCBI NO: 34908666 NR Description: putative S-receptor kinase [Oryza sativa
  misc_feature (55)..(784): Homolog of NCBI NO: 21741575 NR Description: OSJNBa0094O15.5 [Oryza sativa (japonica
  misc_feature (54)..(784): Homolog of NCBI NO: 6979335 NR Description: receptor-like protein kinase [Oryza sativa]
  misc_feature (3)..(479): Homolog of NCBI NO: 30314606 NR Description: S receptor kinase [Brassica rapa]
  misc_feature (480)..(776): Homolog of NCBI NO: 30314606 NR Description: S receptor kinase [Brassica rapa]
  misc_feature (10)..(425): Homolog of NCBI NO: 15220351 NR Description: receptor kinase, putative; protein id:
  misc_feature (480)..(775): Homolog of NCBI NO: 15220351 NR Description: receptor kinase, putative; protein id:
  misc_feature (10)..(803): Homolog of NCBI NO: 30682152 NR Description: S-locus protein kinase, putative [Arabidopsis
MVSFLTLTSFFFICFFIHGSSAVDTISGDFTLSGDQTIVSSDGTYEMGFFKPGSSSNFYIGMWYKQLSQTILWVANRDKAVSDKNSSVFKISNGNLILLDGNYQTPVWSTGLNSTSSVSALEAVLQDDGNLVLRTGGSSLSANVLWQSFDHPGDTWLPGVKIRLDKRTGKSQRLTSWKSLEDPSPGLFSLELDESTAYKILWNGSNEYWSSGPWNPQSRIFDSVPEMRLNYIYNFSFFSNTTDSYFTYSIYNQLNVSRFVMDVSGQIKQFTWLEGNKAWNLFWSQPRQQCQVYRYCGSFGICSDKSEPFCRCPQGFRPMSQKDWDLKDYSAGCVRKTELQCSRGDINQFFRLPNMKLADNSEVLTRTSLSICASACQGDCSCKAYAYDEGSSKCLVWSKDVLNLQQLEDENSEGNIFYLRLAASDVPNVGASGKSNNKGLIFGAVLGSLGVIVLVLLVVILILRYRRRKRMRGEKGDGTLSAFSYRELQNATKNFSDKLGGGGFGSVFKGALPDSSDIAVKRLEGISQGEKQFRTEVVTIGTIQHVNLVRLRGFCSEGSKKLLVYDYMPNGSLDSHLFLNQVEEKIVLGWKLRFQIALGTARGLAYLHDECRDCIIHCDIKPENILLDSQFCPKVADFGLAKLVGRDFSRVLTTMRGTRGYLAPEWISGVAITAKADVYSYGMMLFELVSGRRNTEQSENEKVRFFPSWAATILTKDGDIRSLVDPRLEGDAVDIEEVTRACKVACWCIQDEESHRPAMSQVVQILEGVLEVNPPPFPRSIQALVVSDEDVVFFTESSSSSSHNSSQNHKHSSSSSSSKKMTNDNSSA

SEQ ID NO: 96139 - protein, 782 aa, Arabidopsis thaliana
  peptide (1)..(782): Ceres Seq. ID no. 12732158
  misc_feature (22)..(138): Pfam Name: D-mannose binding lectin Pfam Description: D-mannose binding lectin
  misc_feature (1)..(772): Homolog of NCBI NO: 7428025 NR Description: S-receptor kinase (EC 2.7.1.-) PK3 precursor -
  misc_feature (1)..(755): Homolog of NCBI NO: 34907514 NR Description: putative S-receptor kinase [Oryza sativa
  misc_feature (1)..(743): Homolog of NCBI NO: 34908666 NR Description: putative S-receptor kinase [Oryza sativa
  misc_feature (9)..(738): Homolog of NCBI NO: 21741575 NR Description: OSJNBa0094O15.5 [Oryza sativa (japonica
  misc_feature (8)..(738): Homolog of NCBI NO: 6979335 NR Description: receptor-like protein kinase [Oryza sativa]
  misc_feature (1)..(433): Homolog of NCBI NO: 30314606 NR Description: S receptor kinase [Brassica rapa]
  misc_feature (434)..(730): Homolog of NCBI NO: 30314606 NR Description: S receptor kinase [Brassica rapa]
  misc_feature (1)..(379): Homolog of NCBI NO: 15220351 NR Description: receptor kinase, putative; protein id:
  misc_feature (434)..(729): Homolog of NCBI NO: 15220351 NR Description: receptor kinase, putative; protein id:
  misc_feature (1)..(757): Homolog of NCBI NO: 30682152 NR Description: S-locus protein kinase, putative [Arabidopsis
MGFFKPGSSSNFYIGMWYKQLSQTILWVANRDKAVSDKNSSVFKISNGNLILLDGNYQTPVWSTGLNSTSSVSALEAVLQDDGNLVLRTGGSSLSANVLWQSFDHPGDTWLPGVKIRLDKRTGKSQRLTSWKSLEDPSPGLFSLELDESTAYKILWNGSNEYWSSGPWNPQSRIFDSVPEMRLNYIYNFSFFSNTTDSYFTYSIYNQLNVSRFVMDVSGQIKQFTWLEGNKAWNLFWSQPRQQCQVYRYCGSFGICSDKSEPFCRCPQGFRPMSQKDWDLKDYSAGCVRKTELQCSRGDINQFFRLPNMKLADNSEVLTRTSLSICASACQGDCSCKAYAYDEGSSKCLVWSKDVLNLQQLEDENSEGNIFYLRLAASDVPNVGASGKSNNKGLIFGAVLGSLGVIVLVLLVVILILRYRRRKRMRGEKGDGTLSAFSYRELQNATKNFSDKLGGGGFGSVFKGALPDSSDIAVKRLEGISQGEKQFRTEVVTIGTIQHVNLVRLRGFCSEGSKKLLVYDYMPNGSLDSHLFLNQVEEKIVLGWKLRFQIALGTARGLAYLHDECRDCIIHCDIKPENILLDSQFCPKVADFGLAKLVGRDFSRVLTTMRGTRGYLAPEWISGVAITAKADVYSYGMMLFELVSGRRNTEQSENEKVRFFPSWAATILTKDGDIRSLVDPRLEGDAVDIEEVTRACKVACWCIQDEESHRPAMSQVVQILEGVLEVNPPPFPRSIQALVVSDEDVVFFTESSSSSSHNSSQNHKHSSSSSSSKKMTNDNSSA

SEQ ID NO: 96140 - protein, 767 aa, Arabidopsis thaliana
  peptide (1)..(767): Ceres Seq. ID no. 12732159
  misc_feature (7)..(123): Pfam Name: D-mannose binding lectin Pfam Description: D-mannose binding lectin
  misc_feature (1)..(757): Homolog of NCBI NO: 7428025 NR Description: S-receptor kinase (EC 2.7.1.-) PK3 precursor -
  misc_feature (1)..(740): Homolog of NCBI NO: 34907514 NR Description: putative S-receptor kinase [Oryza sativa
  misc_feature (1)..(728): Homolog of NCBI NO: 34908666 NR Description: putative S-receptor kinase [Oryza sativa
  misc_feature (1)..(723): Homolog of NCBI NO: 21741575 NR Description: OSJNBa0094O15.5 [Oryza sativa (japonica
  misc_feature (1)..(723): Homolog of NCBI NO: 6979335 NR Description: receptor-like protein kinase [Oryza sativa]
  misc_feature (1)..(418): Homolog of NCBI NO: 30314606 NR Description: S receptor kinase [Brassica rapa]
  misc_feature (419)..(715): Homolog of NCBI NO: 30314606 NR Description: S receptor kinase [Brassica rapa]
  misc_feature (1)..(364): Homolog of NCBI NO: 15220351 NR Description: receptor kinase, putative; protein id:
  misc_feature (419)..(714): Homolog of NCBI NO: 15220351 NR Description: receptor kinase, putative; protein id:
  misc_feature (1)..(742): Homolog of NCBI NO: 30682152 NR Description: S-locus protein kinase, putative [Arabidopsis
MWYKQLSQTILWVANRDKAVSDKNSSVFKISNGNLILLDGNYQTPVWSTGLNSTSSVSALEAVLQDDGNLVLRTGGSSLSANVLWQSFDHPGDTWLPGVKIRLDKRTGKSQRLTSWKSLEDPSPGLFSLELDESTAYKILWNGSNEYWSSGPWNPQSRIFDSVPEMRLNYIYNFSFFSNTTDSYFTYSIYNQLNVSRFVMDVSGQIKQFTWLEGNKAWNLFWSQPRQQCQVYRYCGSFGICSDKSEPFCRCPQGFRPMSQKDWDLKDYSAGCVRKTELQCSRGDINQFFRLPNMKLADNSEVLTRTSLSICASACQGDCSCKAYAYDEGSSKCLVWSKDVLNLQQLEDENSEGNIFYLRLAASDVPNVGASGKSNNKGLIFGAVLGSLGVIVLVLLVVILILRYRRRKRMRGEKGDGTLSAFSYRELQNATKNFSDKLGGGGFGSVFKGALPDSSDIAVKRLEGISQGEKQFRTEVVTIGTIQHVNLVRLRGFCSEGSKKLLVYDYMPNGSLDSHLFLNQVEEKIVLGWKLRFQIALGTARGLAYLHDECRDCIIHCDIKPENILLDSQFCPKVADFGLAKLVGRDFSRVLTTMRGTRGYLAPEWISGVAITAKADVYSYGMMLFELVSGRRNTEQSENEKVRFFPSWAATILTKDGDIRSLVDPRLEGDAVDIEEVTRACKVACWCIQDEESHRPAMSQVVQILEGVLEVNPPPFPRSIQALVVSDEDVVFFTESSSSSSHNSSQNHKHSSSSSSSKKMTNDNSSA

SEQ ID NO: 96141 - DNA, 2041 bp, Arabidopsis thaliana
  misc_feature (1)..(2041): Ceres Seq. ID no. 12732164
  misc_feature: MA Experiment ID: 20001451 Result: Down-regulated in Transcription
  misc_feature: MA Experiment 20001451 PARAMETER Experiment Name: At_Far-red-induction_P Parameter: Age (day) Value: 7
  misc_feature: MA Experiment 20001451 PARAMETER Experiment Name: At_Far-red-induction_P Parameter: Light Value: Far-red vs. White
  misc_feature: MA Experiment 20001451 PARAMETER Experiment Name: At_Far-red-induction_P Parameter: Organism Value: A. thaliana
  misc_feature: MA Experiment 20001451 PARAMETER Experiment Name: At_Far-red-induction_P Parameter: Plant Line Value: Columbia
  misc_feature: MA Experiment 20001451 PARAMETER Experiment Name: At_Far-red-induction_P Parameter: Timepoint (hr) Value: 24
  misc_feature: MA Experiment 20001451 PARAMETER Experiment Name: At_Far-red-induction_P Parameter: Tissue Value: Whole Plant
  misc_feature: MA Experiment ID: 20001905 Result: Up-regulated in Transcription
  misc_feature: MA Experiment 20001905 PARAMETER Experiment Name: At_Drought_Reproduction_P Parameter: Age (day) Value: 40
  misc_feature: MA Experiment 20001905 PARAMETER Experiment Name: At_Drought_Reproduction_P Parameter: Organism Value: A. thaliana
  misc_feature: MA Experiment 20001905 PARAMETER Experiment Name: At_Drought_Reproduction_P Parameter: Plant Line Value: WS
  misc_feature: MA Experiment 20001905 PARAMETER Experiment Name: At_Drought_Reproduction_P Parameter: Timepoint (day) Value: 10
  misc_feature: MA Experiment 20001905 PARAMETER Experiment Name: At_Drought_Reproduction_P Parameter: Tissue Value: Rosettes
  misc_feature: MA Experiment 20001905 PARAMETER Experiment Name: At_Drought_Reproduction_P Parameter: Treatment Value: Drought vs. No Drought
attcttgcttcttcttcctcgtcttcgtcgtcttctgtgtacagacatacctccattttatagagagcgagaaacagagagatcagaagaagaagaggaggacaaaattatagaaggaaacgtttcaatgcgtgcatagaaatcgattctcatatactctgagagattcatatagaagtttctgttagttcgtagctctaagttcttcgttcgttgagagcttggaaaattgtcgcggagtctgtttttgttctcctagatctttgggtggaaacaaacaagctcgcgaagacgagaactctcgccgtatttgggatctggttccgtttagaagattttccaggtttcgactggttctagctgctaagtggaatcgactcattttagctgaagaaacttgttgggagtgggttaaagggatatttgaggctgagttgttgcagtatgcgataaaggtttttatgagatgaaggcaattaagggatggcgtctaggcaaaattaattatatgcagtctttgcctggggctcgccatcgtgctcctacaaggaagcctatatggatcattgcagtgctttcactgatagcaatgtttgtaattggtgcttacatgttccctcatcacagcaaagcggcatgttatatgttttcatctaaagggtgcaaggggctaactgattggcttccaccatcactgagggaatattcggatgacgagattgcagctcgtgtagttattagtgaaattttgagctcccctcgtgttataaaaaagagttctaaaattgcatttatgttcttaactcctggtacattgccttttgaaaagctatgggacctctttttccagggtcatgaggggaaattctctgtttatatacatgcatcaaaggatactccggttcacaccagtcgttactttcttaaccgtgagattcgaagtgacgaggtggtctggggtagaatatcaatgattgacgctgaaagacgtttgttgaccaatgctcttagagatcctgaaaatcagcaatttgtattactctctgatagttgtgtgccacttcgaagttttgaatacatgtacaactatatgatgcacagcaatgtcagctatgttgactgctttgatgatcctggtccacatggaacgggcaggcatatggaccacatgttgccggaaattccaagggaagattttcgaaagggtgcacagtggttctctatgaagcgtcagcatgctgtagtaactgtggcagataatctttactactctaaattccgggactactgtgggccaggtgtagagggcaacaagaactgcattgcggatgaacactatctgccaacattcttctatatgcttgatcctactggcattgctaactggactgtgacatatgttgattggtctgagagaaagtggcatccaagaaaatacatgcctgaagatatcacgctcgagttaattaagaacatctcgtccattgacgcagtttcacgcgtaacaagtgagaaaaacggagtagtatcctggacgcattgcatgtggaatggaatcaaaagaccttgctatctctttggaaggaaatttcatgctgatactctcgataaactgatggaactcttcccaaactacacaagcatcgtgtagggctttcgagcaattttgattgattgatgaaatgcaatgccaaggaggtattcttttgactcggattctttggccaacgttcagttatacccatgaatcaaactaaaacttttaggcaatatcatggaacccctagaagctgtatctcactgtaaagtccttttacgagcagagaaaatccgaaatcgtgtgatctttgagaaagcttaggaagtatttggggttttgtcattttggttggggacgttgggacatttttaactcatctgttgtcactacatctcattgttatttatagaattttcagagtgcttttttgtttttctctctttttgttggagcactttgttgaatatgaaatgaaaacaagatatgaggcttatacagttt

SEQ ID NO: 96142 - protein, 394 aa, Arabidopsis thaliana
  peptide (1)..(394): Ceres Seq. ID no. 12732165
  misc_feature (140)..(251): Pfam Name: Arabidopsis protein of unknown function, DUF266 Pfam Description: Arabidopsis protein of unknown function, DUF266
  misc_feature (1)..(394): Homolog of NCBI NO: 30680587 NR Description: expressed protein [Arabidopsis thaliana]
  misc_feature (1)..(359): Homolog of NCBI NO: 7487281 NR Description: hypothetical protein T20K24.18 - Arabidopsis >gi|3176725|gb|AAD12039.1| (AC002392) unknown protein
  misc_feature (1)..(394): Homolog of NCBI NO: 22329024 NR Description: putative protein; protein id: At4g30060.1, by cDNA: gi_17065049 [Arabidopsis thaliana] putative protein [Arabidopsis thaliana]
  misc_feature (1)..(195): Homolog of NCBI NO: 7486517 NR Description: hypothetical protein F6G3.90 - Arabidopsis >gi|4938482|emb|CAB43841.1| putative protein [Arabidopsis >gi|7269906|emb|CAB80999.1| putative protein [Arabidopsis
  misc_feature (212)..(338): Homolog of NCBI NO: 7486517 NR Description: hypothetical protein F6G3.90 - Arabidopsis >gi|4938482|emb|CAB43841.1| putative protein [Arabidopsis >gi|7269906|emb|CAB80999.1| putative protein [Arabidopsis
  misc_feature (18)..(392): Homolog of NCBI NO: 15236024 NR Description: putative protein; protein id: At4g25870.1
  misc_feature (22)..(394): Homolog of NCBI NO: 22327910 NR Description: putative protein; protein id: At5g57270.1, by cDNA: gi_17065015, supported by cDNA: gi_17065151, supported cDNA: gi_20260013 [Arabidopsis thaliana]
  misc_feature (22)..(394): Homolog of NCBI NO: 17065016 NR Description: Unknown protein [Arabidopsis thaliana]
  misc_feature (21)..(394): Homolog of NCBI NO: 26452247 NR Description: unknown protein [Arabidopsis thaliana]
  misc_feature (22)..(348): Homolog of NCBI NO: 8777360 NR Description: gene_id:MJB24.8~pir||T04241~strong similarity to
MKAIKGWRLGKINYMQSLPGARHRAPTRKPIWIIAVLSLIAMFVIGAYMFPHHSKAACYMFSSKGCKGLTDWLPPSLREYSDDEIAARVVISEILSSPRVIKKSSKIAFMFLTPGTLPFEKLWDLFFQGHEGKFSVYIHASKDTPVHTSRYFLNREIRSDEVVWGRISMIDAERRLLTNALRDPENQQFVLLSDSCVPLRSFEYMYNYMMHSNVSYVDCFDDPGPHGTGRHMDHMLPEIPREDFRKGAQWFSMKRQHAVVTVADNLYYSKFRDYCGPGVEGNKNCIADEHYLPTFFYMLDPTGIANWTVTYVDWSERKWHPRKYMPEDITLELIKNISSIDAVSRVTSEKNGVVSWTHCMWNGIKRPCYLFGRKFHADTLDKLMELFPNYTSIV

SEQ ID NO: 96143 - protein, 380 aa, Arabidopsis thaliana
  peptide (1)..(380): Ceres Seq. ID no. 12732166
  misc_feature (126)..(237): Pfam Name: Arabidopsis protein of unknown function, DUF266 Pfam Description: Arabidopsis protein of unknown function, DUF266
  misc_feature (1)..(380): Homolog of NCBI NO: 30680587 NR Description: expressed protein [Arabidopsis thaliana]
  misc_feature (1)..(345): Homolog of NCBI NO: 7487281 NR Description: hypothetical protein T20K24.18 - Arabidopsis >gi|3176725|gb|AAD12039.1| (AC002392) unknown protein
  misc_feature (1)..(380): Homolog of NCBI NO: 22329024 NR Description: putative protein; protein id: At4g30060.1, by cDNA: gi_17065049 [Arabidopsis thaliana] putative protein [Arabidopsis thaliana]
  misc_feature (1)..(181): Homolog of NCBI NO: 7486517 NR Description: hypothetical protein F6G3.90 - Arabidopsis >gi|4938482|emb|CAB43841.1| putative protein [Arabidopsis >gi|7269906|emb|CAB80999.1| putative protein [Arabidopsis
  misc_feature (198)..(324): Homolog of NCBI NO: 7486517 NR Description: hypothetical protein F6G3.90 - Arabidopsis >gi|4938482|emb|CAB43841.1| putative protein [Arabidopsis >gi|7269906|emb|CAB80999.1| putative protein [Arabidopsis
  misc_feature (4)..(378): Homolog of NCBI NO: 15236024 NR Description: putative protein; protein id: At4g25870.1
  misc_feature (8)..(380): Homolog of NCBI NO: 22327910 NR Description: putative protein; protein id: At5g57270.1, by cDNA: gi_17065015, supported by cDNA: gi_17065151, supported cDNA: gi_20260013 [Arabidopsis thaliana]
  misc_feature (8)..(380): Homolog of NCBI NO: 17065016 NR Description: Unknown protein [Arabidopsis thaliana]
  misc_feature (7)..(380): Homolog of NCBI NO: 26452247 NR Description: unknown protein [Arabidopsis thaliana]
  misc_feature (8)..(334): Homolog of NCBI NO: 8777360 NR Description: gene_id:MJB24.8~pir||T04241~strong similarity to
MQSLPGARHRAPTRKPIWIIAVLSLIAMFVIGAYMFPHHSKAACYMFSSKGCKGLTDWLPPSLREYSDDEIAARVVISEILSSPRVIKKSSKIAFMFLTPGTLPFEKLWDLFFQGHEGKFSVYIHASKDTPVHTSRYFLNREIRSDEVVWGRISMIDAERRLLTNALRDPENQQFVLLSDSCVPLRSFEYMYNYMMHSNVSYVDCFDDPGPHGTGRHMDHMLPEIPREDFRKGAQWFSMKRQHAVVTVADNLYYSKFRDYCGPGVEGNKNCIADEHYLPTFFYMLDPTGIANWTVTYVDWSERKWHPRKYMPEDITLELIKNISSIDAVSRVTSEKNGVVSWTHCMWNGIKRPCYLFGRKFHADTLDKLMELFPNYTSIV

SEQ ID NO: 96144 - protein, 353 aa, Arabidopsis thaliana
  peptide (1)..(353): Ceres Seq. ID no. 12732167
  misc_feature (99)..(210): Pfam Name: Arabidopsis protein of unknown function, DUF266 Pfam Description: Arabidopsis protein of unknown function, DUF266
  misc_feature (1)..(353): Homolog of NCBI NO: 30680587 NR Description: expressed protein [Arabidopsis thaliana]
  misc_feature (1)..(318): Homolog of NCBI NO: 7487281 NR Description: hypothetical protein T20K24.18 - Arabidopsis >gi|3176725|gb|AAD12039.1| (AC002392) unknown protein
  misc_feature (1)..(353): Homolog of NCBI NO: 22329024 NR Description: putative protein; protein id: At4g30060.1, by cDNA: gi_17065049 [Arabidopsis thaliana] putative protein [Arabidopsis thaliana]
  misc_feature (1)..(154): Homolog of NCBI NO: 7486517 NR Description: hypothetical protein F6G3.90 - Arabidopsis >gi|4938482|emb|CAB43841.1| putative protein [Arabidopsis >gi|7269906|emb|CAB80999.1| putative protein [Arabidopsis
  misc_feature (171)..(297): Homolog of NCBI NO: 7486517 NR Description: hypothetical protein F6G3.90 - Arabidopsis >gi|4938482|emb|CAB43841.1| putative protein [Arabidopsis >gi|7269906|emb|CAB80999.1| putative protein [Arabidopsis
  misc_feature (1)..(351): Homolog of NCBI NO: 15236024 NR Description: putative protein; protein id: At4g25870.1
  misc_feature (1)..(353): Homolog of NCBI NO: 22327910 NR Description: putative protein; protein id: At5g57270.1, by cDNA: gi_17065015, supported by cDNA: gi_17065151, supported cDNA: gi_20260013 [Arabidopsis thaliana]
  misc_feature (1)..(353): Homolog of NCBI NO: 17065016 NR Description: Unknown protein [Arabidopsis thaliana]
  misc_feature (1)..(353): Homolog of NCBI NO: 26452247 NR Description: unknown protein [Arabidopsis thaliana]
  misc_feature (1)..(307): Homolog of NCBI NO: 8777360 NR Description: gene_id:MJB24.8~pir||T04241~strong similarity to
MFVIGAYMFPHHSKAACYMFSSKGCKGLTDWLPPSLREYSDDEIAARVVISEILSSPRVIKKSSKIAFMFLTPGTLPFEKLWDLFFQGHEGKFSVYIHASKDTPVHTSRYFLNREIRSDEVVWGRISMIDAERRLLTNALRDPENQQFVLLSDSCVPLRSFEYMYNYMMHSNVSYVDCFDDPGPHGTGRHMDHMLPEIPREDFRKGAQWFSMKRQHAVVTVADNLYYSKFRDYCGPGVEGNKNCIADEHYLPTFFYMLDPTGIANWTVTYVDWSERKWHPRKYMPEDITLELIKNISSIDAVSRVTSEKNGVVSWTHCMWNGIKRPCYLFGRKFHADTLDKLMELFPNYTSIV

SEQ ID NO: 96145 - DNA, 2700 bp, Arabidopsis thaliana
  misc_feature (1)..(2700): Ceres Seq. ID no. 12732168
  misc_feature: MA Experiment ID: 20000166 Result: Up-regulated in Transcription
  misc_feature: MA Experiment 20000166 PARAMETER Experiment Name: At_100uM_ABA_P Parameter: Age (day) Value: 14
  misc_feature: MA Experiment 20000166 PARAMETER Experiment Name: At_100uM_ABA_P Parameter: Organism Value: A. thaliana
  misc_feature: MA Experiment 20000166 PARAMETER Experiment Name: At_100uM_ABA_P Parameter: Plant Line Value: WS
  misc_feature: MA Experiment 20000166 PARAMETER Experiment Name: At_100uM_ABA_P Parameter: Timepoint (hr) Value: 1
  misc_feature: MA Experiment 20000166 PARAMETER Experiment Name: At_100uM_ABA_P Parameter: Tissue Value: Aerial
  misc_feature: MA Experiment 20000166 PARAMETER Experiment Name: At_100uM_ABA_P Parameter: Treatment Value: 100uM ABA vs. No Treatment
  misc_feature: MA Experiment ID: 20000173 Result: Down-regulated in Transcription
  misc_feature: MA Experiment 20000173 PARAMETER Experiment Name: At_42deg_Heat_P Parameter: Age (day) Value: 14
  misc_feature: MA Experiment 20000173 PARAMETER Experiment Name: At_42deg_Heat_P Parameter: Organism Value: A. thaliana
  misc_feature: MA Experiment 20000173 PARAMETER Experiment Name: At_42deg_Heat_P Parameter: Plant Line Value: WS
  misc_feature: MA Experiment 20000173 PARAMETER Experiment Name: At_42deg_Heat_P Parameter: Temperature (deg C) Value: 42 vs. 22
  misc_feature: MA Experiment 20000173 PARAMETER Experiment Name: At_42deg_Heat_P Parameter: Timepoint (hr) Value: 6
  misc_feature: MA Experiment 20000173 PARAMETER Experiment Name: At_42deg_Heat_P Parameter: Tissue Value: Aerial
  misc_feature: MA Experiment ID: 20000182 Result: Up-regulated in Transcription
  misc_feature: MA Experiment 20000182 PARAMETER Experiment Name: At_2mM_SA_P Parameter: Age (day) Value: 14
  misc_feature: MA Experiment 20000182 PARAMETER Experiment Name: At_2mM_SA_P Parameter: Organism Value: A. thaliana
  misc_feature: MA Experiment 20000182 PARAMETER Experiment Name: At_2mM_SA_P Parameter: Plant Line Value: WS
  misc_feature: MA Experiment 20000182 PARAMETER Experiment Name: At_2mM_SA_P Parameter: Timepoint (hr) Value: 6
  misc_feature: MA Experiment 20000182 PARAMETER Experiment Name: At_2mM_SA_P Parameter: Tissue Value: Aerial
  misc_feature: MA Experiment 20000182 PARAMETER Experiment Name: At_2mM_SA_P Parameter: Treatment Value: 2mM SA vs. No Treatment
  misc_feature: MA Experiment ID: 20000185 Result: Down-regulated in Transcription
  misc_feature: MA Experiment 20000185 PARAMETER Experiment Name: At_Roots__P Parameter: Age (day) Value: 7 vs. 21
  misc_feature: MA Experiment 20000185 PARAMETER Experiment Name: At_Roots__P Parameter: Organism Value: A. thaliana
  misc_feature: MA Experiment 20000185 PARAMETER Experiment Name: At_Roots__P Parameter: Tissue Value: Roots vs. Whole Plant
  misc_feature: MA Experiment ID: 20000235 Result: Down-regulated in Transcription
  misc_feature: MA Experiment 20000235 PARAMETER Experiment Name: At_Siliques_P Parameter: Age (day) Value: 21
  misc_feature: MA Experiment 20000235 PARAMETER Experiment Name: At_Siliques_P Parameter: Organism Value: A. thaliana
  misc_feature: MA Experiment 20000235 PARAMETER Experiment Name: At_Siliques_P Parameter: Plant Line Value: WS
  misc_feature: MA Experiment 20000235 PARAMETER Experiment Name: At_Siliques_P Parameter: Tissue Value: 5-10mm Siliques vs. Whole Plant
  misc_feature: MA Experiment ID: 20000438 Result: Down-regulated in Transcription
  misc_feature: MA Experiment 20000438 PARAMETER Experiment Name: At_Shoots__P Parameter: Age (day) Value: 14
  misc_feature: MA Experiment 20000438 PARAMETER Experiment Name: At_Shoots__P Parameter: Tissue Value: Shoots vs. Whole Plant
  misc_feature: MA Experiment ID: 20000439 Result: Down-regulated in Transcription
  misc_feature: MA Experiment 20000439 PARAMETER Experiment Name: At_Roots__P Parameter: Age (day) Value: 14 vs. 21
  misc_feature: MA Experiment 20000439 PARAMETER Experiment Name: At_Roots__P Parameter: Organism Value: A. thaliana
  misc_feature: MA Experiment 20000439 PARAMETER Experiment Name: At_Roots__P Parameter: Tissue Value: Roots vs. Whole Plant
  misc_feature: MA Experiment ID: 20000445 Result: Up-regulated in Transcription
  misc_feature: MA Experiment 20000445 PARAMETER Experiment Name: At_100uM_NAA__P Parameter: Age (day) Value: 14
  misc_feature: MA Experiment 20000445 PARAMETER Experiment Name: At_100uM_NAA__P Parameter: Organism Value: A. thaliana
  misc_feature: MA Experiment 20000445 PARAMETER Experiment Name: At_100uM_NAA__P Parameter: Plant Line Value: WS
  misc_feature: MA Experiment 20000445 PARAMETER Experiment Name: At_100uM_NAA__P Parameter: Timepoint (hr) Value: 6
  misc_feature: MA Experiment 20000445 PARAMETER Experiment Name: At_100uM_NAA__P Parameter: Tissue Value: Aerial
  misc_feature: MA Experiment 20000445 PARAMETER Experiment Name: At_100uM_NAA__P Parameter: Treatment Value: 100uM NAA vs. No Treatment
  misc_feature: MA Experiment ID: 20000527 Result: Down-regulated in Transcription
  misc_feature: MA Experiment 20000527 PARAMETER Experiment Name: At_10percent_PEG_P Parameter: Age (day) Value: 20
  misc_feature: MA Experiment 20000527 PARAMETER Experiment Name: At_10percent_PEG_P Parameter: Organism Value: A. thaliana
  misc_feature: MA Experiment 20000527 PARAMETER Experiment Name: At_10percent_PEG_P Parameter: Plant Line Value: WS
  misc_feature: MA Experiment 20000527 PARAMETER Experiment Name: At_10percent_PEG_P Parameter: Timepoint (day) Value: 20
  misc_feature: MA Experiment 20000527 PARAMETER Experiment Name: At_10percent_PEG_P Parameter: Tissue Value: Whole Plant
  misc_feature: MA Experiment 20000527 PARAMETER Experiment Name: At_10percent_PEG_P Parameter: Treatment Value: 10percent PEG vs. No Treatment
  misc_feature: MA Experiment ID: 20000709 Result: Down-regulated in Transcription
  misc_feature: MA Experiment 20000709 PARAMETER Experiment Name: At_15mM_NH4NO3_L-to-H_P Parameter: Age (hr) Value: 14
  misc_feature: MA Experiment 20000709 PARAMETER Experiment Name: At_15mM_NH4NO3_L-to-H_P Parameter: Organism Value: A. thaliana
  misc_feature: MA Experiment 20000709 PARAMETER Experiment Name: At_15mM_NH4NO3_L-to-H_P Parameter: Plant Line Value: WS
  misc_feature: MA Experiment 20000709 PARAMETER Experiment Name: At_15mM_NH4NO3_L-to-H_P Parameter: Timepoint (hr) Value: 4
  misc_feature: MA Experiment 20000709 PARAMETER Experiment Name: At_15mM_NH4NO3_L-to-H_P Parameter: Tissue Value: Aerial
  misc_feature: MA Experiment 20000709 PARAMETER Experiment Name: At_15mM_NH4NO3_L-to-H_P Parameter: Treatment Value: 15mM NH4NO3 vs. 30mM Mannitol
  misc_feature: MA Experiment ID: 20000794 Result: Down-regulated in Transcription
  misc_feature: MA Experiment 20000794 PARAMETER Experiment Name: At_Petals_P Parameter: Age (day) Value: 23-25 days
  misc_feature: MA Experiment 20000794 PARAMETER Experiment Name: At_Petals_P Parameter: Plant Line Value: WS
  misc_feature: MA Experiment 20000794 PARAMETER Experiment Name: At_Petals_P Parameter: Tissue Value: Petals vs. Whole plant
  misc_feature: MA Experiment ID: 20001451 Result: Up-regulated in Transcription
  misc_feature: MA Experiment 20001451 PARAMETER Experiment Name: At_Far-red-induction_P Parameter: Age (day) Value: 7
  misc_feature: MA Experiment 20001451 PARAMETER Experiment Name: At_Far-red-induction_P Parameter: Light Value: Far-red vs. White
  misc_feature: MA Experiment 20001451 PARAMETER Experiment Name: At_Far-red-induction_P Parameter: Organism Value: A. thaliana
  misc_feature: MA Experiment 20001451 PARAMETER Experiment Name: At_Far-red-induction_P Parameter: Plant Line Value: Columbia
  misc_feature: MA Experiment 20001451 PARAMETER Experiment Name: At_Far-red-induction_P Parameter: Timepoint (hr) Value: 24
  misc_feature: MA Experiment 20001451 PARAMETER Experiment Name: At_Far-red-induction_P Parameter: Tissue Value: Whole Plant
  misc_feature: MA Experiment ID: 20001554 Result: Down-regulated in Transcription
  misc_feature: MA Experiment 20001554 PARAMETER Experiment Name: At_Drought_Soil_Dry_P Parameter: Age (day) Value: 21
  misc_feature: MA Experiment 20001554 PARAMETER Experiment Name: At_Drought_Soil_Dry_P Parameter: Organism Value: A. thaliana
  misc_feature: MA Experiment 20001554 PARAMETER Experiment Name: At_Drought_Soil_Dry_P Parameter: Plant Line Value: WS
  misc_feature: MA Experiment 20001554 PARAMETER Experiment Name: At_Drought_Soil_Dry_P Parameter: Post Timepoint (hr) Value: None
  misc_feature: MA Experiment 20001554 PARAMETER Experiment Name: At_Drought_Soil_Dry_P Parameter: Post-Treatment Value: None
  misc_feature: MA Experiment 20001554 PARAMETER Experiment Name: At_Drought_Soil_Dry_P Parameter: Timepoint (day) Value: 7
  misc_feature: MA Experiment 20001554 PARAMETER Experiment Name: At_Drought_Soil_Dry_P Parameter: Treatment Value: Drought vs. No Drought
  misc_feature: MA Experiment ID: 20001556 Result: Down-regulated in Transcription
  misc_feature: MA Experiment 20001556 PARAMETER Experiment Name: At_Drought_Soil_Dry_P Parameter: Age (day) Value: 26
  misc_feature: MA Experiment 20001556 PARAMETER Experiment Name: At_Drought_Soil_Dry_P Parameter: Organism Value: A. thaliana
  misc_feature: MA Experiment 20001556 PARAMETER Experiment Name: At_Drought_Soil_Dry_P Parameter: Plant Line Value: WS
  misc_feature: MA Experiment 20001556 PARAMETER Experiment Name: At_Drought_Soil_Dry_P Parameter: Post Timepoint (hr) Value: None
  misc_feature: MA Experiment 20001556 PARAMETER Experiment Name: At_Drought_Soil_Dry_P Parameter: Post-Treatment Value: None
  misc_feature: MA Experiment 20001556 PARAMETER Experiment Name: At_Drought_Soil_Dry_P Parameter: Timepoint (day) Value: 12
  misc_feature: MA Experiment 20001556 PARAMETER Experiment Name: At_Drought_Soil_Dry_P Parameter: Treatment Value: Drought vs. No Drought
  misc_feature: MA Experiment ID: 20001904 Result: Down-regulated in Transcription
  misc_feature: MA Experiment 20001904 PARAMETER Experiment Name: At_Drought_Reproduction_P Parameter: Age (day) Value: 37
  misc_feature: MA Experiment 20001904 PARAMETER Experiment Name: At_Drought_Reproduction_P Parameter: Organism Value: A. thaliana
  misc_feature: MA Experiment 20001904 PARAMETER Experiment Name: At_Drought_Reproduction_P Parameter: Plant Line Value: WS
  misc_feature: MA Experiment 20001904 PARAMETER Experiment Name: At_Drought_Reproduction_P Parameter: Timepoint (day) Value: 7
  misc_feature: MA Experiment 20001904 PARAMETER Experiment Name: At_Drought_Reproduction_P Parameter: Tissue Value: Rosettes
  misc_feature: MA Experiment 20001904 PARAMETER Experiment Name: At_Drought_Reproduction_P Parameter: Treatment Value: Drought vs. No Drought
  misc_feature: MA Experiment ID: 20001905 Result: Up-regulated in Transcription
  misc_feature: MA Experiment 20001905 PARAMETER Experiment Name: At_Drought_Reproduction_P Parameter: Age (day) Value: 40
  misc_feature: MA Experiment 20001905 PARAMETER Experiment Name: At_Drought_Reproduction_P Parameter: Organism Value: A. thaliana
  misc_feature: MA Experiment 20001905 PARAMETER Experiment Name: At_Drought_Reproduction_P Parameter: Plant Line Value: WS
  misc_feature: MA Experiment 20001905 PARAMETER Experiment Name: At_Drought_Reproduction_P Parameter: Timepoint (day) Value: 10
  misc_feature: MA Experiment 20001905 PARAMETER Experiment Name: At_Drought_Reproduction_P Parameter: Tissue Value: Rosettes
  misc_feature: MA Experiment 20001905 PARAMETER Experiment Name: At_Drought_Reproduction_P Parameter: Treatment Value: Drought vs. No Drought
taaaacagttgctcattgctctagcccagagaaagcagctcaattaagtaaatggcgatgttaaaatctctttcatcgattttattcacaagctttgctcttctgttctttcttgttcatgctcaagatcaatctggtttcataagtatagattgcgggataccggatgattctagctacaacgatgagactacaggtataaagtatgtttcggattcggcgtttgttgattcaggaacaacaaagagaattgcagctcagtttcaatcaagtggttttgatagacacttgttgaacgtgagaagtttccctcaaagcaagagaagctgttacgatgttccgacgccgagaggcaaaggttttaagtatctaatcagaactcgtttcatgtacgggaactatgatgatcttggaagagtacccgagttcgatctctatctaggagtaaacttttgggactctgttaaactcgacgatgcaacaactatactcaacaaagagataatcaccattccacttttagacaatgttcaagtgtgtgttgttgataagaacgcaggaactccatttttgtctgtcttggagatacggctcttgttgaacactacttatgagactccttacgatgcacttaccctccttcggagattagattacagcaaaacgggaaaacttccatcgaggtacaaagatgacatatatgaccgtatatggacaccgcgtatagtgagttcagaatacaagatattaaatacatctctcactgtcgatcaatttcttaacaatggctaccaaccggcttctactgtcatgagcactgcagaaacagcgcgaaacgagagcctctacctaacgcttagtttcagaccgcccgaccctaacgcaaagttttatgtatacatgcactttgctgaaattgaagtactgaaaagcaaccagacgagagaattcagcatctggctaaatgaggatgtaatctctccttcgtttaagcttcggtacttgcttaccgacacattcgttacaccggatcccgtgagcggaattaccattaacttctctcttcttcaaccacctggtgaatttgtacttccaccgatcattaacgcccttgaggtctatcaagtcaatgagttccttcagatcccaactcatccacaggatgttgatgccatgaggaagattaaagccacgtatagagtgaagaagaactggcaaggagatccttgtgttcccgtagattattcttgggaaggtattgactgtatccaaagtgataacactactaatcctagagtcgtttcactaaatatatcttttagtgaattaagaggccagatagatccagccttctccaaccttacatctataagaaaattagatttatccggtaatactttaacaggagaaatacctgctttcctcgctaacttaccaaacttgaccgaattaaacgttgaaggaaacaagttaacgggcatagttccacaaagattgcatgaaagatcaaagaatggatctctttccttaagatttggtagaaatccggacctttgtctctctgattcctgttcaaacacaaagaagaagaacaagaatggatacatcattccattagtagtcgtaggaatcatcgtcgttcttttgacggctttagctttgttccggcgtttcaagaaaaaacaacaaagaggtacacttggtgagaggaatgggccgttgaaaactgcaaagcgatactttaagtactcagaagttgtgaatatcacaaataactttgagagagttattggcaaaggaggttttggtaaagtataccatggtgtcataaatggagaacaagttgctgtcaaggtactctctgaagaatcagctcaaggctacaaagagtttcgagcagaggttgaccttctcatgagagttcatcacacgaacctgacttctcttgttggatattgcaacgaaataaaccacatggtgcttatctatgagtatatggctaatgagaacttaggagactatttggcaggtaaaaggtcatttatcttgagctgggaagagaggttgaagatatcattagatgcagcgcaaggactagagtatcttcacaatggttgtaagcctcctatagttcacagagatgtgaagccaacaaacatcttactaaacgagaagctccaagcgaagatggcggacttcgggttatctagaagcttctctgttgaaggaagcggtcagatttcaacagttgtcgctggatccatcggttaccttgaccccgagtactattcgactcgccaaatgaacgaaaagagtgatgtttatagtcttggggttgttcttcttgaagtgattacaggccaacctgctattgcaagctcaaaaacagagaaggtgcatataagtgatcatgtcaggtcaatattagccaacggagacattagaggaatcgtggatcagcgtctaagagagagatatgacgttggctcggcttggaaaatgtcagagatcgctcttgcttgtaccgagcacacttctgcgcagaggccaacgatgagtcaggtcgttatggagctgaaacagattgtttatggcatagtgactgatcaggaaaactacgatgactcgacgaaaatgcttacagtgaatctagacaccgagatggttcctcgagcaaggtagtgaatttcttcagagtag

SEQ ID NO: 96146 - protein, 876 aa, Arabidopsis thaliana
  peptide (1)..(876): Ceres Seq. ID no. 12732169
  misc_feature (1)..(876): Homolog of NCBI NO: 2129635 NR Description: serine/threonine-specific receptor protein kinase
  misc_feature (1)..(876): Homolog of NCBI NO: 15233796 NR Description: serine threonine-specific receptor protein kinase protein id: At4g29990.1 [Arabidopsis thaliana]
  misc_feature (7)..(876): Homolog of NCBI NO: 15224738 NR Description: putative receptor-like protein kinase; protein id:
  misc_feature (1)..(876): Homolog of NCBI NO: 15224743 NR Description: putative receptor-like protein kinase; protein id:
  misc_feature (1)..(844): Homolog of NCBI NO: 15221237 NR Description: putative light repressible receptor protein
  misc_feature (1)..(844): Homolog of NCBI NO: 25387099 NR Description: hypothetical protein [imported] - Arabidopsis >gi|4836918|gb|AAD30620.1|AC007153_12 Very Similar to light
  misc_feature (7)..(876): Homolog of NCBI NO: 15232537 NR Description: serine/threonine-specific protein kinase,
  misc_feature (7)..(575): Homolog of NCBI NO: 9294681 NR Description: receptor-like protein kinase [Arabidopsis
  misc_feature (549)..(876): Homolog of NCBI NO: 9294681 NR Description: receptor-like protein kinase [Arabidopsis
  misc_feature (10)..(681): Homolog of NCBI NO: 9837280 NR Description: leaf senescence-associated receptor-like protein
MAMLKSLSSILFTSFALLFFLVHAQDQSGFISIDCGIPDDSSYNDETTGIKYVSDSAFVDSGTTKRIAAQFQSSGFDRHLLNVRSFPQSKRSCYDVPTPRGKGFKYLIRTRFMYGNYDDLGRVPEFDLYLGVNFWDSVKLDDATTILNKEIITIPLLDNVQVCVVDKNAGTPFLSVLEIRLLLNTTYETPYDALTLLRRLDYSKTGKLPSRYKDDIYDRIWTPRIVSSEYKILNTSLTVDQFLNNGYQPASTVMSTAETARNESLYLTLSFRPPDPNAKFYVYMHFAEIEVLKSNQTREFSIWLNEDVISPSFKLRYLLTDTFVTPDPVSGITINFSLLQPPGEFVLPPIINALEVYQVNEFLQIPTHPQDVDAMRKIKATYRVKKNWQGDPCVPVDYSWEGIDCIQSDNTTNPRVVSLNISFSELRGQIDPAFSNLTSIRKLDLSGNTLTGEIPAFLANLPNLTELNVEGNKLTGIVPQRLHERSKNGSLSLRFGRNPDLCLSDSCSNTKKKNKNGYIIPLVVVGIIVVLLTALALFRRFKKKQQRGTLGERNGPLKTAKRYFKYSEVVNITNNFERVIGKGGFGKVYHGVINGEQVAVKVLSEESAQGYKEFRAEVDLLMRVHHTNLTSLVGYCNEINHMVLIYEYMANENLGDYLAGKRSFILSWEERLKISLDAAQGLEYLHNGCKPPIVHRDVKPTNILLNEKLQAKMADFGLSRSFSVEGSGQISTVVAGSIGYLDPEYYSTRQMNEKSDVYSLGVVLLEVITGQPAIASSKTEKVHISDHVRSILANGDIRGIVDQRLRERYDVGSAWKMSEIALACTEHTSAQRPTMSQVVMELKQIVYGIVTDQENYDDSTKMLTVNLDTEMVPRAR

SEQ ID NO: 96147 - protein, 874 aa, Arabidopsis thaliana
  peptide (1)..(874): Ceres Seq. ID no. 12732170
  misc_feature (1)..(874): Homolog of NCBI NO: 2129635 NR Description: serine/threonine-specific receptor protein kinase
  misc_feature (1)..(874): Homolog of NCBI NO: 15233796 NR Description: serine threonine-specific receptor protein kinase protein id: At4g29990.1 [Arabidopsis thaliana]
  misc_feature (5)..(874): Homolog of NCBI NO: 15224738 NR Description: putative receptor-like protein kinase; protein id:
  misc_feature (1)..(874): Homolog of NCBI NO: 15224743 NR Description: putative receptor-like protein kinase; protein id:
  misc_feature (1)..(842): Homolog of NCBI NO: 15221237 NR Description: putative light repressible receptor protein
  misc_feature (1)..(842): Homolog of NCBI NO: 25387099 NR Description: hypothetical protein [imported] - Arabidopsis >gi|4836918|gb|AAD30620.1|AC007153_12 Very Similar to light
  misc_feature (5)..(874): Homolog of NCBI NO: 15232537 NR Description: serine/threonine-specific protein kinase,
  misc_feature (5)..(573): Homolog of NCBI NO: 9294681 NR Description: receptor-like protein kinase [Arabidopsis
  misc_feature (547)..(874): Homolog of NCBI NO: 9294681 NR Description: receptor-like protein kinase [Arabidopsis
  misc_feature (8)..(679): Homolog of NCBI NO: 9837280 NR Description: leaf senescence-associated receptor-like protein
MLKSLSSILFTSFALLFFLVHAQDQSGFISIDCGIPDDSSYNDETTGIKYVSDSAFVDSGTTKRIAAQFQSSGFDRHLLNVRSFPQSKRSCYDVPTPRGKGFKYLIRTRFMYGNYDDLGRVPEFDLYLGVNFWDSVKLDDATTILNKEIITIPLLDNVQVCVVDKNAGTPFLSVLEIRLLLNTTYETPYDALTLLRRLDYSKTGKLPSRYKDDIYDRIWTPRIVSSEYKILNTSLTVDQFLNNGYQPASTVMSTAETARNESLYLTLSFRPPDPNAKFYVYMHFAEIEVLKSNQTREFSIWLNEDVISPSFKLRYLLTDTFVTPDPVSGITINFSLLQPPGEFVLPPIINALEVYQVNEFLQIPTHPQDVDAMRKIKATYRVKKNWQGDPCVPVDYSWEGIDCIQSDNTTNPRVVSLNISFSELRGQIDPAFSNLTSIRKLDLSGNTLTGEIPAFLANLPNLTELNVEGNKLTGIVPQRLHERSKNGSLSLRFGRNPDLCLSDSCSNTKKKNKNGYIIPLVVVGIIVVLLTALALFRRFKKKQQRGTLGERNGPLKTAKRYFKYSEVVNITNNFERVIGKGGFGKVYHGVINGEQVAVKVLSEESAQGYKEFRAEVDLLMRVHHTNLTSLVGYCNEINHMVLIYEYMANENLGDYLAGKRSFILSWEERLKISLDAAQGLEYLHNGCKPPIVHRDVKPTNILLNEKLQAKMADFGLSRSFSVEGSGQISTVVAGSIGYLDPEYYSTRQMNEKSDVYSLGVVLLEVITGQPAIASSKTEKVHISDHVRSILANGDIRGIVDQRLRERYDVGSAWKMSEIALACTEHTSAQRPTMSQVVMELKQIVYGIVTDQENYDDSTKMLTVNLDTEMVPRAR

SEQ ID NO: 96148 - protein, 764 aa, Arabidopsis thaliana
  peptide (1)..(764): Ceres Seq. ID no. 12732171
  misc_feature (1)..(764): Homolog of NCBI NO: 2129635 NR Description: serine/threonine-specific receptor protein kinase
  misc_feature (1)..(764): Homolog of NCBI NO: 15233796 NR Description: serine threonine-specific receptor protein kinase protein id: At4g29990.1 [Arabidopsis thaliana]
  misc_feature (1)..(764): Homolog of NCBI NO: 15224738 NR Description: putative receptor-like protein kinase; protein id:
  misc_feature (1)..(764): Homolog of NCBI NO: 15224743 NR Description: putative receptor-like protein kinase; protein id:
  misc_feature (1)..(732): Homolog of NCBI NO: 15221237 NR Description: putative light repressible receptor protein
  misc_feature (1)..(732): Homolog of NCBI NO: 25387099 NR Description: hypothetical protein [imported] - Arabidopsis >gi|4836918|gb|AAD30620.1|AC007153_12 Very Similar to light
  misc_feature (1)..(764): Homolog of NCBI NO: 15232537 NR Description: serine/threonine-specific protein kinase,
  misc_feature (1)..(463): Homolog of NCBI NO: 9294681 NR Description: receptor-like protein kinase [Arabidopsis
  misc_feature (437)..(764): Homolog of NCBI NO: 9294681 NR Description: receptor-like protein kinase [Arabidopsis
  misc_feature (1)..(569): Homolog of NCBI NO: 9837280 NR Description: leaf senescence-associated receptor-like protein
MYGNYDDLGRVPEFDLYLGVNFWDSVKLDDATTILNKEIITIPLLDNVQVCVVDKNAGTPFLSVLEIRLLLNTTYETPYDALTLLRRLDYSKTGKLPSRYKDDIYDRIWTPRIVSSEYKILNTSLTVDQFLNNGYQPASTVMSTAETARNESLYLTLSFRPPDPNAKFYVYMHFAEIEVLKSNQTREFSIWLNEDVISPSFKLRYLLTDTFVTPDPVSGITINFSLLQPPGEFVLPPIINALEVYQVNEFLQIPTHPQDVDAMRKIKATYRVKKNWQGDPCVPVDYSWEGIDCIQSDNTTNPRVVSLNISFSELRGQIDPAFSNLTSIRKLDLSGNTLTGEIPAFLANLPNLTELNVEGNKLTGIVPQRLHERSKNGSLSLRFGRNPDLCLSDSCSNTKKKNKNGYIIPLVVVGIIVVLLTALALFRRFKKKQQRGTLGERNGPLKTAKRYFKYSEVVNITNNFERVIGKGGFGKVYHGVINGEQVAVKVLSEESAQGYKEFRAEVDLLMRVHHTNLTSLVGYCNEINHMVLIYEYMANENLGDYLAGKRSFILSWEERLKISLDAAQGLEYLHNGCKPPIVHRDVKPTNILLNEKLQAKMADFGLSRSFSVEGSGQISTVVAGSIGYLDPEYYSTRQMNEKSDVYSLGVVLLEVITGQPAIASSKTEKVHISDHVRSILANGDIRGIVDQRLRERYDVGSAWKMSEIALACTEHTSAQRPTMSQVVMELKQIVYGIVTDQENYDDSTKMLTVNLDTEMVPRAR

SEQ ID NO: 96149 - DNA, 2646 bp, Arabidopsis thaliana
  misc_feature (1)..(2646): Ceres Seq. ID no. 12732172
  misc_feature: MA Experiment ID: 20001451 Result: Up-regulated in Transcription
  misc_feature: MA Experiment 20001451 PARAMETER Experiment Name: At_Far-red-induction_P Parameter: Age (day) Value: 7
  misc_feature: MA Experiment 20001451 PARAMETER Experiment Name: At_Far-red-induction_P Parameter: Light Value: Far-red vs. White
  misc_feature: MA Experiment 20001451 PARAMETER Experiment Name: At_Far-red-induction_P Parameter: Organism Value: A. thaliana
  misc_feature: MA Experiment 20001451 PARAMETER Experiment Name: At_Far-red-induction_P Parameter: Plant Line Value: Columbia
  misc_feature: MA Experiment 20001451 PARAMETER Experiment Name: At_Far-red-induction_P Parameter: Timepoint (hr) Value: 24
  misc_feature: MA Experiment 20001451 PARAMETER Experiment Name: At_Far-red-induction_P Parameter: Tissue Value: Whole Plant
atggtgcattacaactttctctcgctgattatatttgcatgcttcttcgctgtttttgttcttcttgttcgtgctcaagaccaatcaggttttgtcagtatagattgtggtatacctgaggattcaagctataatgatgaaacaacagacataaagtatgtttcagatgctgcgtttgttgagtctgggacaattcatagcatagatcctgagtttcaaacaagttctcttgagaagcagtttcaaaacgttaggagcttccctgaaggcaacagaaactgttacgatgtgaagcctccgcagggaaaaggcttcaagtatttgataagaacccgtttcatgtatggtaactacgataatctagggaaagcaccggacttcgatctttatcttgggttcaatatttgggattctgttacaatagataacgcaactacgatagttaccaaagagatcatccacactcttcgctcagaccatgttcatgtgtgtcttgttgataaaaacagaggaactccgttcctgtctgcgttagaaatcaggctcctgaagagtaatacatacgagactccttatgattcacttattctgtttaaaagatgggatcttgggggactcggtgctcttcccgtcaggtacaaagatgatgtttttgaccggatatggatacctctaaggtttccaaagtataccatcttcaatgcatcgctcacaatagattcgaataacaacgagggattccaacccgctcgctttgttatgaacactgcaacttcacctgaggatttaagccaagacataatcttttcttgggaaccaaaggatcctacttggaagtattttgtgtatatgcactttgcagaagttgtggagctgccaagtaatgagacaagagaatttaaggtgttattaaacgaaaaggaaatcaacatgagctcctttagcccgcgatacttgtatacagacacgctttttgttcagaaccccgtgagcggaccaaaactcgagtttcgtcttcaacaaactcctagatctacccttccacccatcattaacgccattgaaacatatcgtgtcaacgagtttctacagtcacctactgatcaacaagatgttgatgcaattatgagaatcaagtccaagtatggagtgaagaagagctggcttggggacccttgtgctccagtaaaatacccttggaaggatattaactgcagctatgtcgataatgagtctcccagaattatttctgtaaatttatcctcgagtggcttgactggagagattgatgcagcgttctcaaaccttacattgttacatatattagacttatcaaacaacagtttaacaggaaaaatacctgatttcctcggtaatctacataatttgacagagttaaacttggaaggaaacaagttatcgggtgctattccggttaaactattggagagatcaaacaaaaaactgattttgctaagaattgatgggaatccggacctctgcgtgtctgcttcatgtcaaatttcggatgagaagacaaaaaagaatgtatacatcattccattagtagcatctgtcgtgggagtgctaggtcttgtactagctatagctttgtttttgttgtacaagaagcgacacagaagaggcggctctggtggtgtcagggctgggccattggatacaactaagcgatactacaaatactcggaagttgtgaaagttacaaacaactttgagagagttcttggacaaggaggttttggaaaagtatatcatggtgtcttaaatgatgaccaagtcgctgtcaagattctgtctgaatcatcagctcaaggttacaaagagttcagagcagaggttgaacttctcctgagagtccatcacaagaacctaaccgctcttatcggatactgccacgaaggcaagaagatggcgcttatctatgagtttatggctaatggaaccttaggagattacttgtcaggggaaaaatcttatgtcttgagctgggaagagaggttacaaatatcactagacgcggcacaagggcttgagtatcttcacaatggctgcaagcctcccattgtacaaagagatgtgaagccggctaatattctaatcaacgagaagctccaggccaagattgctgactttggattatctagaagtgtcgcactagacggtaataaccaggatacaaccgctgttgctggaaccatcggttatctcgatcccgagtaccatttgacgcaaaaattaagcgagaagagtgatatttacagcttcggggtggttcttttagaggttgtctcaggccaaccggtgattgcacgttcaagaacaacagcagagaacatacacataactgaccgggtcgacttaatgctgtcgacaggagatatcagaggcattgtggatccaaagctaggagagaggtttgatgctggttcggcatggaagatcactgaagtagcaatggcttgtgcatcttctagttctaagaatagaccgacgatgagtcatgtagtggctgagctaaaggagagtgtaagcagagcaagagccggtggtggttctggcgccagtagtgtcacggatccagctatgacgaattttgattcgggaatgtttcctcaagcaaggtaa

SEQ ID NO: 96150 - protein, 881 aa, Arabidopsis thaliana
  peptide (1)..(881): Ceres Seq. ID no. 12732173
  misc_feature (20)..(881): Homolog of NCBI NO: 2129635 NR Description: serine/threonine-specific receptor protein kinase
  misc_feature (20)..(881): Homolog of NCBI NO: 15233796 NR Description: serine threonine-specific receptor protein kinase protein id: At4g29990.1 [Arabidopsis thaliana]
  misc_feature (7)..(881): Homolog of NCBI NO: 15224735 NR Description: putative receptor-like protein kinase; protein At2g19190.1, supported by cDNA: gi_19569556 [Arabidopsis
  misc_feature (1)..(852): Homolog of NCBI NO: 15221237 NR Description: putative light repressible receptor protein
  misc_feature (6)..(869): Homolog of NCBI NO: 15218033 NR Description: receptor protein kinase, putative; protein id: [Arabidopsis thaliana] >gi|25405499|pir||B96557 probable receptor
  misc_feature (15)..(683): Homolog of NCBI NO: 9837280 NR Description: leaf senescence-associated receptor-like protein
  misc_feature (683)..(881): Homolog of NCBI NO: 9837280 NR Description: leaf senescence-associated receptor-like protein
  misc_feature (7)..(881): Homolog of NCBI NO: 15232537 NR Description: serine/threonine-specific protein kinase,
  misc_feature (7)..(881): Homolog of NCBI NO: 15227017 NR Description: putative receptor-like protein kinase; protein id:
  misc_feature (5)..(881): Homolog of NCBI NO: 25387154 NR Description: protein F22G5.6 [imported] - Arabidopsis thaliana
MVHYNFLSLIIFACFFAVFVLLVRAQDQSGFVSIDCGIPEDSSYNDETTDIKYVSDAAFVESGTIHSIDPEFQTSSLEKQFQNVRSFPEGNRNCYDVKPPQGKGFKYLIRTRFMYGNYDNLGKAPDFDLYLGFNIWDSVTIDNATTIVTKEIIHTLRSDHVHVCLVDKNRGTPFLSALEIRLLKSNTYETPYDSLILFKRWDLGGLGALPVRYKDDVFDRIWIPLRFPKYTIFNASLTIDSNNNEGFQPARFVMNTATSPEDLSQDIIFSWEPKDPTWKYFVYMHFAEVVELPSNETREFKVLLNEKEINMSSFSPRYLYTDTLFVQNPVSGPKLEFRLQQTPRSTLPPIINAIETYRVNEFLQSPTDQQDVDAIMRIKSKYGVKKSWLGDPCAPVKYPWKDINCSYVDNESPRIISVNLSSSGLTGEIDAAFSNLTLLHILDLSNNSLTGKIPDFLGNLHNLTELNLEGNKLSGAIPVKLLERSNKKLILLRIDGNPDLCVSASCQISDEKTKKNVYIIPLVASVVGVLGLVLAIALFLLYKKRHRRGGSGGVRAGPLDTTKRYYKYSEVVKVTNNFERVLGQGGFGKVYHGVLNDDQVAVKILSESSAQGYKEFRAEVELLLRVHHKNLTALIGYCHEGKKMALIYEFMANGTLGDYLSGEKSYVLSWEERLQISLDAAQGLEYLHNGCKPPIVQRDVKPANILINEKLQAKIADFGLSRSVALDGNNQDTTAVAGTIGYLDPEYHLTQKLSEKSDIYSFGVVLLEVVSGQPVIARSRTTAENIHITDRVDLMLSTGDIRGIVDPKLGERFDAGSAWKITEVAMACASSSSKNRPTMSHVVAELKESVSRARAGGGSGASSVTDPAMTNFDSGMFPQAR

SEQ ID NO: 96151 - protein, 768 aa, Arabidopsis thaliana
  peptide (1)..(768): Ceres Seq. ID no. 12732174
  misc_feature (1)..(768): Homolog of NCBI NO: 2129635 NR Description: serine/threonine-specific receptor protein kinase
  misc_feature (1)..(768): Homolog of NCBI NO: 15233796 NR Description: serine threonine-specific receptor protein kinase protein id: At4g29990.1 [Arabidopsis thaliana]
  misc_feature (1)..(768): Homolog of NCBI NO: 15224735 NR Description: putative receptor-like protein kinase; protein At2g19190.1, supported by cDNA: gi_19569556 [Arabidopsis
  misc_feature (1)..(739): Homolog of NCBI NO: 15221237 NR Description: putative light repressible receptor protein
  misc_feature (1)..(756): Homolog of NCBI NO: 15218033 NR Description: receptor protein kinase, putative; protein id: [Arabidopsis thaliana] >gi|25405499|pir||B96557 probable receptor
  misc_feature (1)..(570): Homolog of NCBI NO: 9837280 NR Description: leaf senescence-associated receptor-like protein
  misc_feature (570)..(768): Homolog of NCBI NO: 9837280 NR Description: leaf senescence-associated receptor-like protein
  misc_feature (1)..(768): Homolog of NCBI NO: 15232537 NR Description: serine/threonine-specific protein kinase,
  misc_feature (1)..(768): Homolog of NCBI NO: 15227017 NR Description: putative receptor-like protein kinase; protein id:
  misc_feature (1)..(768): Homolog of NCBI NO: 25387154 NR Description: protein F22G5.6 [imported] - Arabidopsis thaliana
MYGNYDNLGKAPDFDLYLGFNIWDSVTIDNATTIVTKEIIHTLRSDHVHVCLVDKNRGTPFLSALEIRLLKSNTYETPYDSLILFKRWDLGGLGALPVRYKDDVFDRIWIPLRFPKYTIFNASLTIDSNNNEGFQPARFVMNTATSPEDLSQDIIFSWEPKDPTWKYFVYMHFAEVVELPSNETREFKVLLNEKEINMSSFSPRYLYTDTLFVQNPVSGPKLEFRLQQTPRSTLPPIINAIETYRVNEFLQSPTDQQDVDAIMRIKSKYGVKKSWLGDPCAPVKYPWKDINCSYVDNESPRIISVNLSSSGLTGEIDAAFSNLTLLHILDLSNNSLTGKIPDFLGNLHNLTELNLEGNKLSGAIPVKLLERSNKKLILLRIDGNPDLCVSASCQISDEKTKKNVYIIPLVASVVGVLGLVLAIALFLLYKKRHRRGGSGGVRAGPLDTTKRYYKYSEVVKVTNNFERVLGQGGFGKVYHGVLNDDQVAVKILSESSAQGYKEFRAEVELLLRVHHKNLTALIGYCHEGKKMALIYEFMANGTLGDYLSGEKSYVLSWEERLQISLDAAQGLEYLHNGCKPPIVQRDVKPANILINEKLQAKIADFGLSRSVALDGNNQDTTAVAGTIGYLDPEYHLTQKLSEKSDIYSFGVVLLEVVSGQPVIARSRTTAENIHITDRVDLMLSTGDIRGIVDPKLGERFDAGSAWKITEVAMACASSSSKNRPTMSHVVAELKESVSRARAGGGSGASSVTDPAMTNFDSGMFPQAR

SEQ ID NO: 96152 - protein, 628 aa, Arabidopsis thaliana
  peptide (1)..(628): Ceres Seq. ID no. 12732175
  misc_feature (1)..(628): Homolog of NCBI NO: 2129635 NR Description: serine/threonine-specific receptor protein kinase
  misc_feature (1)..(628): Homolog of NCBI NO: 15233796 NR Description: serine threonine-specific receptor protein kinase protein id: At4g29990.1 [Arabidopsis thaliana]
  misc_feature (1)..(628): Homolog of NCBI NO: 15224735 NR Description: putative receptor-like protein kinase; protein At2g19190.1, supported by cDNA: gi_19569556 [Arabidopsis
  misc_feature (1)..(599): Homolog of NCBI NO: 15221237 NR Description: putative light repressible receptor protein
  misc_feature (1)..(616): Homolog of NCBI NO: 15218033 NR Description: receptor protein kinase, putative; protein id: [Arabidopsis thaliana] >gi|25405499|pir||B96557 probable receptor
  misc_feature (1)..(430): Homolog of NCBI NO: 9837280 NR Description: leaf senescence-associated receptor-like protein
  misc_feature (430)..(628): Homolog of NCBI NO: 9837280 NR Description: leaf senescence-associated receptor-like protein
  misc_feature (1)..(628): Homolog of NCBI NO: 15232537 NR Description: serine/threonine-specific protein kinase,
  misc_feature (1)..(628): Homolog of NCBI NO: 15227017 NR Description: putative receptor-like protein kinase; protein id:
  misc_feature (1)..(628): Homolog of NCBI NO: 25387154 NR Description: protein F22G5.6 [imported] - Arabidopsis thaliana
MNTATSPEDLSQDIIFSWEPKDPTWKYFVYMHFAEVVELPSNETREFKVLLNEKEINMSSFSPRYLYTDTLFVQNPVSGPKLEFRLQQTPRSTLPPIINAIETYRVNEFLQSPTDQQDVDAIMRIKSKYGVKKSWLGDPCAPVKYPWKDINCSYVDNESPRIISVNLSSSGLTGEIDAAFSNLTLLHILDLSNNSLTGKIPDFLGNLHNLTELNLEGNKLSGAIPVKLLERSNKKLILLRIDGNPDLCVSASCQISDEKTKKNVYIIPLVASVVGVLGLVLAIALFLLYKKRHRRGGSGGVRAGPLDTTKRYYKYSEVVKVTNNFERVLGQGGFGKVYHGVLNDDQVAVKILSESSAQGYKEFRAEVELLLRVHHKNLTALIGYCHEGKKMALIYEFMANGTLGDYLSGEKSYVLSWEERLQISLDAAQGLEYLHNGCKPPIVQRDVKPANILINEKLQAKIADFGLSRSVALDGNNQDTTAVAGTIGYLDPEYHLTQKLSEKSDIYSFGVVLLEVVSGQPVIARSRTTAENIHITDRVDLMLSTGDIRGIVDPKLGERFDAGSAWKITEVAMACASSSSKNRPTMSHVVAELKESVSRARAGGGSGASSVTDPAMTNFDSGMFPQAR

SEQ ID NO: 96153 - DNA, 642 bp, Arabidopsis thaliana
  misc_feature (1)..(642): Ceres Seq. ID no. 12732179
  misc_feature: MA Experiment ID: 20000437 Result: Down-regulated in Transcription
  misc_feature: MA Experiment 20000437 PARAMETER Experiment Name: At_Drought_P Parameter: Age (day) Value: 8
  misc_feature: MA Experiment 20000437 PARAMETER Experiment Name: At_Drought_P Parameter: Organism Value: A. thaliana
  misc_feature: MA Experiment 20000437 PARAMETER Experiment Name: At_Drought_P Parameter: Plant Line Value: WS
  misc_feature: MA Experiment 20000437 PARAMETER Experiment Name: At_Drought_P Parameter: Timepoint (hr) Value: 24
  misc_feature: MA Experiment 20000437 PARAMETER Experiment Name: At_Drought_P Parameter: Tissue Value: Whole Plant
  misc_feature: MA Experiment 20000437 PARAMETER Experiment Name: At_Drought_P Parameter: Treatment Value: Drought vs. No Drought
  misc_feature: MA Experiment ID: 20000439 Result: Down-regulated in Transcription
  misc_feature: MA Experiment 20000439 PARAMETER Experiment Name: At_Roots__P Parameter: Age (day) Value: 14 vs. 21
  misc_feature: MA Experiment 20000439 PARAMETER Experiment Name: At_Roots__P Parameter: Organism Value: A. thaliana
  misc_feature: MA Experiment 20000439 PARAMETER Experiment Name: At_Roots__P Parameter: Tissue Value: Roots vs. Whole Plant
  misc_feature: MA Experiment ID: 20001556 Result: Down-regulated in Transcription
  misc_feature: MA Experiment 20001556 PARAMETER Experiment Name: At_Drought_Soil_Dry_P Parameter: Age (day) Value: 26
  misc_feature: MA Experiment 20001556 PARAMETER Experiment Name: At_Drought_Soil_Dry_P Parameter: Organism Value: A. thaliana
  misc_feature: MA Experiment 20001556 PARAMETER Experiment Name: At_Drought_Soil_Dry_P Parameter: Plant Line Value: WS
  misc_feature: MA Experiment 20001556 PARAMETER Experiment Name: At_Drought_Soil_Dry_P Parameter: Post Timepoint (hr) Value: None
  misc_feature: MA Experiment 20001556 PARAMETER Experiment Name: At_Drought_Soil_Dry_P Parameter: Post-Treatment Value: None
  misc_feature: MA Experiment 20001556 PARAMETER Experiment Name: At_Drought_Soil_Dry_P Parameter: Timepoint (day) Value: 12
  misc_feature: MA Experiment 20001556 PARAMETER Experiment Name: At_Drought_Soil_Dry_P Parameter: Treatment Value: Drought vs. No Drought
atggttcatccaaatggacaaacaaacaggaccatagtactcaacttgaaaccattgaagctggtgtgcactgtactttataatgatactaaccctcgatactttgtctactggactaatgattcatatacacaacatggttgctataacaatctttgctccggctttgttgttgtcaaccaagcatttgctctaggcgcggccgttcctgaagtttctatccgtgatggtctacaatacgaaattttcacaagtatatggaaggatcgtagttcaggaaattggtggttgaaatttggtactcatttaattgttggatattggccttcttcattgttcaatcgcttaggagatgctgcgagccaagttcattggggaggcgaaatagtaaacgtaaaggagaacaaccaacacacgtcaacacaaatgggaagtgggtcgtttgcaataaatggatttagaaaggctagttattttaggaatattttagtacttgatgaaaacaatactacgaagcaacctgtaggtgcttctacatctgagacggaaggaagttgttatgacatcaggtatcgcactgatcaagcatggggaagtttcttttactatggtggtcctggtcgaagtcctttttgtgcttga

SEQ ID NO: 96154 - protein, 213 aa, Arabidopsis thaliana
  peptide (1)..(213): Ceres Seq. ID no. 12732180
  misc_feature (1)..(170): Pfam Name: Arabidopsis proteins of unknown function Pfam Description: Arabidopsis proteins of unknown function
  misc_feature (1)..(213): Homolog of NCBI NO: 30680647 NR Description: hypothetical protein [Arabidopsis thaliana]
  misc_feature (26)..(212): Homolog of NCBI NO: 15241244 NR Description: putative protein; protein id: At5g56530.1, by cDNA: gi_17381169 [Arabidopsis thaliana]
  misc_feature (27)..(212): Homolog of NCBI NO: 15227888 NR Description: unknown protein; protein id: At2g17750.1
  misc_feature (26)..(212): Homolog of NCBI NO: 30103019 NR Description: unknown protein [Oryza sativa (japonica
  misc_feature (26)..(212): Homolog of NCBI NO: 34393554 NR Description: putative carboxyl-terminal proteinase [Oryza
  misc_feature (26)..(212): Homolog of NCBI NO: 34393299 NR Description: putative DD1A protein [Oryza sativa (japonica
  misc_feature (26)..(212): Homolog of NCBI NO: 15222707 NR Description: unknown protein; protein id: At1g55360.1
  misc_feature (26)..(212): Homolog of NCBI NO: 27311623 NR Description: unknown protein [Arabidopsis thaliana]
  misc_feature (26)..(212): Homolog of NCBI NO: 6573746 NR Description: F20B24.18 [Arabidopsis thaliana]
  misc_feature (26)..(212): Homolog of NCBI NO: 15220207 NR Description: putative carboxyl-terminal peptidase; protein id:
MVHPNGQTNRTIVLNLKPLKLVCTVLYNDTNPRYFVYWTNDSYTQHGCYNNLCSGFVVVNQAFALGAAVPEVSIRDGLQYEIFTSIWKDRSSGNWWLKFGTHLIVGYWPSSLFNRLGDAASQVHWGGEIVNVKENNQHTSTQMGSGSFAINGFRKASYFRNILVLDENNTTKQPVGASTSETEGSCYDIRYRTDQAWGSFFYYGGPGRSPFCA

SEQ ID NO: 96155 - DNA, 1557 bp, Arabidopsis thaliana
  misc_feature (1)..(1557): Ceres Seq. ID no. 12732193
  misc_feature: MA Experiment ID: 108434 Result: Up-regulated in Transcription
  misc_feature: MA Experiment 108434 PARAMETER Experiment Name: At_Root_Tips_cDNA_P Parameter: Tissue Value: Root Tips
  misc_feature: MA Experiment ID: 108462 Result: Down-regulated in Transcription
  misc_feature: MA Experiment 108462 PARAMETER Experiment Name: At_Germinating_Seeds_cDNA_P Parameter: Age (day) Value: 2 vs. 0
  misc_feature: MA Experiment 108462 PARAMETER Experiment Name: At_Germinating_Seeds_cDNA_P Parameter: Tissue Value: Germinating Seeds
  misc_feature: MA Experiment ID: 108463 Result: Down-regulated in Transcription
  misc_feature: MA Experiment 108463 PARAMETER Experiment Name: At_Germinating_Seeds_cDNA_P Parameter: Age (day) Value: 3 vs. 0
  misc_feature: MA Experiment 108463 PARAMETER Experiment Name: At_Germinating_Seeds_cDNA_P Parameter: Tissue Value: Germinating Seeds
  misc_feature: MA Experiment ID: 108464 Result: Down-regulated in Transcription
  misc_feature: MA Experiment 108464 PARAMETER Experiment Name: At_Germinating_Seeds_cDNA_P Parameter: Age (day) Value: 4 vs. 0
  misc_feature: MA Experiment 108464 PARAMETER Experiment Name: At_Germinating_Seeds_cDNA_P Parameter: Tissue Value: Germinating Seeds
  misc_feature: MA Experiment ID: 108573 Result: Down-regulated in Transcription
  misc_feature: MA Experiment 108573 PARAMETER Experiment Name: At_Drought_cDNA_P Parameter: Timepoint (hr) Value: 6
  misc_feature: MA Experiment 108573 PARAMETER Experiment Name: At_Drought_cDNA_P Parameter: Tissue Value: Aerial
  misc_feature: MA Experiment 108573 PARAMETER Experiment Name: At_Drought_cDNA_P Parameter: Treatment Value: Drought vs. No Drought
  misc_feature: MA Experiment ID: 20000224 Result: Up-regulated in Transcription
  misc_feature: MA Experiment ID: 20001451 Result: Up-regulated in Transcription
  misc_feature: MA Experiment 20001451 PARAMETER Experiment Name: At_Far-red-induction_P Parameter: Age (day) Value: 7
  misc_feature: MA Experiment 20001451 PARAMETER Experiment Name: At_Far-red-induction_P Parameter: Light Value: Far-red vs. White
  misc_feature: MA Experiment 20001451 PARAMETER Experiment Name: At_Far-red-induction_P Parameter: Organism Value: A. thaliana
  misc_feature: MA Experiment 20001451 PARAMETER Experiment Name: At_Far-red-induction_P Parameter: Plant Line Value: Columbia
  misc_feature: MA Experiment 20001451 PARAMETER Experiment Name: At_Far-red-induction_P Parameter: Timepoint (hr) Value: 24
  misc_feature: MA Experiment 20001451 PARAMETER Experiment Name: At_Far-red-induction_P Parameter: Tissue Value: Whole Plant
  misc_feature: MA Experiment ID: 20001557 Result: Up-regulated in Transcription
  misc_feature: MA Experiment 20001557 PARAMETER Experiment Name: At_Drought_Soil_Dry_P Parameter: Age (day) Value: 27
  misc_feature: MA Experiment 20001557 PARAMETER Experiment Name: At_Drought_Soil_Dry_P Parameter: Organism Value: A. thaliana
  misc_feature: MA Experiment 20001557 PARAMETER Experiment Name: At_Drought_Soil_Dry_P Parameter: Plant Line Value: WS
  misc_feature: MA Experiment 20001557 PARAMETER Experiment Name: At_Drought_Soil_Dry_P Parameter: Post Timepoint (hr) Value: 3
  misc_feature: MA Experiment 20001557 PARAMETER Experiment Name: At_Drought_Soil_Dry_P Parameter: Post-Treatment Value: Re-Water vs. No Drought
  misc_feature: MA Experiment 20001557 PARAMETER Experiment Name: At_Drought_Soil_Dry_P Parameter: Timepoint (day) Value: 13
  misc_feature: MA Experiment 20001557 PARAMETER Experiment Name: At_Drought_Soil_Dry_P Parameter: Treatment Value: Drought vs. No Drought
  misc_feature: MA Experiment ID: 20001558 Result: Up-regulated in Transcription
  misc_feature: MA Experiment 20001558 PARAMETER Experiment Name: At_Drought_Soil_Dry_P Parameter: Age (day) Value: 27
  misc_feature: MA Experiment 20001558 PARAMETER Experiment Name: At_Drought_Soil_Dry_P Parameter: Organism Value: A. thaliana
  misc_feature: MA Experiment 20001558 PARAMETER Experiment Name: At_Drought_Soil_Dry_P Parameter: Plant Line Value: WS
  misc_feature: MA Experiment 20001558 PARAMETER Experiment Name: At_Drought_Soil_Dry_P Parameter: Post Timepoint (hr) Value: 6
  misc_feature: MA Experiment 20001558 PARAMETER Experiment Name: At_Drought_Soil_Dry_P Parameter: Post-Treatment Value: Re-Water vs. No Drought
  misc_feature: MA Experiment 20001558 PARAMETER Experiment Name: At_Drought_Soil_Dry_P Parameter: Timepoint (day) Value: 13
  misc_feature: MA Experiment 20001558 PARAMETER Experiment Name: At_Drought_Soil_Dry_P Parameter: Treatment Value: Drought vs. No Drought
ttttagttatttatatatatattctctgtctcgtatttgtccccaaaaatctagggttttaaggtttcttatccttcctcttcctccgccagattcttttcttgcgaagatgagcaacgacaaggacagcatgaacatgtccgatctctccaccgctcttaacgaggaggatcgtgccgggcttgttaatgctcttaagaacaagttgcagaatttggctggacaacactctgatgtccttgaaaacttgactccaccagtcaggaagcgtgtcgagtttctaagagagattcagaaccaatatgatgagatggaagcaaaattctttgaggagagagcagctcttgaagctaagtatcaaaagttatatcagcctttatataccaagcgatatgagattgtgaatggtgtggtcgaagttgaaggtgcagctgaagaagtaaaatccgaacaaggagaagataaatcagctgaagagaaaggagtaccagatttctggcttattgcattgaagaacaatgaaattactgcggaagagataactgagcgagatgaaggggctctcaagtatctcaaagatatcaagtggagtagggttgaagaaccaaaagggttcaagcttgagtttttctttgatcagaatccttacttcaagaacactgtcttgaccaagacatatcacatgattgatgaagatgagcctatccttgagaaggccctcgggacggagattgagtggtatcctggaaagtgtttgacacagaagattctaaaaaagaagccaaagaaaggatccaaaaacacaaagccgatcactaagactgaggactgtgagagtttcttcaactttttcagtccacctcaagttcctgacgatgatgaggatcttgatgatgacatggctgatgaactccaaggacaaatggagcatgattatgatatcggttcaacaatcaaagagaaaatcatctcgcatgctgtgtcatggttcactggtgaagctgttgaggcagatgaccttgatattgaggacgacgatgatgagattgatgaagatgatgatgaagaggacgaggaagatgatgaggatgacgaggaggaggatgatgaggatgatgacgaggaggaagaagcagatcaaggaaagaagagcaaaaagaagtcatcagctgggcacaagaaggctggaagaagtcaacttgcggaaggtcaagcaggtgagaggccaccggaatgtaagcagcagtgaagaagtgaagaatcttggcttagttatgatgaagaagaagagtgaagagtgtctttgagccgaggttgtgtttctttaatttgcagagtcatggtccggtttattatatatcagttttgggtgattggtttgctatttaaaaaaaaaaaatgggttctttggtttggtttgtgtctcttgatttttccttttgtaatgatcttatgaatttgtttcgagttaatgtcgttctctggtcagatttcgaattcaattctatttatcctccctcgttaatgagagaatttgtgagacaatctagtttactt

SEQ ID NO: 96156 - protein, 415 aa, Arabidopsis thaliana; identical to SEQ ID NO: 22227
  peptide (1)..(415): Ceres Seq. ID no. 12732194
  misc_feature (88)..(336): Pfam Name: Nucleosome assembly protein (NAP) Pfam Description: Nucleosome assembly protein (NAP)
  misc_feature (37)..(415): Homolog of NCBI NO: 15224782 NR Description: putative nucleosome assembly protein; protein id:
  misc_feature (37)..(415): Homolog of NCBI NO: 18423918 NR Description: nucleosome assembly protein; protein id: supported by cDNA: gi_13877572, supported by cDNA: gi_17978720 thaliana] >gi|13877573|gb|AAK43864.1|AF370487_1 nucleosome
  misc_feature (37)..(415): Homolog of NCBI NO: 8777435 NR Description: nucleosome assembly protein [Arabidopsis thaliana]
  misc_feature (36)..(415): Homolog of NCBI NO: 549975 NR Description: nucleosome assembly protein I-like protein;
  misc_feature (37)..(415): Homolog of NCBI NO: 15236115 NR Description: nucleosome assembly protein I-like protein; id: At4g26110.1, supported by cDNA: gi_15450807, supported by
  misc_feature (37)..(415): Homolog of NCBI NO: 7488816 NR Description: nucleosome assembly protein 1 - garden pea
  misc_feature (37)..(415): Homolog of NCBI NO: 29569109 NR Description: nucleosome/chromatin assembly factor group A [Zea
  misc_feature (37)..(415): Homolog of NCBI NO: 2129840 NR Description: nucleosome assembly protein 1 - soybean
  misc_feature (37)..(415): Homolog of NCBI NO: 21898560 NR Description: nucleosome/chromatin assembly factor group A [Zea
  misc_feature (53)..(359): Homolog of NCBI NO: 34910504 NR Description: putative nucleosome assembly protein 1 [Oryza

SEQ ID NO: 96157 - protein, 379 aa, Arabidopsis thaliana; identical to SEQ ID NO: 22228
  peptide (1)..(379): Ceres Seq. ID no. 12732195
  misc_feature (52)..(300): Pfam Name: Nucleosome assembly protein (NAP) Pfam Description: Nucleosome assembly protein (NAP)
  misc_feature (1)..(379): Homolog of NCBI NO: 15224782 NR Description: putative nucleosome assembly protein; protein id:
  misc_feature (1)..(379): Homolog of NCBI NO: 18423918 NR Description: nucleosome assembly protein; protein id: supported by cDNA: gi_13877572, supported by cDNA: gi_17978720 thaliana] >gi|13877573|gb|AAK43864.1|AF370487_1 nucleosome
  misc_feature (1)..(379): Homolog of NCBI NO: 8777435 NR Description: nucleosome assembly protein [Arabidopsis thaliana]
  misc_feature (1)..(379): Homolog of NCBI NO: 549975 NR Description: nucleosome assembly protein I-like protein;
  misc_feature (1)..(379): Homolog of NCBI NO: 15236115 NR Description: nucleosome assembly protein I-like protein; id: At4g26110.1, supported by cDNA: gi_15450807, supported by
  misc_feature (1)..(379): Homolog of NCBI NO: 7488816 NR Description: nucleosome assembly protein 1 - garden pea
  misc_feature (1)..(379): Homolog of NCBI NO: 29569109 NR Description: nucleosome/chromatin assembly factor group A [Zea
  misc_feature (1)..(379): Homolog of NCBI NO: 2129840 NR Description: nucleosome assembly protein 1 - soybean
  misc_feature (1)..(379): Homolog of NCBI NO: 21898560 NR Description: nucleosome/chromatin assembly factor group A [Zea
  misc_feature (17)..(323): Homolog of NCBI NO: 34910504 NR Description: putative nucleosome assembly protein 1 [Oryza

SEQ ID NO: 96158 - protein, 372 aa, Arabidopsis thaliana; identical to SEQ ID NO: 22229
  peptide (1)..(372): Ceres Seq. ID no. 12732196
  misc_feature (45)..(293): Pfam Name: Nucleosome assembly protein (NAP) Pfam Description: Nucleosome assembly protein (NAP)
  misc_feature (1)..(372): Homolog of NCBI NO: 15224782 NR Description: putative nucleosome assembly protein; protein id:
  misc_feature (1)..(372): Homolog of NCBI NO: 18423918 NR Description: nucleosome assembly protein; protein id: supported by cDNA: gi_13877572, supported by cDNA: gi_17978720 thaliana] >gi|13877573|gb|AAK43864.1|AF370487_1 nucleosome
  misc_feature (1)..(372): Homolog of NCBI NO: 8777435 NR Description: nucleosome assembly protein [Arabidopsis thaliana]
  misc_feature (1)..(372): Homolog of NCBI NO: 549975 NR Description: nucleosome assembly protein I-like protein;
  misc_feature (1)..(372): Homolog of NCBI NO: 15236115 NR Description: nucleosome assembly protein I-like protein; id: At4g26110.1, supported by cDNA: gi_15450807, supported by
  misc_feature (1)..(372): Homolog of NCBI NO: 7488816 NR Description: nucleosome assembly protein 1 - garden pea
  misc_feature (1)..(372): Homolog of NCBI NO: 29569109 NR Description: nucleosome/chromatin assembly factor group A [Zea
  misc_feature (1)..(372): Homolog of NCBI NO: 2129840 NR Description: nucleosome assembly protein 1 - soybean
  misc_feature (1)..(372): Homolog of NCBI NO: 21898560 NR Description: nucleosome/chromatin assembly factor group A [Zea
  misc_feature (10)..(316): Homolog of NCBI NO: 34910504 NR Description: putative nucleosome assembly protein 1 [Oryza

SEQ ID NO: 96159 - DNA, 999 bp, Arabidopsis thaliana
  misc_feature (1)..(999): Ceres Seq. ID no. 12732197
  misc_feature: MA Experiment ID: 20001557 Result: Down-regulated in Transcription
  misc_feature: MA Experiment 20001557 PARAMETER Experiment Name: At_Drought_Soil_Dry_P Parameter: Age (day) Value: 27
  misc_feature: MA Experiment 20001557 PARAMETER Experiment Name: At_Drought_Soil_Dry_P Parameter: Organism Value: A. thaliana
  misc_feature: MA Experiment 20001557 PARAMETER Experiment Name: At_Drought_Soil_Dry_P Parameter: Plant Line Value: WS
  misc_feature: MA Experiment 20001557 PARAMETER Experiment Name: At_Drought_Soil_Dry_P Parameter: Post Timepoint (hr) Value: 3
  misc_feature: MA Experiment 20001557 PARAMETER Experiment Name: At_Drought_Soil_Dry_P Parameter: Post-Treatment Value: Re-Water vs. No Drought
  misc_feature: MA Experiment 20001557 PARAMETER Experiment Name: At_Drought_Soil_Dry_P Parameter: Timepoint (day) Value: 13
  misc_feature: MA Experiment 20001557 PARAMETER Experiment Name: At_Drought_Soil_Dry_P Parameter: Treatment Value: Drought vs. No Drought
atgaagccaacgaagatcgtgattccgaaccgccgcaacgagaagctcgtgggtctgcttcacgaaactggatcaaaagaagttgtggtcttatgccatggctttagatcggacaagaccaacaagattctcaaaaacgtggctacagctttggagaaagaaaaaatcagctcttttcgtttcgatttctctggtaacggagatagtgaaggaactttctattatggtaacttcaacagtgaagcagaggatgatctgcattacgttattcaacacttgtcctcctctaacatcatgaaccgtctagttcctgtcattcttggtcatagtaaaggtggtgatgtcgttcttctctatgcttccaagtttcccgattatatccgcaatgtcgtcaatatctctggacgttttgatcttaagaatgatgtgcgtctcggagatggttatatagaaaagattaaggaacaggggtttattgatgctacagagggcaaatcttgttttcgtgttactcaagagtctttaatggataggttaaacactgatatgcatcaagcttgtctcaatattgataaacaatgcaaagttttgacagttcatggttcggatgataccgtggtacctggggaagatgctaaggagtttgcaaaggttataccgaatcataagctggagattgtggaaggagctaatcatggttacaccaaacatcagaaggaattggtttccatagcggtggagtttaccaagactgcgattgttgaacaacacaatttgttagttgtctttgggagatggctcatcatcgtcatgatagttgttacattctacatgagtgttttcgatcatttaatcaaagtttatccactacttgtaattttcaaattggagaatgttatgagcagaattcaacaattaatctacttgatttttttttacttgttaaggattaaactattattaggcttgtggcttctgttactggagaggagaatgtaa

SEQ ID NO: 96160 - protein, 332 aa, Arabidopsis thaliana
  peptide (1)..(332): Ceres Seq. ID no. 12732198
  misc_feature (1)..(332): Homolog of NCBI NO: 15224799 NR Description: putative esterase; protein id: At2g19550.1
  misc_feature (5)..(257): Homolog of NCBI NO: 15228202 NR Description: putative protein; protein id: At3g47590.1
  misc_feature (5)..(257): Homolog of NCBI NO: 15220578 NR Description: hypothetical protein; protein id: At1g29840.1
  misc_feature (5)..(258): Homolog of NCBI NO: 15232826 NR Description: putative protein; protein id: At3g47560.1, by cDNA: 262295. [Arabidopsis thaliana] >gi|11281956|pir||T45716
  misc_feature (5)..(251): Homolog of NCBI NO: 21554728 NR Description: putative esterase [Arabidopsis thaliana]
  misc_feature (5)..(258): Homolog of NCBI NO: 22135864 NR Description: putative protein [Arabidopsis thaliana]
  misc_feature (5)..(250): Homolog of NCBI NO: 11358640 NR Description: probable esterase-like protein - Arabidopsis
  misc_feature (5)..(250): Homolog of NCBI NO: 18416707 NR Description: putative esterase - like protein; protein id:
  misc_feature (5)..(248): Homolog of NCBI NO: 34913064 NR Description: P0013G02.24 [Oryza sativa (japonica
  misc_feature (5)..(250): Homolog of NCBI NO: 21595418 NR Description: putative esterase-like protein [Arabidopsis
MKPTKIVIPNRRNEKLVGLLHETGSKEVVVLCHGFRSDKTNKILKNVATALEKEKISSFRFDFSGNGDSEGTFYYGNFNSEAEDDLHYVIQHLSSSNIMNRLVPVILGHSKGGDVVLLYASKFPDYIRNVVNISGRFDLKNDVRLGDGYIEKIKEQGFIDATEGKSCFRVTQESLMDRLNTDMHQACLNIDKQCKVLTVHGSDDTVVPGEDAKEFAKVIPNHKLEIVEGANHGYTKHQKELVSIAVEFTKTAIVEQHNLLVVFGRWLIIVMIVVTFYMSVFDHLIKVYPLLVIFKLENVMSRIQQLIYLIFFYLLRIKLLLGLWLLLLERRM

SEQ ID NO: 96161 - protein, 234 aa, Arabidopsis thaliana
  peptide (1)..(234): Ceres Seq. ID no. 12732199
  misc_feature (1)..(234): Homolog of NCBI NO: 15224799 NR Description: putative esterase; protein id: At2g19550.1
  misc_feature (1)..(159): Homolog of NCBI NO: 15228202 NR Description: putative protein; protein id: At3g47590.1
  misc_feature (1)..(159): Homolog of NCBI NO: 15220578 NR Description: hypothetical protein; protein id: At1g29840.1
  misc_feature (1)..(160): Homolog of NCBI NO: 15232826 NR Description: putative protein; protein id: At3g47560.1, by cDNA: 262295. [Arabidopsis thaliana] >gi|11281956|pir||T45716
  misc_feature (1)..(153): Homolog of NCBI NO: 21554728 NR Description: putative esterase [Arabidopsis thaliana]
  misc_feature (1)..(160): Homolog of NCBI NO: 22135864 NR Description: putative protein [Arabidopsis thaliana]
  misc_feature (1)..(152): Homolog of NCBI NO: 11358640 NR Description: probable esterase-like protein - Arabidopsis
  misc_feature (1)..(152): Homolog of NCBI NO: 18416707 NR Description: putative esterase - like protein; protein id:
  misc_feature (1)..(150): Homolog of NCBI NO: 34913064 NR Description: P0013G02.24 [Oryza sativa (japonica
  misc_feature (1)..(152): Homolog of NCBI NO: 21595418 NR Description: putative esterase-like protein [Arabidopsis
MNRLVPVILGHSKGGDVVLLYASKFPDYIRNVVNISGRFDLKNDVRLGDGYIEKIKEQGFIDATEGKSCFRVTQESLMDRLNTDMHQACLNIDKQCKVLTVHGSDDTVVPGEDAKEFAKVIPNHKLEIVEGANHGYTKHQKELVSIAVEFTKTAIVEQHNLLVVFGRWLIIVMIVVTFYMSVFDHLIKVYPLLVIFKLENVMSRIQQLIYLIFFYLLRIKLLLGLWLLLLERRM

SEQ ID NO: 96162 - DNA, 1428 bp, Arabidopsis thaliana
  misc_feature (1)..(1428): Ceres Seq. ID no. 12732204
  misc_feature: MA Experiment ID: 20000180 Result: Down-regulated in Transcription
  misc_feature: MA Experiment 20000180 PARAMETER Experiment Name: At_Germinating_Seeds_P Parameter: Age (hr) Value: 24 vs. 0
  misc_feature: MA Experiment 20000180 PARAMETER Experiment Name: At_Germinating_Seeds_P Parameter: Tissue Value: Germinating Seeds
  misc_feature: MA Experiment ID: 20000709 Result: Up-regulated in Transcription
  misc_feature: MA Experiment 20000709 PARAMETER Experiment Name: At_15mM_NH4NO3_L-to-H_P Parameter: Age (hr) Value: 14
  misc_feature: MA Experiment 20000709 PARAMETER Experiment Name: At_15mM_NH4NO3_L-to-H_P Parameter: Organism Value: A. thaliana
  misc_feature: MA Experiment 20000709 PARAMETER Experiment Name: At_15mM_NH4NO3_L-to-H_P Parameter: Plant Line Value: WS
  misc_feature: MA Experiment 20000709 PARAMETER Experiment Name: At_15mM_NH4NO3_L-to-H_P Parameter: Timepoint (hr) Value: 4
  misc_feature: MA Experiment 20000709 PARAMETER Experiment Name: At_15mM_NH4NO3_L-to-H_P Parameter: Tissue Value: Aerial
  misc_feature: MA Experiment 20000709 PARAMETER Experiment Name: At_15mM_NH4NO3_L-to-H_P Parameter: Treatment Value: 15mM NH4NO3 vs. 30mM Mannitol
  misc_feature: MA Experiment ID: 20001557 Result: Up-regulated in Transcription
  misc_feature: MA Experiment 20001557 PARAMETER Experiment Name: At_Drought_Soil_Dry_P Parameter: Age (day) Value: 27
  misc_feature: MA Experiment 20001557 PARAMETER Experiment Name: At_Drought_Soil_Dry_P Parameter: Organism Value: A. thaliana
  misc_feature: MA Experiment 20001557 PARAMETER Experiment Name: At_Drought_Soil_Dry_P Parameter: Plant Line Value: WS
  misc_feature: MA Experiment 20001557 PARAMETER Experiment Name: At_Drought_Soil_Dry_P Parameter: Post Timepoint (hr) Value: 3
  misc_feature: MA Experiment 20001557 PARAMETER Experiment Name: At_Drought_Soil_Dry_P Parameter: Post-Treatment Value: Re-Water vs. No Drought
  misc_feature: MA Experiment 20001557 PARAMETER Experiment Name: At_Drought_Soil_Dry_P Parameter: Timepoint (day) Value: 13
  misc_feature: MA Experiment 20001557 PARAMETER Experiment Name: At_Drought_Soil_Dry_P Parameter: Treatment Value: Drought vs. No Drought
  misc_feature: MA Experiment ID: 20001558 Result: Up-regulated in Transcription
  misc_feature: MA Experiment 20001558 PARAMETER Experiment Name: At_Drought_Soil_Dry_P Parameter: Age (day) Value: 27
  misc_feature: MA Experiment 20001558 PARAMETER Experiment Name: At_Drought_Soil_Dry_P Parameter: Organism Value: A. thaliana
  misc_feature: MA Experiment 20001558 PARAMETER Experiment Name: At_Drought_Soil_Dry_P Parameter: Plant Line Value: WS
  misc_feature: MA Experiment 20001558 PARAMETER Experiment Name: At_Drought_Soil_Dry_P Parameter: Post Timepoint (hr) Value: 6
  misc_feature: MA Experiment 20001558 PARAMETER Experiment Name: At_Drought_Soil_Dry_P Parameter: Post-Treatment Value: Re-Water vs. No Drought
  misc_feature: MA Experiment 20001558 PARAMETER Experiment Name: At_Drought_Soil_Dry_P Parameter: Timepoint (day) Value: 13
  misc_feature: MA Experiment 20001558 PARAMETER Experiment Name: At_Drought_Soil_Dry_P Parameter: Treatment Value: Drought vs. No Drought
  misc_feature: MA Experiment ID: 20001560 Result: Up-regulated in Transcription
  misc_feature: MA Experiment 20001560 PARAMETER Experiment Name: At_Drought_Soil_Dry_P Parameter: Age (day) Value: 28
  misc_feature: MA Experiment 20001560 PARAMETER Experiment Name: At_Drought_Soil_Dry_P Parameter: Organism Value: A. thaliana
  misc_feature: MA Experiment 20001560 PARAMETER Experiment Name: At_Drought_Soil_Dry_P Parameter: Plant Line Value: WS
  misc_feature: MA Experiment 20001560 PARAMETER Experiment Name: At_Drought_Soil_Dry_P Parameter: Post Timepoint (hr) Value: None
  misc_feature: MA Experiment 20001560 PARAMETER Experiment Name: At_Drought_Soil_Dry_P Parameter: Post-Treatment Value: None
  misc_feature: MA Experiment 20001560 PARAMETER Experiment Name: At_Drought_Soil_Dry_P Parameter: Timepoint (day) Value: 14
  misc_feature: MA Experiment 20001560 PARAMETER Experiment Name: At_Drought_Soil_Dry_P Parameter: Treatment Value: Drought vs. No Drought
gacgacggccattatgataaatgacggcggagctaaaccggagacgctgcttagggttgcagaaatcggtggaagaggaaggagtttggtggcggcacagtctcttcgtgctggacaagttatcctcagagagtctcctctccttctctactctgcttttccatttctctcctcctctgtttctccttactgcgaccattgtttccgtttgttagcttcatcggcgcatcagaaatgtcaatcttgctctctcgtctccttttgtagccctaattgcttcgcctctcatactccttggctctgcgaatctcttcgccggcttcaccaatcatcctcctctgcattctccgatcaaccttctgatcgtcaagtccaagctcgtttcctcctctctgcttacaatctcgccgctgcttctccttctgatttccagattttgctctctctccaaggtagtggcagcagcaatggagatccttcttgttctgcgggtgattctgcagctgctgggtttcttcattctcttttatcttccgtgtgtccatctcttccggtgtctatctcgccggatctcacggcggctttactgtcaaaggataaagttaacgcctttggtctgatggaaccgtgctctgtttcgaatgagaaaagatctgtgcgagcttatgggatttatccaaagacttcgtttttcaatcatgattgtcttcctaatgcttgtagattcgattatgttgactctgcttctgatggtaatactgatatcatcattaggatgattcatgatgttcctgaaggtagagaagtttgtttaagctacttccctgtgaacatgaactattcgagtagacaaaagagattgcttgaggattacggttttaagtgtgactgtgatcggtgcaaagtggaatttagttggtctgaaggtgaggaagatgagaatgagattatggaagagatggaggatcaagatgaacaagaagagatggaagattcagtagatatatgtgtgagaaggagaattgttttggcactctagctccgcttcccccgaagactcatgatgcttcgagagttcttgaatgtaatgtttgtggaagcgttaaggaggatgaagttggcgtaaatcaatgaggaaggttagcttaaagaattgatcagccgaaaatctcaagcttgtttgatgcagccagacccaaacaacaagagacttgtcttggaccacatcgttaatcaatgttgtttgttgtttgatgtttacttttttttttttactcagttttgaaaattcgataagtattctagctctagaattccatatctaggttttttgttttctcctagatagtctgaagaatcaattgtaatggtctgtggaattacacggaaacagttttgttgtaataatggagcatcagttttctttgg

SEQ ID NO: 96163 - protein, 345 aa, Arabidopsis thaliana
  peptide (1)..(345): Ceres Seq. ID no. 12732205
  misc_feature (6)..(281): Pfam Name: SET domain Pfam Description: SET domain
  misc_feature (5)..(333): Homolog of NCBI NO: 30680748 NR Description: SET-domain transcriptional regulator family
  misc_feature (5)..(345): Homolog of NCBI NO: 18399103 NR Description: putative SET-domain transcriptional regulator; id: At2g19640.1, supported by cDNA: gi_14334523, supported by gi_17979108 [Arabidopsis thaliana] >gi|14334524|gb|AAK59459.1|
  misc_feature (17)..(334): Homolog of NCBI NO: 40253403 NR Description: SET-domain transcriptional regulator-like protein
  misc_feature (136)..(334): Homolog of NCBI NO: 40253402 NR Description: SET-domain transcriptional regulator-like protein
  misc_feature (17)..(100): Homolog of NCBI NO: 40253402 NR Description: SET-domain transcriptional regulator-like protein
  misc_feature (223)..(329): Homolog of NCBI NO: 24648668 NR Description: CG3353-PA [Drosophila melanogaster]
  misc_feature (223)..(330): Homolog of NCBI NO: 14456238 NR Description: bA74P14.1 (novel protein) [Homo sapiens]
  misc_feature (224)..(300): Homolog of NCBI NO: 37534268 NR Description: unknown protein [Oryza sativa (japonica
  misc_feature (224)..(300): Homolog of NCBI NO: 27466907 NR Description: SET domain protein 123 [Zea mays]
  misc_feature (194)..(301): Homolog of NCBI NO: 15240115 NR Description: putative protein; protein id: At5g06620.1 thaliana] >gi|10178118|dbj|BAB11411.1|
TTAIMINDGGAKPETLLRVAEIGGRGRSLVAAQSLRAGQVILRESPLLLYSAFPFLSSSVSPYCDHCFRLLASSAHQKCQSCSLVSFCSPNCFASHTPWLCESLRRLHQSSSSAFSDQPSDRQVQARFLLSAYNLAAASPSDFQILLSLQGSGSSNGDPSCSAGDSAAAGFLHSLLSSVCPSLPVSISPDLTAALLSKDKVNAFGLMEPCSVSNEKRSVRAYGIYPKTSFFNHDCLPNACRFDYVDSASDGNTDIIIRMIHDVPEGREVCLSYFPVNMNYSSRQKRLLEDYGFKCDCDRCKVEFSWSEGEEDENEIMEEMEDQDEQEEMEDSVDICVRRRIVLAL

SEQ ID NO: 96164 - protein, 341 aa, Arabidopsis thaliana
  peptide (1)..(341): Ceres Seq. ID no. 12732206
  misc_feature (2)..(277): Pfam Name: SET domain Pfam Description: SET domain
  misc_feature (1)..(329): Homolog of NCBI NO: 30680748 NR Description: SET-domain transcriptional regulator family
  misc_feature (1)..(341): Homolog of NCBI NO: 18399103 NR Description: putative SET-domain transcriptional regulator; id: At2g19640.1, supported by cDNA: gi_14334523, supported by gi_17979108 [Arabidopsis thaliana] >gi|14334524|gb|AAK59459.1|
  misc_feature (13)..(330): Homolog of NCBI NO: 40253403 NR Description: SET-domain transcriptional regulator-like protein
  misc_feature (132)..(330): Homolog of NCBI NO: 40253402 NR Description: SET-domain transcriptional regulator-like protein
  misc_feature (13)..(96): Homolog of NCBI NO: 40253402 NR Description: SET-domain transcriptional regulator-like protein
  misc_feature (219)..(325): Homolog of NCBI NO: 24648668 NR Description: CG3353-PA [Drosophila melanogaster]
  misc_feature (219)..(326): Homolog of NCBI NO: 14456238 NR Description: bA74P14.1 (novel protein) [Homo sapiens]
  misc_feature (220)..(296): Homolog of NCBI NO: 37534268 NR Description: unknown protein [Oryza sativa (japonica
  misc_feature (220)..(296): Homolog of NCBI NO: 27466907 NR Description: SET domain protein 123 [Zea mays]
  misc_feature (190)..(297): Homolog of NCBI NO: 15240115 NR Description: putative protein; protein id: At5g06620.1 thaliana] >gi|10178118|dbj|BAB11411.1|
MINDGGAKPETLLRVAEIGGRGRSLVAAQSLRAGQVILRESPLLLYSAFPFLSSSVSPYCDHCFRLLASSAHQKCQSCSLVSFCSPNCFASHTPWLCESLRRLHQSSSSAFSDQPSDRQVQARFLLSAYNLAAASPSDFQILLSLQGSGSSNGDPSCSAGDSAAAGFLHSLLSSVCPSLPVSISPDLTAALLSKDKVNAFGLMEPCSVSNEKRSVRAYGIYPKTSFFNHDCLPNACRFDYVDSASDGNTDIIIRMIHDVPEGREVCLSYFPVNMNYSSRQKRLLEDYGFKCDCDRCKVEFSWSEGEEDENEIMEEMEDQDEQEEMEDSVDICVRRRIVLAL

SEQ ID NO: 96165 - DNA, 783 bp, Arabidopsis thaliana
  misc_feature (1)..(783): Ceres Seq. ID no. 12732215
  misc_feature: MA Experiment ID: 20000180 Result: Up-regulated in Transcription
  misc_feature: MA Experiment 20000180 PARAMETER Experiment Name: At_Germinating_Seeds_P Parameter: Age (hr) Value: 24 vs. 0
  misc_feature: MA Experiment 20000180 PARAMETER Experiment Name: At_Germinating_Seeds_P Parameter: Tissue Value: Germinating Seeds
  misc_feature: MA Experiment ID: 20000184 Result: Up-regulated in Transcription
  misc_feature: MA Experiment 20000184 PARAMETER Experiment Name: At_Shoots__P Parameter: Age (day) Value: 7
  misc_feature: MA Experiment 20000184 PARAMETER Experiment Name: At_Shoots__P Parameter: Tissue Value: Shoots vs. Whole Plant
  misc_feature: MA Experiment ID: 20001911 Result: Down-regulated in Transcription
  misc_feature: MA Experiment 20001911 PARAMETER Experiment Name: At_Drought_Reproduction_P Parameter: Age (day) Value: 40
  misc_feature: MA Experiment 20001911 PARAMETER Experiment Name: At_Drought_Reproduction_P Parameter: Organism Value: A. thaliana
  misc_feature: MA Experiment 20001911 PARAMETER Experiment Name: At_Drought_Reproduction_P Parameter: Plant Line Value: WS
  misc_feature: MA Experiment 20001911 PARAMETER Experiment Name: At_Drought_Reproduction_P Parameter: Timepoint (day) Value: 10
  misc_feature: MA Experiment 20001911 PARAMETER Experiment Name: At_Drought_Reproduction_P Parameter: Tissue Value: Flowers
  misc_feature: MA Experiment 20001911 PARAMETER Experiment Name: At_Drought_Reproduction_P Parameter: Treatment Value: Drought vs. No Drought
atttccttgtctacacgatcataaagctcacaaagagagaattgagaagaaacaaactcgtcggagaattcagtactcgccgaagaggaagaagaagaagatgtcttggcaatcatacgtcgatgatcaccttatgtgtgatgtcgaaggcaaccatctcaccgccgccgcaattctcggccaagacggcagtgtctgggctcagagcgccaaatttcctcagttgaagcctcaagaaatcgatggaatcaagaaggactttgaggagcccgggtttcttgccccaaccggactatttctcggtggcgaaaaatacatggttatccaaggtgaacaaggagctgtgatccgagggaagaagggacctggaggtgtcactatcaagaagacaaaccaagctttggtctttggcttctacgatgaaccaatgactggaggtcaatgcaacttggttgtcgaaaggctcggggattaccttatcgagtctgaactctaaaaccaaggtttcatttcaggttcttcttaactaaagagtgtcaatgcactttttattgtgattgattgtaatgctttcaaacacaaatcatttgttactttagaaccaattgtgattgattggtctccttcgttaccgagtttgagtttgtgtgttcttgtaatgacatttgatcatcttttttctccatatgtattgagttttgatttttgtttcttcatattattactttttcttgaaatgatctgctgtttatgatttggggttcaaaatatttttggtttggc

SEQ ID NO: 96166 - protein, 164 aa, Arabidopsis thaliana
  peptide (1)..(164): Ceres Seq. ID no. 12732216
  misc_feature (35)..(159): Pfam Name: Profilin Pfam Description: Profilin
  misc_feature (34)..(164): Homolog of NCBI NO: 15224838 NR Description: profilin 1; protein id: At2g19760.1, supported by gi_1353769, supported by cDNA: gi_18252984, supported by cDNA: [Arabidopsis thaliana] >gi|2499810|sp|Q42449|PRO1_ARATH profilin
  misc_feature (35)..(164): Homolog of NCBI NO: 2781152 NR Description: Profilin I From Arabidopsis Thaliana
  misc_feature (34)..(164): Homolog of NCBI NO: 15233538 NR Description: profilin 2; protein id: At4g29350.1, supported by supported by cDNA: gi_21281043, supported by cDNA: gi_9965570
  misc_feature (34)..(164): Homolog of NCBI NO: 21554627 NR Description: profilin 2 [Arabidopsis thaliana]
  misc_feature (34)..(164): Homolog of NCBI NO: 9965571 NR Description: profilin [Arabidopsis thaliana]
  misc_feature (12)..(164): Homolog of NCBI NO: 23397336 NR Description: putative profilin protein [Arabidopsis thaliana]
  misc_feature (12)..(164): Homolog of NCBI NO: 30696765 NR Description: profilin 5 [Arabidopsis thaliana]
  misc_feature (34)..(164): Homolog of NCBI NO: 16555785 NR Description: profilin [Capsicum annuum]
  misc_feature (34)..(161): Homolog of NCBI NO: 14423868 NR Description: Profilin 2 (Pollen allergen Hev b 8.0102)
  misc_feature (34)..(164): Homolog of NCBI NO: 17224229 NR Description: profilin [Lycopersicon esculentum]
FPCLHDHKAHKERIEKKQTRRRIQYSPKRKKKKMSWQSYVDDHLMCDVEGNHLTAAAILGQDGSVWAQSAKFPQLKPQEIDGIKKDFEEPGFLAPTGLFLGGEKYMVIQGEQGAVIRGKKGPGGVTIKKTNQALVFGFYDEPMTGGQCNLVVERLGDYLIESEL

SEQ ID NO: 96167 - protein, 131 aa, Arabidopsis thaliana
  peptide (1)..(131): Ceres Seq. ID no. 12732217
  misc_feature (2)..(126): Pfam Name: Profilin Pfam Description: Profilin
  misc_feature (1)..(131): Homolog of NCBI NO: 15224838 NR Description: profilin 1; protein id: At2g19760.1, supported by gi_1353769, supported by cDNA: gi_18252984, supported by cDNA: [Arabidopsis thaliana] >gi|2499810|sp|Q42449|PRO1_ARATH profilin
  misc_feature (2)..(131): Homolog of NCBI NO: 2781152 NR Description: Profilin I From Arabidopsis Thaliana
  misc_feature (1)..(131): Homolog of NCBI NO: 15233538 NR Description: profilin 2; protein id: At4g29350.1, supported by supported by cDNA: gi_21281043, supported by cDNA: gi_9965570
  misc_feature (1)..(131): Homolog of NCBI NO: 21554627 NR Description: profilin 2 [Arabidopsis thaliana]
  misc_feature (1)..(131): Homolog of NCBI NO: 9965571 NR Description: profilin [Arabidopsis thaliana]
  misc_feature (1)..(131): Homolog of NCBI NO: 23397336 NR Description: putative profilin protein [Arabidopsis thaliana]
  misc_feature (1)..(131): Homolog of NCBI NO: 30696765 NR Description: profilin 5 [Arabidopsis thaliana]
  misc_feature (1)..(131): Homolog of NCBI NO: 16555785 NR Description: profilin [Capsicum annuum]
  misc_feature (1)..(128): Homolog of NCBI NO: 14423868 NR Description: Profilin 2 (Pollen allergen Hev b 8.0102)
  misc_feature (1)..(131): Homolog of NCBI NO: 17224229 NR Description: profilin [Lycopersicon esculentum]
MSWQSYVDDHLMCDVEGNHLTAAAILGQDGSVWAQSAKFPQLKPQEIDGIKKDFEEPGFLAPTGLFLGGEKYMVIQGEQGAVIRGKKGPGGVTIKKTNQALVFGFYDEPMTGGQCNLVVERLGDYLIESEL

SEQ ID NO: 96168 - protein, 120 aa, Arabidopsis thaliana
  peptide (1)..(120): Ceres Seq. ID no. 12732218
  misc_feature (1)..(115): Pfam Name: Profilin Pfam Description: Profilin
  misc_feature (1)..(120): Homolog of NCBI NO: 15224838 NR Description: profilin 1; protein id: At2g19760.1, supported by gi_1353769, supported by cDNA: gi_18252984, supported by cDNA: [Arabidopsis thaliana] >gi|2499810|sp|Q42449|PRO1_ARATH profilin
  misc_feature (1)..(120): Homolog of NCBI NO: 2781152 NR Description: Profilin I From Arabidopsis Thaliana
  misc_feature (1)..(120): Homolog of NCBI NO: 15233538 NR Description: profilin 2; protein id: At4g29350.1, supported by supported by cDNA: gi_21281043, supported by cDNA: gi_9965570
  misc_feature (1)..(120): Homolog of NCBI NO: 21554627 NR Description: profilin 2 [Arabidopsis thaliana]
  misc_feature (1)..(120): Homolog of NCBI NO: 9965571 NR Description: profilin [Arabidopsis thaliana]
  misc_feature (1)..(120): Homolog of NCBI NO: 23397336 NR Description: putative profilin protein [Arabidopsis thaliana]
  misc_feature (1)..(120): Homolog of NCBI NO: 30696765 NR Description: profilin 5 [Arabidopsis thaliana]
  misc_feature (1)..(120): Homolog of NCBI NO: 16555785 NR Description: profilin [Capsicum annuum]
  misc_feature (1)..(117): Homolog of NCBI NO: 14423868 NR Description: Profilin 2 (Pollen allergen Hev b 8.0102)
  misc_feature (1)..(120): Homolog of NCBI NO: 17224229 NR Description: profilin [Lycopersicon esculentum]
MCDVEGNHLTAAAILGQDGSVWAQSAKFPQLKPQEIDGIKKDFEEPGFLAPTGLFLGGEKYMVIQGEQGAVIRGKKGPGGVTIKKTNQALVFGFYDEPMTGGQCNLVVERLGDYLIESEL

SEQ ID NO: 96169 - DNA, 765 bp, Arabidopsis thaliana
  misc_feature (1)..(765): Ceres Seq. ID no. 12732252
  misc_feature: MA Experiment ID: 20000227 Result: Down-regulated in Transcription
  misc_feature: MA Experiment 20000227 PARAMETER Experiment Name: At_Root-Tips-vs-Tops_P Parameter: Tissue Value: Root Tips vs. Root Tops
atgtctcacatccacacaaaaagaagaagtaagtatcaaacgagagtacaaaagatgacgtcactcaacagctctgcatcaccaacatcatcgtcatcagaccaatctgatgcaactactacaacaagcacccacttgtctgaagaagaagctccacccagaaacaacaacacaagaaagagaaggagagattcttcttctgcttcttcatcttcttcaatgcaacatcctgtttacagaggtgtgcggatgagaagttggggcaaatgggtctccgagatccgacaacctcgtaagaaaactcgtatttggctcggcacttttgtcaccgctgatatggctgctcgtgctcacgacgtcgctgctctcaccatcaaaggctcctccgccgtcttaaatttccctgagcttgcttctctcttccctcgtccggcgtcatcatcgccgcatgatatccagacagccgccgcagaagccgccgccatggtggtcgaagaaaaactgttagagaaggatgaggctccggaggccccaccttcgtcggaatcttcttacgtggcggcggagtcagaggatgaggagaggttggagaaaattgtggagctgcctaacattgaagaaggaagttatgacgagagtgtgacatcacgtgctgatctggcttattctgagccgttcgattgttgggtgtatcctccggttatggatttttatgaagaaatatcggagtttaatttcgtggaattgtggagctttaatcactaa

SEQ ID NO: 96170 - protein, 254 aa, Arabidopsis thaliana
  peptide (1)..(254): Ceres Seq. ID no. 12732253
  misc_feature (76)..(140): Pfam Name: AP2 domain Pfam Description: AP2 domain
  misc_feature (1)..(254): Homolog of NCBI NO: 9279711 NR Description: transcription factor TINY-like protein
  misc_feature (19)..(254): Homolog of NCBI NO: 15228171 NR Description: transcription factor TINY, putative; protein id: [Arabidopsis thaliana] >gi|2062174|gb|AAB63648.1| transcription
  misc_feature (59)..(233): Homolog of NCBI NO: 15239501 NR Description: transcription factor TINY; protein id: At5g25810.1
  misc_feature (43)..(233): Homolog of NCBI NO: 15239113 NR Description: transcription factor TINY, putative; protein id: [Arabidopsis thaliana] >gi|11282310|pir||T48518 transcription
  misc_feature (41)..(238): Homolog of NCBI NO: 15223860 NR Description: transcription factor TINY, putative; protein id:
  misc_feature (58)..(251): Homolog of NCBI NO: 37536842 NR Description: putative DNA binding protein [Oryza sativa
  misc_feature (64)..(244): Homolog of NCBI NO: 15233928 NR Description: transcription factor TINY, putative; protein id:
  misc_feature (17)..(207): Homolog of NCBI NO: 38605845 NR Description: OSJNBb0034G17.3 [Oryza sativa (japonica
  misc_feature (19)..(161): Homolog of NCBI NO: 38605848 NR Description: OSJNBb0034G17.6 [Oryza sativa (japonica
  misc_feature (59)..(226): Homolog of NCBI NO: 15227471 NR Description: putative AP2 domain transcription factor; protein At2g35700.1 [Arabidopsis thaliana] >gi|25350648|pir||H84771
MSHIHTKRRSKYQTRVQKMTSLNSSASPTSSSSDQSDATTTTSTHLSEEEAPPRNNNTRKRRRDSSSASSSSSMQHPVYRGVRMRSWGKWVSEIRQPRKKTRIWLGTFVTADMAARAHDVAALTIKGSSAVLNFPELASLFPRPASSSPHDIQTAAAEAAAMVVEEKLLEKDEAPEAPPSSESSYVAAESEDEERLEKIVELPNIEEGSYDESVTSRADLAYSEPFDCWVYPPVMDFYEEISEFNFVELWSFNH

SEQ ID NO: 96171 - protein, 236 aa, Arabidopsis thaliana; identical to SEQ ID NO: 87490
  peptide (1)..(236): Ceres Seq. ID no. 12732254
  misc_feature (58)..(122): Pfam Name: AP2 domain Pfam Description: AP2 domain
  misc_feature (1)..(236): Homolog of NCBI NO: 9279711 NR Description: transcription factor TINY-like protein
  misc_feature (1)..(236): Homolog of NCBI NO: 15228171 NR Description: transcription factor TINY, putative; protein id: [Arabidopsis thaliana] >gi|2062174|gb|AAB63648.1| transcription
  misc_feature (41)..(215): Homolog of NCBI NO: 15239501 NR Description: transcription factor TINY; protein id: At5g25810.1
  misc_feature (25)..(215): Homolog of NCBI NO: 15239113 NR Description: transcription factor TINY, putative; protein id: [Arabidopsis thaliana] >gi|11282310|pir||T48518 transcription
  misc_feature (23)..(220): Homolog of NCBI NO: 15223860 NR Description: transcription factor TINY, putative; protein id:
  misc_feature (40)..(233): Homolog of NCBI NO: 37536842 NR Description: putative DNA binding protein [Oryza sativa
  misc_feature (46)..(226): Homolog of NCBI NO: 15233928 NR Description: transcription factor TINY, putative; protein id:
  misc_feature (1)..(189): Homolog of NCBI NO: 38605845 NR Description: OSJNBb0034G17.3 [Oryza sativa (japonica
  misc_feature (1)..(143): Homolog of NCBI NO: 38605848 NR Description: OSJNBb0034G17.6 [Oryza sativa (japonica
  misc_feature (41)..(208): Homolog of NCBI NO: 15227471 NR Description: putative AP2 domain transcription factor; protein At2g35700.1 [Arabidopsis thaliana] >gi|25350648|pir||H84771

SEQ ID NO: 96172 - protein, 181 aa, Arabidopsis thaliana; identical to SEQ ID NO: 87491
  peptide (1)..(181): Ceres Seq. ID no. 12732255
  misc_feature (3)..(67): Pfam Name: AP2 domain Pfam Description: AP2 domain
  misc_feature (1)..(181): Homolog of NCBI NO: 9279711 NR Description: transcription factor TINY-like protein
  misc_feature (1)..(181): Homolog of NCBI NO: 15228171 NR Description: transcription factor TINY, putative; protein id: [Arabidopsis thaliana] >gi|2062174|gb|AAB63648.1| transcription
  misc_feature (1)..(160): Homolog of NCBI NO: 15239501 NR Description: transcription factor TINY; protein id: At5g25810.1
  misc_feature (1)..(160): Homolog of NCBI NO: 15239113 NR Description: transcription factor TINY, putative; protein id: [Arabidopsis thaliana] >gi|11282310|pir||T48518 transcription
  misc_feature (1)..(165): Homolog of NCBI NO: 15223860 NR Description: transcription factor TINY, putative; protein id:
  misc_feature (1)..(178): Homolog of NCBI NO: 37536842 NR Description: putative DNA binding protein [Oryza sativa
  misc_feature (1)..(171): Homolog of NCBI NO: 15233928 NR Description: transcription factor TINY, putative; protein id:
  misc_feature (1)..(134): Homolog of NCBI NO: 38605845 NR Description: OSJNBb0034G17.3 [Oryza sativa (japonica
  misc_feature (1)..(88): Homolog of NCBI NO: 38605848 NR Description: OSJNBb0034G17.6 [Oryza sativa (japonica
  misc_feature (1)..(153): Homolog of NCBI NO: 15227471 NR Description: putative AP2 domain transcription factor; protein At2g35700.1 [Arabidopsis thaliana] >gi|25350648|pir||H84771

SEQ ID NO: 96173 - DNA, 1380 bp, Arabidopsis thaliana
  misc_feature (1)..(1380): Ceres Seq. ID no. 12732264
  misc_feature: MA Experiment ID: 20000211 Result: Up-regulated in Transcription
  misc_feature: MA Experiment 20000211 PARAMETER Experiment Name: At_0.001percent_MeJA__P Parameter: Age (day) Value: 14
  misc_feature: MA Experiment 20000211 PARAMETER Experiment Name: At_0.001percent_MeJA__P Parameter: Organism Value: A. thaliana
  misc_feature: MA Experiment 20000211 PARAMETER Experiment Name: At_0.001percent_MeJA__P Parameter: Plant Line Value: WS
  misc_feature: MA Experiment 20000211 PARAMETER Experiment Name: At_0.001percent_MeJA__P Parameter: Timepoint (hr) Value: 1
  misc_feature: MA Experiment 20000211 PARAMETER Experiment Name: At_0.001percent_MeJA__P Parameter: Tissue Value: Aerial
  misc_feature: MA Experiment 20000211 PARAMETER Experiment Name: At_0.001percent_MeJA__P Parameter: Treatment Value: 0.001percent MeJA vs. No Treatment
  misc_feature: MA Experiment ID: 20000234 Result: Up-regulated in Transcription
  misc_feature: MA Experiment 20000234 PARAMETER Experiment Name: At_Siliques_P Parameter: Age (day) Value: 21
  misc_feature: MA Experiment 20000234 PARAMETER Experiment Name: At_Siliques_P Parameter: Organism Value: A. thaliana
  misc_feature: MA Experiment 20000234 PARAMETER Experiment Name: At_Siliques_P Parameter: Plant Line Value: WS
  misc_feature: MA Experiment 20000234 PARAMETER Experiment Name: At_Siliques_P Parameter: Tissue Value: Less Than 5mm Siliques vs. Whole Plant
  misc_feature: MA Experiment ID: 20000235 Result: Up-regulated in Transcription
  misc_feature: MA Experiment 20000235 PARAMETER Experiment Name: At_Siliques_P Parameter: Age (day) Value: 21
  misc_feature: MA Experiment 20000235 PARAMETER Experiment Name: At_Siliques_P Parameter: Organism Value: A. thaliana
  misc_feature: MA Experiment 20000235 PARAMETER Experiment Name: At_Siliques_P Parameter: Plant Line Value: WS
  misc_feature: MA Experiment 20000235 PARAMETER Experiment Name: At_Siliques_P Parameter: Tissue Value: 5-10mm Siliques vs. Whole Plant
  misc_feature: MA Experiment ID: 20000264 Result: Up-regulated in Transcription
  misc_feature: MA Experiment 20000264 PARAMETER Experiment Name: At_Open_Flower_P Parameter: Age (day) Value: 21
  misc_feature: MA Experiment 20000264 PARAMETER Experiment Name: At_Open_Flower_P Parameter: Plant Line Value: WS
  misc_feature: MA Experiment 20000264 PARAMETER Experiment Name: At_Open_Flower_P Parameter: Tissue Value: Open Flower vs. Whole Plant
  misc_feature: MA Experiment ID: 20000286 Result: Up-regulated in Transcription
  misc_feature: MA Experiment 20000286 PARAMETER Experiment Name: At_Open_Flower_P Parameter: Age (day) Value: 21
  misc_feature: MA Experiment 20000286 PARAMETER Experiment Name: At_Open_Flower_P Parameter: Plant Line Value: WS
  misc_feature: MA Experiment 20000286 PARAMETER Experiment Name: At_Open_Flower_P Parameter: Tissue Value: Half Open vs. Whole Plant
  misc_feature: MA Experiment ID: 20000308 Result: Up-regulated in Transcription
  misc_feature: MA Experiment 20000308 PARAMETER Experiment Name: At_100mM_NaCl__P Parameter: Age (day) Value: 17
  misc_feature: MA Experiment 20000308 PARAMETER Experiment Name: At_100mM_NaCl__P Parameter: Organism Value: A. thaliana
  misc_feature: MA Experiment 20000308 PARAMETER Experiment Name: At_100mM_NaCl__P Parameter: Plant Line Value: WS
  misc_feature: MA Experiment 20000308 PARAMETER Experiment Name: At_100mM_NaCl__P Parameter: Timepoint (hr) Value: 72
  misc_feature: MA Experiment 20000308 PARAMETER Experiment Name: At_100mM_NaCl__P Parameter: Tissue Value: Whole Plant
  misc_feature: MA Experiment 20000308 PARAMETER Experiment Name: At_100mM_NaCl__P Parameter: Treatment Value: 100mM NaCl vs. No Treatment
  misc_feature: MA Experiment ID: 20001248 Result: Down-regulated in Transcription
  misc_feature: MA Experiment 20001248 PARAMETER Experiment Name: At_Far-red-induction_P Parameter: Age (day) Value: 7
  misc_feature: MA Experiment 20001248 PARAMETER Experiment Name: At_Far-red-induction_P Parameter: Light Value: Far-red vs. White
  misc_feature: MA Experiment 20001248 PARAMETER Experiment Name: At_Far-red-induction_P Parameter: Organism Value: A. thaliana
  misc_feature: MA Experiment 20001248 PARAMETER Experiment Name: At_Far-red-induction_P Parameter: Plant Line Value: Columbia
  misc_feature: MA Experiment 20001248 PARAMETER Experiment Name: At_Far-red-induction_P Parameter: Timepoint (hr) Value: 4
  misc_feature: MA Experiment 20001248 PARAMETER Experiment Name: At_Far-red-induction_P Parameter: Tissue Value: Whole Plant
  misc_feature: MA Experiment ID: 20001450 Result: Down-regulated in Transcription
  misc_feature: MA Experiment 20001450 PARAMETER Experiment Name: At_Far-red-induction_P Parameter: Age (day) Value: 7
  misc_feature: MA Experiment 20001450 PARAMETER Experiment Name: At_Far-red-induction_P Parameter: Light Value: Far-red vs. White
  misc_feature: MA Experiment 20001450 PARAMETER Experiment Name: At_Far-red-induction_P Parameter: Organism Value: A. thaliana
  misc_feature: MA Experiment 20001450 PARAMETER Experiment Name: At_Far-red-induction_P Parameter: Plant Line Value: Columbia
  misc_feature: MA Experiment 20001450 PARAMETER Experiment Name: At_Far-red-induction_P Parameter: Timepoint (hr) Value: 8
  misc_feature: MA Experiment 20001450 PARAMETER Experiment Name: At_Far-red-induction_P Parameter: Tissue Value: Whole Plant
atggataatggagacatagcttgtgatggatatcacaagtataaggaagatgtgcagctcatggccgaaactggcttacatacattcagattctccatctcttggtctagactcatctctaatggaagaggttccattaacccgaaaggtctacagttctacaagaatttcattcaagaacttgtcaaacatggaattgagccacatgttacactacatcactacgattttcctcaatatctcgaggatgactatggaggctggaccaaccgcaaaatcatcaaagactttaccgcttatgcagatgtttgctttagagagtttgggaaccacgtcaaattctggaccacgatcaacgaggctaatatatttactattggaggttacaacgatgggaattcaccgcctggtcgttgctcctttccgggcagaaactgcacgttagggaactcttccactgaaacatatatcgtaggccataacttgctgcttgctcacgcctctgtttcaagactatataagcaaaagtacaaggatatacaaggaggttctgttggatttagtttatttgcaatgaattttactccttctacaaactccaaggatgatgaaatcgcaacgaaaagagccaacgatttctacctcggatggatgcttgagcctcttatatatggagactatcctgatgtgatgaaaagaaccattggatcaagactgccagttttctcgaaggaagaatcagaacaagtgaaaggctcatctgacttcataggagtcattcactatctcacggctttggtcacaaacatcgatatcaacccttcactttcaggaattccagattttaactcagacatggtgcctaatattctttataactttaagtattcccaatccatttttactagttgtggcgtttgtttttgtttggacaagtctgttgtttctccatgggctatggaaggcatcctagagtatataaagcagagctatggcaatcctccagtctacattcttgagaatggtaaaacaatgaaccaagatttggagctgcaacaaaaggacacaccaaggattgagtacttagatgcttacattggtgcggtgctcaaagctgttagaaacaaagatatgactacatgtaggaatggatcagacacgagaggctacttcgtatggtcatttatggatttgtacgaattactaaacggatacaagagtagttttggattgtactctgtcaatttcagtgatccccatcgcaagagatctcccaaactctctgctcactggtactctggttttctcaagggcaaacccacatttcttggttcccaaggcatcacacaattgcatagcaacttctcttcttccagatag

SEQ ID NO: 96174 - protein, 459 aa, Arabidopsis thaliana
  peptide (1)..(459): Ceres Seq. ID no. 12732265
  misc_feature (1)..(297): Homolog of NCBI NO: 30693934 NR Description: beta-glucosidase related protein [Arabidopsis
  misc_feature (322)..(374): Homolog of NCBI NO: 30693934 NR Description: beta-glucosidase related protein [Arabidopsis
  misc_feature (6)..(265): Homolog of NCBI NO: 11264219 NR Description: glucosidase like protein - Arabidopsis thaliana glucosidase like protein [Arabidopsis thaliana]
  misc_feature (305)..(458): Homolog of NCBI NO: 11264219 NR Description: glucosidase like protein - Arabidopsis thaliana glucosidase like protein [Arabidopsis thaliana]
  misc_feature (3)..(286): Homolog of NCBI NO: 15219037 NR Description: glycosyl hydrolase family 1; protein id:
  misc_feature (327)..(456): Homolog of NCBI NO: 15219037 NR Description: glycosyl hydrolase family 1; protein id:
  misc_feature (3)..(458): Homolog of NCBI NO: 25289447 NR Description: hypothetical protein T2K10.15 [imported] - thaliana >gi|4249391|gb|AAD14488.1|AAD14488 Similar to gi|3249076
  misc_feature (3)..(458): Homolog of NCBI NO: 22330338 NR Description: glycosyl hydrolase family 1; protein id:
  misc_feature (3)..(286): Homolog of NCBI NO: 7435457 NR Description: hypothetical protein T13D8.15 - Arabidopsis >gi|3249077|gb|AAC24061.1| Similar to prunasin hydrolase gb|U50201 from Prunus serotina. ESTs gb|T21225 and gb|AA586305
  misc_feature (277)..(458): Homolog of NCBI NO: 7435457 NR Description: hypothetical protein T13D8.15 - Arabidopsis >gi|3249077|gb|AAC24061.1| Similar to prunasin hydrolase gb|U50201 from Prunus serotina. ESTs gb|T21225 and gb|AA586305
MDNGDIACDGYHKYKEDVQLMAETGLHTFRFSISWSRLISNGRGSINPKGLQFYKNFIQELVKHGIEPHVTLHHYDFPQYLEDDYGGWTNRKIIKDFTAYADVCFREFGNHVKFWTTINEANIFTIGGYNDGNSPPGRCSFPGRNCTLGNSSTETYIVGHNLLLAHASVSRLYKQKYKDIQGGSVGFSLFAMNFTPSTNSKDDEIATKRANDFYLGWMLEPLIYGDYPDVMKRTIGSRLPVFSKEESEQVKGSSDFIGVIHYLTALVTNIDINPSLSGIPDFNSDMVPNILYNFKYSQSIFTSCGVCFCLDKSVVSPWAMEGILEYIKQSYGNPPVYILENGKTMNQDLELQQKDTPRIEYLDAYIGAVLKAVRNKDMTTCRNGSDTRGYFVWSFMDLYELLNGYKSSFGLYSVNFSDPHRKRSPKLSAHWYSGFLKGKPTFLGSQGITQLHSNFSSSR

SEQ ID NO: 96175 - protein, 439 aa, Arabidopsis thaliana
  peptide (1)..(439): Ceres Seq. ID no. 12732266
  misc_feature (1)..(277): Homolog of NCBI NO: 30693934 NR Description: beta-glucosidase related protein [Arabidopsis
  misc_feature (302)..(354): Homolog of NCBI NO: 30693934 NR Description: beta-glucosidase related protein [Arabidopsis
  misc_feature (1)..(245): Homolog of NCBI NO: 11264219 NR Description: glucosidase like protein - Arabidopsis thaliana glucosidase like protein [Arabidopsis thaliana]
  misc_feature (285)..(438): Homolog of NCBI NO: 11264219 NR Description: glucosidase like protein - Arabidopsis thaliana glucosidase like protein [Arabidopsis thaliana]
  misc_feature (1)..(266): Homolog of NCBI NO: 15219037 NR Description: glycosyl hydrolase family 1; protein id:
  misc_feature (307)..(436): Homolog of NCBI NO: 15219037 NR Description: glycosyl hydrolase family 1; protein id:
  misc_feature (1)..(438): Homolog of NCBI NO: 25289447 NR Description: hypothetical protein T2K10.15 [imported] - thaliana >gi|4249391|gb|AAD14488.1|AAD14488 Similar to gi|3249076
  misc_feature (1)..(438): Homolog of NCBI NO: 22330338 NR Description: glycosyl hydrolase family 1; protein id:
  misc_feature (1)..(266): Homolog of NCBI NO: 7435457 NR Description: hypothetical protein T13D8.15 - Arabidopsis >gi|3249077|gb|AAC24061.1| Similar to prunasin hydrolase gb|U50201 from Prunus serotina. ESTs gb|T21225 and gb|AA586305
  misc_feature (257)..(438): Homolog of NCBI NO: 7435457 NR Description: hypothetical protein T13D8.15 - Arabidopsis >gi|3249077|gb|AAC24061.1| Similar to prunasin hydrolase gb|U50201 from Prunus serotina. ESTs gb|T21225 and gb|AA586305
MAETGLHTFRFSISWSRLISNGRGSINPKGLQFYKNFIQELVKHGIEPHVTLHHYDFPQYLEDDYGGWTNRKIIKDFTAYADVCFREFGNHVKFWTTINEANIFTIGGYNDGNSPPGRCSFPGRNCTLGNSSTETYIVGHNLLLAHASVSRLYKQKYKDIQGGSVGFSLFAMNFTPSTNSKDDEIATKRANDFYLGWMLEPLIYGDYPDVMKRTIGSRLPVFSKEESEQVKGSSDFIGVIHYLTALVTNIDINPSLSGIPDFNSDMVPNILYNFKYSQSIFTSCGVCFCLDKSVVSPWAMEGILEYIKQSYGNPPVYILENGKTMNQDLELQQKDTPRIEYLDAYIGAVLKAVRNKDMTTCRNGSDTRGYFVWSFMDLYELLNGYKSSFGLYSVNFSDPHRKRSPKLSAHWYSGFLKGKPTFLGSQGITQLHSNFSSSR

SEQ ID NO: 96176 - protein, 268 aa, Arabidopsis thaliana
  peptide (1)..(268): Ceres Seq. ID no. 12732267
  misc_feature (1)..(106): Homolog of NCBI NO: 30693934 NR Description: beta-glucosidase related protein [Arabidopsis
  misc_feature (131)..(183): Homolog of NCBI NO: 30693934 NR Description: beta-glucosidase related protein [Arabidopsis
  misc_feature (1)..(74): Homolog of NCBI NO: 11264219 NR Description: glucosidase like protein - Arabidopsis thaliana glucosidase like protein [Arabidopsis thaliana]
  misc_feature (114)..(267): Homolog of NCBI NO: 11264219 NR Description: glucosidase like protein - Arabidopsis thaliana glucosidase like protein [Arabidopsis thaliana]
  misc_feature (1)..(95): Homolog of NCBI NO: 15219037 NR Description: glycosyl hydrolase family 1; protein id:
  misc_feature (136)..(265): Homolog of NCBI NO: 15219037 NR Description: glycosyl hydrolase family 1; protein id:
  misc_feature (1)..(267): Homolog of NCBI NO: 25289447 NR Description: hypothetical protein T2K10.15 [imported] - thaliana >gi|4249391|gb|AAD14488.1|AAD14488 Similar to gi|3249076
  misc_feature (1)..(267): Homolog of NCBI NO: 22330338 NR Description: glycosyl hydrolase family 1; protein id:
  misc_feature (1)..(95): Homolog of NCBI NO: 7435457 NR Description: hypothetical protein T13D8.15 - Arabidopsis >gi|3249077|gb|AAC24061.1| Similar to prunasin hydrolase gb|U50201 from Prunus serotina. ESTs gb|T21225 and gb|AA586305
  misc_feature (86)..(267): Homolog of NCBI NO: 7435457 NR Description: hypothetical protein T13D8.15 - Arabidopsis >gi|3249077|gb|AAC24061.1| Similar to prunasin hydrolase gb|U50201 from Prunus serotina. ESTs gb|T21225 and gb|AA586305
MNFTPSTNSKDDEIATKRANDFYLGWMLEPLIYGDYPDVMKRTIGSRLPVFSKEESEQVKGSSDFIGVIHYLTALVTNIDINPSLSGIPDFNSDMVPNILYNFKYSQSIFTSCGVCFCLDKSVVSPWAMEGILEYIKQSYGNPPVYILENGKTMNQDLELQQKDTPRIEYLDAYIGAVLKAVRNKDMTTCRNGSDTRGYFVWSFMDLYELLNGYKSSFGLYSVNFSDPHRKRSPKLSAHWYSGFLKGKPTFLGSQGITQLHSNFSSSR

SEQ ID NO: 96177 - DNA, 1648 bp, Arabidopsis thaliana
  misc_feature (1)..(1648): Ceres Seq. ID no. 12732272
  misc_feature: MA Experiment ID: 20000267 Result: Up-regulated in Transcription
  misc_feature: MA Experiment 20000267 PARAMETER Experiment Name: At_Drought_P Parameter: Age (day) Value: 7
  misc_feature: MA Experiment 20000267 PARAMETER Experiment Name: At_Drought_P Parameter: Organism Value: A. thaliana
  misc_feature: MA Experiment 20000267 PARAMETER Experiment Name: At_Drought_P Parameter: Plant Line Value: WS
  misc_feature: MA Experiment 20000267 PARAMETER Experiment Name: At_Drought_P Parameter: Timepoint (hr) Value: 6
  misc_feature: MA Experiment 20000267 PARAMETER Experiment Name: At_Drought_P Parameter: Tissue Value: Whole Plant
  misc_feature: MA Experiment 20000267 PARAMETER Experiment Name: At_Drought_P Parameter: Treatment Value: Drought vs. No Drought
  misc_feature: MA Experiment ID: 20000436 Result: Up-regulated in Transcription
  misc_feature: MA Experiment 20000436 PARAMETER Experiment Name: At_Drought_P Parameter: Age (day) Value: 7
  misc_feature: MA Experiment 20000436 PARAMETER Experiment Name: At_Drought_P Parameter: Organism Value: A. thaliana
  misc_feature: MA Experiment 20000436 PARAMETER Experiment Name: At_Drought_P Parameter: Plant Line Value: WS
  misc_feature: MA Experiment 20000436 PARAMETER Experiment Name: At_Drought_P Parameter: Timepoint (hr) Value: 12
  misc_feature: MA Experiment 20000436 PARAMETER Experiment Name: At_Drought_P Parameter: Tissue Value: Whole Plant
  misc_feature: MA Experiment 20000436 PARAMETER Experiment Name: At_Drought_P Parameter: Treatment Value: Drought vs. No Drought
  misc_feature: MA Experiment ID: 20000437 Result: Up-regulated in Transcription
  misc_feature: MA Experiment 20000437 PARAMETER Experiment Name: At_Drought_P Parameter: Age (day) Value: 8
  misc_feature: MA Experiment 20000437 PARAMETER Experiment Name: At_Drought_P Parameter: Organism Value: A. thaliana
  misc_feature: MA Experiment 20000437 PARAMETER Experiment Name: At_Drought_P Parameter: Plant Line Value: WS
  misc_feature: MA Experiment 20000437 PARAMETER Experiment Name: At_Drought_P Parameter: Timepoint (hr) Value: 24
  misc_feature: MA Experiment 20000437 PARAMETER Experiment Name: At_Drought_P Parameter: Tissue Value: Whole Plant
  misc_feature: MA Experiment 20000437 PARAMETER Experiment Name: At_Drought_P Parameter: Treatment Value: Drought vs. No Drought
  misc_feature: MA Experiment ID: 20001554 Result: Up-regulated in Transcription
  misc_feature: MA Experiment 20001554 PARAMETER Experiment Name: At_Drought_Soil_Dry_P Parameter: Age (day) Value: 21
  misc_feature: MA Experiment 20001554 PARAMETER Experiment Name: At_Drought_Soil_Dry_P Parameter: Organism Value: A. thaliana
  misc_feature: MA Experiment 20001554 PARAMETER Experiment Name: At_Drought_Soil_Dry_P Parameter: Plant Line Value: WS
  misc_feature: MA Experiment 20001554 PARAMETER Experiment Name: At_Drought_Soil_Dry_P Parameter: Post Timepoint (hr) Value: None
  misc_feature: MA Experiment 20001554 PARAMETER Experiment Name: At_Drought_Soil_Dry_P Parameter: Post-Treatment Value: None
  misc_feature: MA Experiment 20001554 PARAMETER Experiment Name: At_Drought_Soil_Dry_P Parameter: Timepoint (day) Value: 7
  misc_feature: MA Experiment 20001554 PARAMETER Experiment Name: At_Drought_Soil_Dry_P Parameter: Treatment Value: Drought vs. No Drought
  misc_feature: MA Experiment ID: 20001555 Result: Up-regulated in Transcription
  misc_feature: MA Experiment 20001555 PARAMETER Experiment Name: At_Drought_Soil_Dry_P Parameter: Age (day) Value: 24
  misc_feature: MA Experiment 20001555 PARAMETER Experiment Name: At_Drought_Soil_Dry_P Parameter: Organism Value: A. thaliana
  misc_feature: MA Experiment 20001555 PARAMETER Experiment Name: At_Drought_Soil_Dry_P Parameter: Plant Line Value: WS
  misc_feature: MA Experiment 20001555 PARAMETER Experiment Name: At_Drought_Soil_Dry_P Parameter: Post Timepoint (hr) Value: None
  misc_feature: MA Experiment 20001555 PARAMETER Experiment Name: At_Drought_Soil_Dry_P Parameter: Post-Treatment Value: None
  misc_feature: MA Experiment 20001555 PARAMETER Experiment Name: At_Drought_Soil_Dry_P Parameter: Timepoint (day) Value: 10
  misc_feature: MA Experiment 20001555 PARAMETER Experiment Name: At_Drought_Soil_Dry_P Parameter: Treatment Value: Drought vs. No Drought
  misc_feature: MA Experiment ID: 20001556 Result: Up-regulated in Transcription
  misc_feature: MA Experiment 20001556 PARAMETER Experiment Name: At_Drought_Soil_Dry_P Parameter: Age (day) Value: 26
  misc_feature: MA Experiment 20001556 PARAMETER Experiment Name: At_Drought_Soil_Dry_P Parameter: Organism Value: A. thaliana
  misc_feature: MA Experiment 20001556 PARAMETER Experiment Name: At_Drought_Soil_Dry_P Parameter: Plant Line Value: WS
  misc_feature: MA Experiment 20001556 PARAMETER Experiment Name: At_Drought_Soil_Dry_P Parameter: Post Timepoint (hr) Value: None
  misc_feature: MA Experiment 20001556 PARAMETER Experiment Name: At_Drought_Soil_Dry_P Parameter: Post-Treatment Value: None
  misc_feature: MA Experiment 20001556 PARAMETER Experiment Name: At_Drought_Soil_Dry_P Parameter: Timepoint (day) Value: 12
  misc_feature: MA Experiment 20001556 PARAMETER Experiment Name: At_Drought_Soil_Dry_P Parameter: Treatment Value: Drought vs. No Drought
cccaaacgaagaaccaaacattttgaaattttttgggaaaattacaaagcacacgaatttagcaaaaagatccagttattaggtggaagcagattttgtagaaaaatggatggtagtatgaatttggggaatgagccaccaggagatggtggtggaggtggagggttgactagacaaggttcgatatactcgttgacgtttgatgagtttcagagcagtgtagggaaagattttgggtcaatgaacatggatgagttgttaaagaatatatggagtgctgaagaaacacaagccatggctagtggtgtggttccagttcttggtggaggtcaagagggtttgcagctgcagaggcaaggctcgttgactctgcctcgaacgcttagtcagaagacggttgatcaagtttggaaagatctatccaaagttggaagtagtggagtagggggaagtaacttgtctcaggtggctcaggctcagagtcagagtcagagtcagaggcagcaaacattaggtgaagtaactttggaggagtttttggttcgtgctggtgttgtgagagaggaagctcaggttgctgcaagagctcagattgctgagaacaataaaggcggttactttggtaatgatgccaacacaggtttctctgtcgagtttcagcagccttctccacgagttgttgccgctggtgtaatgggaaatcttggtgcagagactgcaaattctttgcaggttcaaggttctagtttgcctctgaatgtgaatggagctagaacaacataccagcaatcgcaacagcaacagccaatcatgcctaagcagcctggttttggttatggaacacaaatgggtcagcttaatagtcctgggataagaggtggtggtcttgtgggacttggagatcagtctttaacgaacaatgtgggctttgtccaaggtgcttctgctgcaattcctggagctttaggcgttggtgctgtgtcgcctgttacgccattgtcatcagaagggatagggaagagtaatggtgattcttcatcactctctccgtctccttacatgtttaatggtggtgtgagaggtagaaagagtggcactgtggagaaagttgtagagagaaggcaaaggagaatgataaagaaccgagaatcagctgcaaggtcccgggccaggaaacaggcttacaccgtggagcttgaagctgaagttgcaaagttaaaggaagagaatgacgagttacaacgaaagcaggcaaggatcatggaaatgcaaaagaatcaggagacggagatgaggaatcttctgcaaggaggtccaaagaaaaagctgaggaggacagagtcgggaccttggtgaatcaatcaatgccatcatacttagtttctgtagataaatgacatcccacttaggtgttttagttgaattagacttaatagagaagagctttcatcgtttatattgtaagctctctccatatatgttatgttttttacatacacaggatcatcagaatctcttttgctttatttagaccaagaattttgtgtgtgtttctcgttgttgtttgtcgttgtcgctattaaacctcaaaatgtactttcttgatcttggagttaccaattttgaagaattgaagtgttgtttggtt

SEQ ID NO: 96178 - protein, 451 aa, Arabidopsis thaliana
  peptide (1)..(451): Ceres Seq. ID no. 12732273
  misc_feature (369)..(433): Pfam Name: bZIP transcription factor Pfam Description: bZIP transcription factor
  misc_feature (36)..(451): Homolog of NCBI NO: 30693958 NR Description: ABA-responsive element binding protein 1 thaliana] >gi|6739278|gb|AAF27180.1|AF093545_1 abscisic acid
  misc_feature (41)..(451): Homolog of NCBI NO: 13775111 NR Description: bZIP transcription factor 6 [Phaseolus vulgaris]
  misc_feature (43)..(451): Homolog of NCBI NO: 18402186 NR Description: abscisic acid responsive elements-binding factor; id: At3g19290.1, supported by cDNA: gi_15292926, supported by
  misc_feature (99)..(451): Homolog of NCBI NO: 18418350 NR Description: abscisic acid responsive elements-binding protein id: At4g34000.1, supported by cDNA: gi_15451049, by cDNA: gi_20148276, supported by cDNA: gi_6739279 [Arabidopsis
  misc_feature (56)..(99): Homolog of NCBI NO: 18418350 NR Description: abscisic acid responsive elements-binding protein id: At4g34000.1, supported by cDNA: gi_15451049, by cDNA: gi_20148276, supported by cDNA: gi_6739279 [Arabidopsis
  misc_feature (269)..(451): Homolog of NCBI NO: 27469352 NR Description: bZIP transcription factor ABI5 [Hordeum vulgare
  misc_feature (34)..(188): Homolog of NCBI NO: 27469352 NR Description: bZIP transcription factor ABI5 [Hordeum vulgare
  misc_feature (43)..(417): Homolog of NCBI NO: 11994451 NR Description: abscisic acid responsive elements-binding factor
  misc_feature (99)..(417): Homolog of NCBI NO: 30689879 NR Description: abscisic acid responsive elements-binding [Arabidopsis thaliana] >gi|13346159|gb|AAK19603.1|AF334210_1 bZIP
  misc_feature (56)..(99): Homolog of NCBI NO: 30689879 NR Description: abscisic acid responsive elements-binding [Arabidopsis thaliana] >gi|13346159|gb|AAK19603.1|AF334210_1 bZIP
PKRRTKHFEIFWENYKAHEFSKKIQLLGGSRFCRKMDGSMNLGNEPPGDGGGGGGLTRQGSIYSLTFDEFQSSVGKDFGSMNMDELLKNIWSAEETQAMASGVVPVLGGGQEGLQLQRQGSLTLPRTLSQKTVDQVWKDLSKVGSSGVGGSNLSQVAQAQSQSQSQRQQTLGEVTLEEFLVRAGVVREEAQVAARAQIAENNKGGYFGNDANTGFSVEFQQPSPRVVAAGVMGNLGAETANSLQVQGSSLPLNVNGARTTYQQSQQQQPIMPKQPGFGYGTQMGQLNSPGIRGGGLVGLGDQSLTNNVGFVQGASAAIPGALGVGAVSPVTPLSSEGIGKSNGDSSSLSPSPYMFNGGVRGRKSGTVEKVVERRQRRMIKNRESAARSRARKQAYTVELEAEVAKLKEENDELQRKQARIMEMQKNQETEMRNLLQGGPKKKLRRTESGPW

SEQ ID NO: 96179 - protein, 416 aa, Arabidopsis thaliana
  peptide (1)..(416): Ceres Seq. ID no. 12732274
  misc_feature (334)..(398): Pfam Name: bZIP transcription factor Pfam Description: bZIP transcription factor
  misc_feature (1)..(416): Homolog of NCBI NO: 30693958 NR Description: ABA-responsive element binding protein 1 thaliana] >gi|6739278|gb|AAF27180.1|AF093545_1 abscisic acid
  misc_feature (6)..(416): Homolog of NCBI NO: 13775111 NR Description: bZIP transcription factor 6 [Phaseolus vulgaris]
  misc_feature (8)..(416): Homolog of NCBI NO: 18402186 NR Description: abscisic acid responsive elements-binding factor; id: At3g19290.1, supported by cDNA: gi_15292926, supported by
  misc_feature (64)..(416): Homolog of NCBI NO: 18418350 NR Description: abscisic acid responsive elements-binding protein id: At4g34000.1, supported by cDNA: gi_15451049, by cDNA: gi_20148276, supported by cDNA: gi_6739279 [Arabidopsis
  misc_feature (21)..(64): Homolog of NCBI NO: 18418350 NR Description: abscisic acid responsive elements-binding protein id: At4g34000.1, supported by cDNA: gi_15451049, by cDNA: gi_20148276, supported by cDNA: gi_6739279 [Arabidopsis
  misc_feature (234)..(416): Homolog of NCBI NO: 27469352 NR Description: bZIP transcription factor ABI5 [Hordeum vulgare
  misc_feature (1)..(153): Homolog of NCBI NO: 27469352 NR Description: bZIP transcription factor ABI5 [Hordeum vulgare
  misc_feature (8)..(382): Homolog of NCBI NO: 11994451 NR Description: abscisic acid responsive elements-binding factor
  misc_feature (64)..(382): Homolog of NCBI NO: 30689879 NR Description: abscisic acid responsive elements-binding [Arabidopsis thaliana] >gi|13346159|gb|AAK19603.1|AF334210_1 bZIP
  misc_feature (21)..(64): Homolog of NCBI NO: 30689879 NR Description: abscisic acid responsive elements-binding [Arabidopsis thaliana] >gi|13346159|gb|AAK19603.1|AF334210_1 bZIP
MDGSMNLGNEPPGDGGGGGGLTRQGSIYSLTFDEFQSSVGKDFGSMNMDELLKNIWSAEETQAMASGVVPVLGGGQEGLQLQRQGSLTLPRTLSQKTVDQVWKDLSKVGSSGVGGSNLSQVAQAQSQSQSQRQQTLGEVTLEEFLVRAGVVREEAQVAARAQIAENNKGGYFGNDANTGFSVEFQQPSPRVVAAGVMGNLGAETANSLQVQGSSLPLNVNGARTTYQQSQQQQPIMPKQPGFGYGTQMGQLNSPGIRGGGLVGLGDQSLTNNVGFVQGASAAIPGALGVGAVSPVTPLSSEGIGKSNGDSSSLSPSPYMFNGGVRGRKSGTVEKVVERRQRRMIKNRESAARSRARKQAYTVELEAEVAKLKEENDELQRKQARIMEMQKNQETEMRNLLQGGPKKKLRRTESGPW

SEQ ID NO: 96180 - protein, 412 aa, Arabidopsis thaliana
  peptide (1)..(412): Ceres Seq. ID no. 12732275
  misc_feature (330)..(394): Pfam Name: bZIP transcription factor Pfam Description: bZIP transcription factor
  misc_feature (1)..(412): Homolog of NCBI NO: 30693958 NR Description: ABA-responsive element binding protein 1 thaliana] >gi|6739278|gb|AAF27180.1|AF093545_1 abscisic acid
  misc_feature (2)..(412): Homolog of NCBI NO: 13775111 NR Description: bZIP transcription factor 6 [Phaseolus vulgaris]
  misc_feature (4)..(412): Homolog of NCBI NO: 18402186 NR Description: abscisic acid responsive elements-binding factor; id: At3g19290.1, supported by cDNA: gi_15292926, supported by
  misc_feature (60)..(412): Homolog of NCBI NO: 18418350 NR Description: abscisic acid responsive elements-binding protein id: At4g34000.1, supported by cDNA: gi_15451049, by cDNA: gi_20148276, supported by cDNA: gi_6739279 [Arabidopsis
  misc_feature (17)..(60): Homolog of NCBI NO: 18418350 NR Description: abscisic acid responsive elements-binding protein id: At4g34000.1, supported by cDNA: gi_15451049, by cDNA: gi_20148276, supported by cDNA: gi_6739279 [Arabidopsis
  misc_feature (230)..(412): Homolog of NCBI NO: 27469352 NR Description: bZIP transcription factor ABI5 [Hordeum vulgare
  misc_feature (1)..(149): Homolog of NCBI NO: 27469352 NR Description: bZIP transcription factor ABI5 [Hordeum vulgare
  misc_feature (4)..(378): Homolog of NCBI NO: 11994451 NR Description: abscisic acid responsive elements-binding factor
  misc_feature (60)..(378): Homolog of NCBI NO: 30689879 NR Description: abscisic acid responsive elements-binding [Arabidopsis thaliana] >gi|13346159|gb|AAK19603.1|AF334210_1 bZIP
  misc_feature (17)..(60): Homolog of NCBI NO: 30689879 NR Description: abscisic acid responsive elements-binding [Arabidopsis thaliana] >gi|13346159|gb|AAK19603.1|AF334210_1 bZIP
MNLGNEPPGDGGGGGGLTRQGSIYSLTFDEFQSSVGKDFGSMNMDELLKNIWSAEETQAMASGVVPVLGGGQEGLQLQRQGSLTLPRTLSQKTVDQVWKDLSKVGSSGVGGSNLSQVAQAQSQSQSQRQQTLGEVTLEEFLVRAGVVREEAQVAARAQIAENNKGGYFGNDANTGFSVEFQQPSPRVVAAGVMGNLGAETANSLQVQGSSLPLNVNGARTTYQQSQQQQPIMPKQPGFGYGTQMGQLNSPGIRGGGLVGLGDQSLTNNVGFVQGASAAIPGALGVGAVSPVTPLSSEGIGKSNGDSSSLSPSPYMFNGGVRGRKSGTVEKVVERRQRRMIKNRESAARSRARKQAYTVELEAEVAKLKEENDELQRKQARIMEMQKNQETEMRNLLQGGPKKKLRRTESGPW

SEQ ID NO: 96181 - DNA, 1047 bp, Arabidopsis thaliana
  misc_feature (1)..(1047): Ceres Seq. ID no. 12732299
  misc_feature: MA Experiment ID: 20000451 Result: Up-regulated in Transcription
  misc_feature: MA Experiment 20000451 PARAMETER Experiment Name: At_CS6879_Shoots-Roots_P Parameter: Age (day) Value: 14
  misc_feature: MA Experiment 20000451 PARAMETER Experiment Name: At_CS6879_Shoots-Roots_P Parameter: Organism Value: A. thaliana
  misc_feature: MA Experiment 20000451 PARAMETER Experiment Name: At_CS6879_Shoots-Roots_P Parameter: Plant Line Value: CS6879 vs. WS
  misc_feature: MA Experiment 20000451 PARAMETER Experiment Name: At_CS6879_Shoots-Roots_P Parameter: Tissue Value: Roots
atggcgatgatggtcgagaatagctacggtggttacggtggtggcggcggagagaggatacaacttatggtcgaaggtcaaggcaaagctgttccggctccgtttttgacaaagacttatcaacttgttgatgatcctgcgacggatcatgtcgtttcttggggtgatgatgatactacttttgtcgtttggcgtccaccggagtttgctcgtgatcttcttcctaattactttaaacataacaacttctctagcttcgttcgtcagctcaatacttatggtttcagaaagattgtaccagatcgatgggagttcgcgaacgagtttttcaagagaggagagaaacatttactctgcgaaatccaccgccgtaaaacatctcaaatgataccacaacaacactctccgttcatgtcacaccaccacgctccgccgcagattccattctccggcggttctttcttcccattaccaccaccacgtgtcaccactccagaagaagaccattactggtgcgacgactcaccaccgtcaagaccacgagtcataccacaacaaattgacacggcggcgcaagtaacggcattgagtgaagacaacgagagattacgacgaagcaacacagtgttaatgtcggaactagctcacatgaagaaactctacaacgacattatctactttgttcaaaaccatgtcaagcctgttgctccaagtaacaactctagttatctctcttcatttctccagaagcaacaacaacaacaacctccaacacttgattattacaatactgccactgtcaatgccactaatctcaatgctttgaactcatctccaccaacttcacaaagctctattacagttcttgaagatgatcacactaatcatcatgatcagagtaatatgagaaagacaaagctttttggagtttcgttgccttcttctaagaagagatcacatcatttctcagaccaaacaagcaaaacgagacttgtgttggatcagtctgatcttgctttgaatctcatgactgcttctacacgttaa

SEQ ID NO: 96182 - protein, 348 aa, Arabidopsis thaliana
  peptide (1)..(348): Ceres Seq. ID no. 12732300
  misc_feature (32)..(248): Pfam Name: HSF-type DNA-binding Pfam Description: HSF-type DNA-binding
  misc_feature (1)..(348): Homolog of NCBI NO: 15220101 NR Description: heat shock transcription factor, putative; id: At1g46264.1 [Arabidopsis thaliana] >gi|25296103|pir||C96511
MAMMVENSYGGYGGGGGERIQLMVEGQGKAVPAPFLTKTYQLVDDPATDHVVSWGDDDTTFVVWRPPEFARDLLPNYFKHNNFSSFVRQLNTYGFRKIVPDRWEFANEFFKRGEKHLLCEIHRRKTSQMIPQQHSPFMSHHHAPPQIPFSGGSFFPLPPPRVTTPEEDHYWCDDSPPSRPRVIPQQIDTAAQVTALSEDNERLRRSNTVLMSELAHMKKLYNDIIYFVQNHVKPVAPSNNSSYLSSFLQKQQQQQPPTLDYYNTATVNATNLNALNSSPPTSQSSITVLEDDHTNHHDQSNMRKTKLFGVSLPSSKKRSHHFSDQTSKTRLVLDQSDLALNLMTASTR

SEQ ID NO: 96183 - protein, 346 aa, Arabidopsis thaliana
  peptide (1)..(346): Ceres Seq. ID no. 12732301
  misc_feature (30)..(246): Pfam Name: HSF-type DNA-binding Pfam Description: HSF-type DNA-binding
  misc_feature (1)..(346): Homolog of NCBI NO: 15220101 NR Description: heat shock transcription factor, putative; id: At1g46264.1 [Arabidopsis thaliana] >gi|25296103|pir||C96511
MMVENSYGGYGGGGGERIQLMVEGQGKAVPAPFLTKTYQLVDDPATDHVVSWGDDDTTFVVWRPPEFARDLLPNYFKHNNFSSFVRQLNTYGFRKIVPDRWEFANEFFKRGEKHLLCEIHRRKTSQMIPQQHSPFMSHHHAPPQIPFSGGSFFPLPPPRVTTPEEDHYWCDDSPPSRPRVIPQQIDTAAQVTALSEDNERLRRSNTVLMSELAHMKKLYNDIIYFVQNHVKPVAPSNNSSYLSSFLQKQQQQQPPTLDYYNTATVNATNLNALNSSPPTSQSSITVLEDDHTNHHDQSNMRKTKLFGVSLPSSKKRSHHFSDQTSKTRLVLDQSDLALNLMTASTR

SEQ ID NO: 96184 - protein, 345 aa, Arabidopsis thaliana
  peptide (1)..(345): Ceres Seq. ID no. 12732302
  misc_feature (29)..(245): Pfam Name: HSF-type DNA-binding Pfam Description: HSF-type DNA-binding
  misc_feature (1)..(345): Homolog of NCBI NO: 15220101 NR Description: heat shock transcription factor, putative; id: At1g46264.1 [Arabidopsis thaliana] >gi|25296103|pir||C96511
MVENSYGGYGGGGGERIQLMVEGQGKAVPAPFLTKTYQLVDDPATDHVVSWGDDDTTFVVWRPPEFARDLLPNYFKHNNFSSFVRQLNTYGFRKIVPDRWEFANEFFKRGEKHLLCEIHRRKTSQMIPQQHSPFMSHHHAPPQIPFSGGSFFPLPPPRVTTPEEDHYWCDDSPPSRPRVIPQQIDTAAQVTALSEDNERLRRSNTVLMSELAHMKKLYNDIIYFVQNHVKPVAPSNNSSYLSSFLQKQQQQQPPTLDYYNTATVNATNLNALNSSPPTSQSSITVLEDDHTNHHDQSNMRKTKLFGVSLPSSKKRSHHFSDQTSKTRLVLDQSDLALNLMTASTR

SEQ ID NO: 96185 - DNA, 880 bp, Arabidopsis thaliana
  misc_feature (1)..(880): Ceres Seq. ID no. 12732323
  misc_feature: MA Experiment ID: 108434 Result: Up-regulated in Transcription
  misc_feature: MA Experiment 108434 PARAMETER Experiment Name: At_Root_Tips_cDNA_P Parameter: Tissue Value: Root Tips
  misc_feature: MA Experiment ID: 108462 Result: Down-regulated in Transcription
  misc_feature: MA Experiment 108462 PARAMETER Experiment Name: At_Germinating_Seeds_cDNA_P Parameter: Age (day) Value: 2 vs. 0
  misc_feature: MA Experiment 108462 PARAMETER Experiment Name: At_Germinating_Seeds_cDNA_P Parameter: Tissue Value: Germinating Seeds
  misc_feature: MA Experiment ID: 108463 Result: Down-regulated in Transcription
  misc_feature: MA Experiment 108463 PARAMETER Experiment Name: At_Germinating_Seeds_cDNA_P Parameter: Age (day) Value: 3 vs. 0
  misc_feature: MA Experiment 108463 PARAMETER Experiment Name: At_Germinating_Seeds_cDNA_P Parameter: Tissue Value: Germinating Seeds
  misc_feature: MA Experiment ID: 108464 Result: Down-regulated in Transcription
  misc_feature: MA Experiment 108464 PARAMETER Experiment Name: At_Germinating_Seeds_cDNA_P Parameter: Age (day) Value: 4 vs. 0
  misc_feature: MA Experiment 108464 PARAMETER Experiment Name: At_Germinating_Seeds_cDNA_P Parameter: Tissue Value: Germinating Seeds
  misc_feature: MA Experiment ID: 108585 Result: Up-regulated in Transcription
  misc_feature: MA Experiment 108585 PARAMETER Experiment Name: At_5mM_NaNP_cDNA_P Parameter: Timepoint (hr) Value: 6
  misc_feature: MA Experiment 108585 PARAMETER Experiment Name: At_5mM_NaNP_cDNA_P Parameter: Tissue Value: Aerial
  misc_feature: MA Experiment 108585 PARAMETER Experiment Name: At_5mM_NaNP_cDNA_P Parameter: Treatment Value: null
  misc_feature: MA Experiment ID: 20000068 Result: Down-regulated in Transcription
  misc_feature: MA Experiment ID: 20000224 Result: Down-regulated in Transcription
agaggaacaagaagaagaaagatgttcaggaaccagtacgacacagatgtgacaacatggagtcccacaggtcgactattccaagtcgaatacgccatggaagctgtgaaacaaggctccgcagcaataggactcagatctcgctctcatgtcgtcctcgcttgtgtcaacaaagcacaatcagagctctcttctcatcaaaggaagatctttaaagtcgatgatcatattggtgttgctattgctggtctcactgctgatggtcgtgttctctctcgatatatgagatctgagtctattaatcactcttttacttatgagtctcctcttcctgttggtcgtcttgttgttcatcttgctgataaagctcaggtatgtacccaacgatcatggaaacggccttatggtgtgggtttgctggtaggtggattggacgagtcaggagctcacctctactacaactgccctagcggaaactactttgaatatcaagcattcgctatcgggtctcgttcacaagctgcgaaaacctatctggagcgcaaattcgagagcttccaagaatcatcaaaagaagatctgataaaagatgctattatggccataagggaaactttgcaaggggaaacactgaagagctcgctctgcactgtttctgttctaggagtcgatgaaccattccatttcttggaccaggaaagcattcaaaaggtgattgatacgtttgagaaggttcctgaggaagaggaagatgctggtgagggtgaggccgaacccgaagctgctcctggtgctgctggaactggtgaacaaggtggttcaggtgatcaagatgttgcaccaatggaaatttgagcaagagggaatgagttcaaagttg

SEQ ID NO: 96186 - protein, 284 aa, Arabidopsis thaliana
  peptide (1)..(284): Ceres Seq. ID no. 12732324
  misc_feature (36)..(221): Pfam Name: Proteasome A-type and B-type Pfam Description: Proteasome A-type and B-type
  misc_feature (8)..(284): Homolog of NCBI NO: 15220151 NR Description: 20S proteasome alpha subunit F2 (PAF2); protein At1g47250.1, supported by cDNA: gi_16323090, supported by cDNA: [Arabidopsis thaliana] >gi|12229892|sp|O23712|PS12_ARATH complex
  misc_feature (18)..(284): Homolog of NCBI NO: 2511586 NR Description: multicatalytic endopeptidase [Arabidopsis
  misc_feature (8)..(284): Homolog of NCBI NO: 25290066 NR Description: C 3.4.25.1 proteasome endopeptidase complex ()
  misc_feature (8)..(284): Homolog of NCBI NO: 21537234 NR Description: 20S proteasome subunit PAF1 [Arabidopsis thaliana]
  misc_feature (8)..(284): Homolog of NCBI NO: 15239061 NR Description: 20S proteasome alpha subunit F1 (PAF1); protein At5g42790.1, supported by cDNA: 12455., supported by cDNA: supported by cDNA: gi_16648703 [Arabidopsis thaliana] (20S
  misc_feature (8)..(284): Homolog of NCBI NO: 22947842 NR Description: 20S proteasome alpha 6 subunit [Nicotiana
  misc_feature (8)..(257): Homolog of NCBI NO: 1709758 NR Description: Proteasome subunit alpha type 1 (20S proteasome
  misc_feature (13)..(169): Homolog of NCBI NO: 14594923 NR Description: putative alpha6 proteasome subunit [Nicotiana
  misc_feature (8)..(243): Homolog of NCBI NO: 12229911 NR Description: Proteasome subunit alpha type 1 (Proteasome
  misc_feature (8)..(259): Homolog of NCBI NO: 30584967 NR Description: Homo sapiens proteasome (prosome, macropain)
RGTRRRKMFRNQYDTDVTTWSPTGRLFQVEYAMEAVKQGSAAIGLRSRSHVVLACVNKAQSELSSHQRKIFKVDDHIGVAIAGLTADGRVLSRYMRSESINHSFTYESPLPVGRLVVHLADKAQVCTQRSWKRPYGVGLLVGGLDESGAHLYYNCPSGNYFEYQAFAIGSRSQAAKTYLERKFESFQESSKEDLIKDAIMAIRETLQGETLKSSLCTVSVLGVDEPFHFLDQESIQKVIDTFEKVPEEEEDAGEGEAEPEAAPGAAGTGEQGGSGDQDVAPMEI

SEQ ID NO: 96187 - protein, 277 aa, Arabidopsis thaliana; identical to SEQ ID NO: 35615
  peptide (1)..(277): Ceres Seq. ID no. 12732325
  misc_feature (29)..(214): Pfam Name: Proteasome A-type and B-type Pfam Description: Proteasome A-type and B-type
  misc_feature (1)..(277): Homolog of NCBI NO: 15220151 NR Description: 20S proteasome alpha subunit F2 (PAF2); protein At1g47250.1, supported by cDNA: gi_16323090, supported by cDNA: [Arabidopsis thaliana] >gi|12229892|sp|O23712|PS12_ARATH complex
  misc_feature (11)..(277): Homolog of NCBI NO: 2511586 NR Description: multicatalytic endopeptidase [Arabidopsis
  misc_feature (1)..(277): Homolog of NCBI NO: 25290066 NR Description: C 3.4.25.1 proteasome endopeptidase complex ()
  misc_feature (1)..(277): Homolog of NCBI NO: 21537234 NR Description: 20S proteasome subunit PAF1 [Arabidopsis thaliana]
  misc_feature (1)..(277): Homolog of NCBI NO: 15239061 NR Description: 20S proteasome alpha subunit F1 (PAF1); protein At5g42790.1, supported by cDNA: 12455., supported by cDNA: supported by cDNA: gi_16648703 [Arabidopsis thaliana] (20S
  misc_feature (1)..(277): Homolog of NCBI NO: 22947842 NR Description: 20S proteasome alpha 6 subunit [Nicotiana
  misc_feature (1)..(250): Homolog of NCBI NO: 1709758 NR Description: Proteasome subunit alpha type 1 (20S proteasome
  misc_feature (6)..(162): Homolog of NCBI NO: 14594923 NR Description: putative alpha6 proteasome subunit [Nicotiana
  misc_feature (1)..(236): Homolog of NCBI NO: 12229911 NR Description: Proteasome subunit alpha type 1 (Proteasome
  misc_feature (1)..(252): Homolog of NCBI NO: 30584967 NR Description: Homo sapiens proteasome (prosome, macropain)

SEQ ID NO: 96188 - protein, 252 aa, Arabidopsis thaliana; identical to SEQ ID NO: 35616
  peptide (1)..(252): Ceres Seq. ID no. 12732326
  misc_feature (4)..(189): Pfam Name: Proteasome A-type and B-type Pfam Description: Proteasome A-type and B-type
  misc_feature (1)..(252): Homolog of NCBI NO: 15220151 NR Description: 20S proteasome alpha subunit F2 (PAF2); protein At1g47250.1, supported by cDNA: gi_16323090, supported by cDNA: [Arabidopsis thaliana] >gi|12229892|sp|O23712|PS12_ARATH complex
  misc_feature (1)..(252): Homolog of NCBI NO: 2511586 NR Description: multicatalytic endopeptidase [Arabidopsis
  misc_feature (1)..(252): Homolog of NCBI NO: 25290066 NR Description: C 3.4.25.1 proteasome endopeptidase complex ()
  misc_feature (1)..(252): Homolog of NCBI NO: 21537234 NR Description: 20S proteasome subunit PAF1 [Arabidopsis thaliana]
  misc_feature (1)..(252): Homolog of NCBI NO: 15239061 NR Description: 20S proteasome alpha subunit F1 (PAF1); protein At5g42790.1, supported by cDNA: 12455., supported by cDNA: supported by cDNA: gi_16648703 [Arabidopsis thaliana] (20S
  misc_feature (1)..(252): Homolog of NCBI NO: 22947842 NR Description: 20S proteasome alpha 6 subunit [Nicotiana
  misc_feature (1)..(225): Homolog of NCBI NO: 1709758 NR Description: Proteasome subunit alpha type 1 (20S proteasome
  misc_feature (1)..(137): Homolog of NCBI NO: 14594923 NR Description: putative alpha6 proteasome subunit [Nicotiana
  misc_feature (1)..(211): Homolog of NCBI NO: 12229911 NR Description: Proteasome subunit alpha type 1 (Proteasome
  misc_feature (1)..(227): Homolog of NCBI NO: 30584967 NR Description: Homo sapiens proteasome (prosome, macropain)

SEQ ID NO: 96189 - DNA, 1819 bp, Arabidopsis thaliana
  misc_feature (1)..(1819): Ceres Seq. ID no. 12732327
  misc_feature: MA Experiment ID: 20000184 Result: Down-regulated in Transcription
  misc_feature: MA Experiment 20000184 PARAMETER Experiment Name: At_Shoots__P Parameter: Age (day) Value: 7
  misc_feature: MA Experiment 20000184 PARAMETER Experiment Name: At_Shoots__P Parameter: Tissue Value: Shoots vs. Whole Plant
  misc_feature: MA Experiment ID: 20000264 Result: Up-regulated in Transcription
  misc_feature: MA Experiment 20000264 PARAMETER Experiment Name: At_Open_Flower_P Parameter: Age (day) Value: 21
  misc_feature: MA Experiment 20000264 PARAMETER Experiment Name: At_Open_Flower_P Parameter: Plant Line Value: WS
  misc_feature: MA Experiment 20000264 PARAMETER Experiment Name: At_Open_Flower_P Parameter: Tissue Value: Open Flower vs. Whole Plant
  misc_feature: MA Experiment ID: 20000286 Result: Up-regulated in Transcription
  misc_feature: MA Experiment 20000286 PARAMETER Experiment Name: At_Open_Flower_P Parameter: Age (day) Value: 21
  misc_feature: MA Experiment 20000286 PARAMETER Experiment Name: At_Open_Flower_P Parameter: Plant Line Value: WS
  misc_feature: MA Experiment 20000286 PARAMETER Experiment Name: At_Open_Flower_P Parameter: Tissue Value: Half Open vs. Whole Plant
  misc_feature: MA Experiment ID: 20000439 Result: Up-regulated in Transcription
  misc_feature: MA Experiment 20000439 PARAMETER Experiment Name: At_Roots__P Parameter: Age (day) Value: 14 vs. 21
  misc_feature: MA Experiment 20000439 PARAMETER Experiment Name: At_Roots__P Parameter: Organism Value: A. thaliana
  misc_feature: MA Experiment 20000439 PARAMETER Experiment Name: At_Roots__P Parameter: Tissue Value: Roots vs. Whole Plant
  misc_feature: MA Experiment ID: 20000794 Result: Up-regulated in Transcription
  misc_feature: MA Experiment 20000794 PARAMETER Experiment Name: At_Petals_P Parameter: Age (day) Value: 23-25 days
  misc_feature: MA Experiment 20000794 PARAMETER Experiment Name: At_Petals_P Parameter: Plant Line Value: WS
  misc_feature: MA Experiment 20000794 PARAMETER Experiment Name: At_Petals_P Parameter: Tissue Value: Petals vs. Whole plant
aaaacatcaaagagtcactctaaactcatctctctcgccgaattctccccaacaatttccgccggaaacaaattctcagattccggtaactctaaaactatgtcatcggatattccgtgctgcggaaccacgttctcgctctacgtcgtgataatcatagctcttgtagcgttcgctggcttgatggctggtttaactcttggtctcatgtctctcggtttagtcgacctcgaagttctcatcaaatctggccgtcctcaagatcgaatcaacgccggtaagatatttccagtagtgaagaatcagcatctgttgctatgtacacttttgatcggaaactctatggctatggaggctttaccaatatttttggataaaattgtgcctccttggttagctattcttctttcagtgactcttatactggtgtttggagagataatgccacaagcagtttgtactcgatacgggcttaaggttggagcgataatggctccttttgttcgtgttcttcttgtactgttcttcccaatttcatatccaatcagtaaggttcttgattggatgttgggtaagggacatggagttcttttacggagagcagagctaaagacatttgtgaatttccatggaaatgaggctgggaaaggtggagatctaacaaccgatgagacttcaatcatcacaggtgcacttgaattaactgaaaagacggcaaaagatgcaatgactcccatatcgaatgcattttcccttgagcttgatacacctcttaatttggaaactttaaatacaattatgtcagttggtcatagcagagttccagtttatttcagaaatcccacacatataattgggctcattctggttaaaaatctattggcagttgatgccagaaaggaagttcctctgagaaaaatgtccatgagaaaaattccacgtgtctctgagaccatgccactatatgatatcttaaacgagttccagaagggtcacagtcacatagcagttgtttacaaggatcttgacgagcaggagcaatctcccgaaacaagtgaaaatggtattgagcgcagaaaaaacaagaaaacgaaagacgaactttttaaggacagttgtaggaaaccaaaagctcagtttgaggtatcggagaaggaagtattcaaaattgaaaccggagatgcaaaatccggcaagagtgagaacggtgaggagcagcaagggtcagggaaaacaagtctattggctgctccagctaagaagcgacatagaggctgttcgttctgcattttggacattgagaatactcccatacctgattttcctaccaatgaggaggttgtaggagttatcaccatggaggatgttatcgaagagcttcttcaggaagagatccttgacgaaaccgatgagtatgtgaacatccacaacaggataagagtcaacatgcatgcttctccagagaatctaccaagcgtgataacctcaatcacgcaatcatcatcgggttccactagtcccaaccaaacatctcatatggccacaccagattcaagtcctacaacaaaaccatcaaattcaagtcctacaagaaaaccttcagtatcgagtcctacgagagagccttcagattcttcacactccatggctccaaaacatgaagagtccacccaaactttatgatgatcatatatgagtgaagatagattagctatgtatccttaaaagatgacttctttaacagaatcgtttgtgtgtttgagattaagactggttaatagtttctttgtaatgaaaaggatggatcttttaccaaaag

SEQ ID NO: 96190 - protein, 560 aa, Arabidopsis thaliana
  peptide (1)..(560): Ceres Seq. ID no. 12732328
  misc_feature (47)..(224): Pfam Name: Domain of unknown function DUF21 Pfam Description: Domain of unknown function DUF21
  misc_feature (34)..(560): Homolog of NCBI NO: 22330087 NR Description: unknown protein; protein id: At1g47330.1, by cDNA: gi_19715639 [Arabidopsis thaliana] At1g47330/T3F24_2 [Arabidopsis thaliana]
  misc_feature (290)..(560): Homolog of NCBI NO: 25405200 NR Description: hypothetical protein T3F24.6 [imported] - thaliana >gi|9993348|gb|AAG11421.1|AC015449_3 Unknown protein
  misc_feature (34)..(276): Homolog of NCBI NO: 25405200 NR Description: hypothetical protein T3F24.6 [imported] - thaliana >gi|9993348|gb|AAG11421.1|AC015449_3 Unknown protein
  misc_feature (34)..(355): Homolog of NCBI NO: 40538933 NR Description: expressed protein [Oryza sativa (japonica
  misc_feature (430)..(473): Homolog of NCBI NO: 40538933 NR Description: expressed protein [Oryza sativa (japonica
  misc_feature (35)..(362): Homolog of NCBI NO: 15237264 NR Description: putative protein; protein id: At5g52790.1 thaliana] >gi|8953734|dbj|BAA98097.1|
  misc_feature (444)..(548): Homolog of NCBI NO: 15237264 NR Description: putative protein; protein id: At5g52790.1 thaliana] >gi|8953734|dbj|BAA98097.1|
  misc_feature (34)..(377): Homolog of NCBI NO: 30679136 NR Description: CBS domain containing protein [Arabidopsis
  misc_feature (411)..(472): Homolog of NCBI NO: 30679136 NR Description: CBS domain containing protein [Arabidopsis
  misc_feature (34)..(355): Homolog of NCBI NO: 22329131 NR Description: putative protein; protein id: At4g33700.1, by cDNA: gi_17381275, supported by cDNA: gi_20856057 [Arabidopsis >gi|17381276|gb|AAL36056.1| AT4g33700/T16L1_190 [Arabidopsis
KTSKSHSKLISLAEFSPTISAGNKFSDSGNSKTMSSDIPCCGTTFSLYVVIIIALVAFAGLMAGLTLGLMSLGLVDLEVLIKSGRPQDRINAGKIFPVVKNQHLLLCTLLIGNSMAMEALPIFLDKIVPPWLAILLSVTLILVFGEIMPQAVCTRYGLKVGAIMAPFVRVLLVLFFPISYPISKVLDWMLGKGHGVLLRRAELKTFVNFHGNEAGKGGDLTTDETSIITGALELTEKTAKDAMTPISNAFSLELDTPLNLETLNTIMSVGHSRVPVYFRNPTHIIGLILVKNLLAVDARKEVPLRKMSMRKIPRVSETMPLYDILNEFQKGHSHIAVVYKDLDEQEQSPETSENGIERRKNKKTKDELFKDSCRKPKAQFEVSEKEVFKIETGDAKSGKSENGEEQQGSGKTSLLAAPAKKRHRGCSFCILDIENTPIPDFPTNEEVVGVITMEDVIEELLQEEILDETDEYVNIHNRIRVNMHASPENLPSVITSITQSSSGSTSPNQTSHMATPDSSPTTKPSNSSPTRKPSVSSPTREPSDSSHSMAPKHEESTQTL

SEQ ID NO: 96191 - protein, 527 aa, Arabidopsis thaliana
  peptide (1)..(527): Ceres Seq. ID no. 12732329
  misc_feature (14)..(191): Pfam Name: Domain of unknown function DUF21 Pfam Description: Domain of unknown function DUF21
  misc_feature (1)..(527): Homolog of NCBI NO: 22330087 NR Description: unknown protein; protein id: At1g47330.1, by cDNA: gi_19715639 [Arabidopsis thaliana] At1g47330/T3F24_2 [Arabidopsis thaliana]
  misc_feature (257)..(527): Homolog of NCBI NO: 25405200 NR Description: hypothetical protein T3F24.6 [imported] - thaliana >gi|9993348|gb|AAG11421.1|AC015449_3 Unknown protein
  misc_feature (1)..(243): Homolog of NCBI NO: 25405200 NR Description: hypothetical protein T3F24.6 [imported] - thaliana >gi|9993348|gb|AAG11421.1|AC015449_3 Unknown protein
  misc_feature (1)..(322): Homolog of NCBI NO: 40538933 NR Description: expressed protein [Oryza sativa (japonica
  misc_feature (397)..(440): Homolog of NCBI NO: 40538933 NR Description: expressed protein [Oryza sativa (japonica
  misc_feature (2)..(329): Homolog of NCBI NO: 15237264 NR Description: putative protein; protein id: At5g52790.1 thaliana] >gi|8953734|dbj|BAA98097.1|
  misc_feature (411)..(515): Homolog of NCBI NO: 15237264 NR Description: putative protein; protein id: At5g52790.1 thaliana] >gi|8953734|dbj|BAA98097.1|
  misc_feature (1)..(344): Homolog of NCBI NO: 30679136 NR Description: CBS domain containing protein [Arabidopsis
  misc_feature (378)..(439): Homolog of NCBI NO: 30679136 NR Description: CBS domain containing protein [Arabidopsis
  misc_feature (1)..(322): Homolog of NCBI NO: 22329131 NR Description: putative protein; protein id: At4g33700.1, by cDNA: gi_17381275, supported by cDNA: gi_20856057 [Arabidopsis >gi|17381276|gb|AAL36056.1| AT4g33700/T16L1_190 [Arabidopsis
MSSDIPCCGTTFSLYVVIIIALVAFAGLMAGLTLGLMSLGLVDLEVLIKSGRPQDRINAGKIFPVVKNQHLLLCTLLIGNSMAMEALPIFLDKIVPPWLAILLSVTLILVFGEIMPQAVCTRYGLKVGAIMAPFVRVLLVLFFPISYPISKVLDWMLGKGHGVLLRRAELKTFVNFHGNEAGKGGDLTTDETSIITGALELTEKTAKDAMTPISNAFSLELDTPLNLETLNTIMSVGHSRVPVYFRNPTHIIGLILVKNLLAVDARKEVPLRKMSMRKIPRVSETMPLYDILNEFQKGHSHIAVVYKDLDEQEQSPETSENGIERRKNKKTKDELFKDSCRKPKAQFEVSEKEVFKIETGDAKSGKSENGEEQQGSGKTSLLAAPAKKRHRGCSFCILDIENTPIPDFPTNEEVVGVITMEDVIEELLQEEILDETDEYVNIHNRIRVNMHASPENLPSVITSITQSSSGSTSPNQTSHMATPDSSPTTKPSNSSPTRKPSVSSPTREPSDSSHSMAPKHEESTQTL

SEQ ID NO: 96192 - protein, 499 aa, Arabidopsis thaliana
  peptide (1)..(499): Ceres Seq. ID no. 12732330
  misc_feature (1)..(163): Pfam Name: Domain of unknown function DUF21 Pfam Description: Domain of unknown function DUF21
  misc_feature (1)..(499): Homolog of NCBI NO: 22330087 NR Description: unknown protein; protein id: At1g47330.1, by cDNA: gi_19715639 [Arabidopsis thaliana] At1g47330/T3F24_2 [Arabidopsis thaliana]
  misc_feature (229)..(499): Homolog of NCBI NO: 25405200 NR Description: hypothetical protein T3F24.6 [imported] - thaliana >gi|9993348|gb|AAG11421.1|AC015449_3 Unknown protein
  misc_feature (1)..(215): Homolog of NCBI NO: 25405200 NR Description: hypothetical protein T3F24.6 [imported] - thaliana >gi|9993348|gb|AAG11421.1|AC015449_3 Unknown protein
  misc_feature (1)..(294): Homolog of NCBI NO: 40538933 NR Description: expressed protein [Oryza sativa (japonica
  misc_feature (369)..(412): Homolog of NCBI NO: 40538933 NR Description: expressed protein [Oryza sativa (japonica
  misc_feature (1)..(301): Homolog of NCBI NO: 15237264 NR Description: putative protein; protein id: At5g52790.1 thaliana] >gi|8953734|dbj|BAA98097.1|
  misc_feature (383)..(487): Homolog of NCBI NO: 15237264 NR Description: putative protein; protein id: At5g52790.1 thaliana] >gi|8953734|dbj|BAA98097.1|
  misc_feature (1)..(316): Homolog of NCBI NO: 30679136 NR Description: CBS domain containing protein [Arabidopsis
  misc_feature (350)..(411): Homolog of NCBI NO: 30679136 NR Description: CBS domain containing protein [Arabidopsis
  misc_feature (1)..(294): Homolog of NCBI NO: 22329131 NR Description: putative protein; protein id: At4g33700.1, by cDNA: gi_17381275, supported by cDNA: gi_20856057 [Arabidopsis >gi|17381276|gb|AAL36056.1| AT4g33700/T16L1_190 [Arabidopsis
MAGLTLGLMSLGLVDLEVLIKSGRPQDRINAGKIFPVVKNQHLLLCTLLIGNSMAMEALPIFLDKIVPPWLAILLSVTLILVFGEIMPQAVCTRYGLKVGAIMAPFVRVLLVLFFPISYPISKVLDWMLGKGHGVLLRRAELKTFVNFHGNEAGKGGDLTTDETSIITGALELTEKTAKDAMTPISNAFSLELDTPLNLETLNTIMSVGHSRVPVYFRNPTHIIGLILVKNLLAVDARKEVPLRKMSMRKIPRVSETMPLYDILNEFQKGHSHIAVVYKDLDEQEQSPETSENGIERRKNKKTKDELFKDSCRKPKAQFEVSEKEVFKIETGDAKSGKSENGEEQQGSGKTSLLAAPAKKRHRGCSFCILDIENTPIPDFPTNEEVVGVITMEDVIEELLQEEILDETDEYVNIHNRIRVNMHASPENLPSVITSITQSSSGSTSPNQTSHMATPDSSPTTKPSNSSPTRKPSVSSPTREPSDSSHSMAPKHEESTQTL

SEQ ID NO: 96193 - DNA, 2045 bp, Arabidopsis thaliana
  misc_feature (1)..(2045): Ceres Seq. ID no. 12732335
  misc_feature: MA Experiment ID: 20001247 Result: Up-regulated in Transcription
  misc_feature: MA Experiment 20001247 PARAMETER Experiment Name: At_Far-red-induction_P Parameter: Age (day) Value: 7
  misc_feature: MA Experiment 20001247 PARAMETER Experiment Name: At_Far-red-induction_P Parameter: Light Value: Far-red vs. White
  misc_feature: MA Experiment 20001247 PARAMETER Experiment Name: At_Far-red-induction_P Parameter: Organism Value: A. thaliana
  misc_feature: MA Experiment 20001247 PARAMETER Experiment Name: At_Far-red-induction_P Parameter: Plant Line Value: Columbia
  misc_feature: MA Experiment 20001247 PARAMETER Experiment Name: At_Far-red-induction_P Parameter: Timepoint (hr) Value: 1
  misc_feature: MA Experiment 20001247 PARAMETER Experiment Name: At_Far-red-induction_P Parameter: Tissue Value: Whole Plant
  misc_feature: MA Experiment ID: 20001554 Result: Down-regulated in Transcription
  misc_feature: MA Experiment 20001554 PARAMETER Experiment Name: At_Drought_Soil_Dry_P Parameter: Age (day) Value: 21
  misc_feature: MA Experiment 20001554 PARAMETER Experiment Name: At_Drought_Soil_Dry_P Parameter: Organism Value: A. thaliana
  misc_feature: MA Experiment 20001554 PARAMETER Experiment Name: At_Drought_Soil_Dry_P Parameter: Plant Line Value: WS
  misc_feature: MA Experiment 20001554 PARAMETER Experiment Name: At_Drought_Soil_Dry_P Parameter: Post Timepoint (hr) Value: None
  misc_feature: MA Experiment 20001554 PARAMETER Experiment Name: At_Drought_Soil_Dry_P Parameter: Post-Treatment Value: None
  misc_feature: MA Experiment 20001554 PARAMETER Experiment Name: At_Drought_Soil_Dry_P Parameter: Timepoint (day) Value: 7
  misc_feature: MA Experiment 20001554 PARAMETER Experiment Name: At_Drought_Soil_Dry_P Parameter: Treatment Value: Drought vs. No Drought
  misc_feature: MA Experiment ID: 20001557 Result: Up-regulated in Transcription
  misc_feature: MA Experiment 20001557 PARAMETER Experiment Name: At_Drought_Soil_Dry_P Parameter: Age (day) Value: 27
  misc_feature: MA Experiment 20001557 PARAMETER Experiment Name: At_Drought_Soil_Dry_P Parameter: Organism Value: A. thaliana
  misc_feature: MA Experiment 20001557 PARAMETER Experiment Name: At_Drought_Soil_Dry_P Parameter: Plant Line Value: WS
  misc_feature: MA Experiment 20001557 PARAMETER Experiment Name: At_Drought_Soil_Dry_P Parameter: Post Timepoint (hr) Value: 3
  misc_feature: MA Experiment 20001557 PARAMETER Experiment Name: At_Drought_Soil_Dry_P Parameter: Post-Treatment Value: Re-Water vs. No Drought
  misc_feature: MA Experiment 20001557 PARAMETER Experiment Name: At_Drought_Soil_Dry_P Parameter: Timepoint (day) Value: 13
  misc_feature: MA Experiment 20001557 PARAMETER Experiment Name: At_Drought_Soil_Dry_P Parameter: Treatment Value: Drought vs. No Drought
  misc_feature: MA Experiment ID: 20001558 Result: Up-regulated in Transcription
  misc_feature: MA Experiment 20001558 PARAMETER Experiment Name: At_Drought_Soil_Dry_P Parameter: Age (day) Value: 27
  misc_feature: MA Experiment 20001558 PARAMETER Experiment Name: At_Drought_Soil_Dry_P Parameter: Organism Value: A. thaliana
  misc_feature: MA Experiment 20001558 PARAMETER Experiment Name: At_Drought_Soil_Dry_P Parameter: Plant Line Value: WS
  misc_feature: MA Experiment 20001558 PARAMETER Experiment Name: At_Drought_Soil_Dry_P Parameter: Post Timepoint (hr) Value: 6
  misc_feature: MA Experiment 20001558 PARAMETER Experiment Name: At_Drought_Soil_Dry_P Parameter: Post-Treatment Value: Re-Water vs. No Drought
  misc_feature: MA Experiment 20001558 PARAMETER Experiment Name: At_Drought_Soil_Dry_P Parameter: Timepoint (day) Value: 13
  misc_feature: MA Experiment 20001558 PARAMETER Experiment Name: At_Drought_Soil_Dry_P Parameter: Treatment Value: Drought vs. No Drought
aaaagagacagagagaagaaagagaacctcctcaccttcctcctctctttgcgcgttttctctcttctctctctcctacggctgttgaaaccaatggcatttctccacttcgccggaatttcgatcggaagatgaatcgtctccttcgtctctcttcgcttaatcgtcgatcttcttctgtcgccgtctaattgcaaatccaaatcgttttttgtatggtatagagatttggtgaagaactagacgcagcttagaggaagcttttatatttattgaagcttagggggaaacaatgtcaacaaagggagaacatcatacagttccactttctgtgttgcttaaacgtgaatcagctaatgaaaagatagacaatcctgaacttatacacggccagcacaaccaaagcaagaaaggagaggattttactcttgttaaaacagagtgtcaacgtgttatgggcgatggtgttaccaccttctccgtttttgggctttttgatggacacaatggttctgcagcagctatctacactaaagagaaccttttgaataatgtattagctgcaataccttctgatcttaacagagatgagtgggttgctgcacttcctagggctttggttgcaggatttgtgaaaactgataaagatttccaggaaagagcaaggacgtctggaacgactgtaacttttgtcatagtagaaggatgggtggtgagtgttgcatctgtaggtgactctcgttgcatacttgagcctgctgagggcggtgtctattatttgtctgctgatcatcggcttgaaataaacgaagaagagcgagatcgagtcactgcaagtggtggtgaagttggtcggttaaatactggtggcggtactgagattggtcctctgagatgttggcctggtggtctgtgtctctcaagatccattggagatctggatgttggcgaatacattgttccagttccttatgtaaagcaagtcaagttgtcttcagctggtggtcgactgatcatctcaagtgatggtgtgtgggatgcaatatctgcagaagaggctcttgattgttgccgggggttgccacctgaatcttctgcggagcatatcgttaaagaagctgtgggtaaaaaaggtattcgtgatgatacaacctgtattgttgttgatatattgccactagaaaaaccggctgcttccgtgccgcctccaaaaaagcaaggaaaaggaatgttaaagtccatgttcaaaaggaaaacatctgactcctcttctaatatcgagaaagagtacgcagaacctgatgtagttgaagaactctttgaagagggctctgctatgctatcagagagattagacacaaagtacccgctttgcaatatgtttaagttgttcatgtgtgctgtgtgtcaagtagaagtgaaacctggagaaggtgtctcgatccatgccgggtcggataattgccgtaagcttcgtccctgggatggtccattcctttgtgcaagttgccaagataagaaagacgcaatggaagggaaaagatcatcgggagatagacatagtagtgaaagcgactagccagcaatctgcaaattattggcaaagcaactaacaaaacagtattgtgagtaaattggagcagttcaaggatcttcgggttgtaatttttcacccatagagagatatgaagttccttgataaaccaccaacattcttaccattctccagcagactccaaggaagtttatttatttttctcccacttcacgacgtcttacatcaaacttgtttcaaagtagaggtaattcataagttcttttcatttttccttttcatttttttttgtccatttgtgatcactctgtgctttggtatttcaaaaatgagtagaactaactaccagagacagtagctttattacgtctgttgaaatgttgagtcgtttaggaagagagggtaaggaagatatgcaagtatgtgtgcaattatttcaatgtataaaccgaagacaaattcttgatagaaatcaaatcatttttcatgt

SEQ ID NO: 96194 - protein, 428 aa, Arabidopsis thaliana
  peptide (1)..(428): Ceres Seq. ID no. 12732336
  misc_feature (31)..(286): Pfam Name: Protein phosphatase 2C Pfam Description: Protein phosphatase 2C
  misc_feature (1)..(428): Homolog of NCBI NO: 18401703 NR Description: expressed protein; protein id: At1g47380.1
  misc_feature (1)..(428): Homolog of NCBI NO: 15292869 NR Description: unknown protein [Arabidopsis thaliana]
  misc_feature (1)..(417): Homolog of NCBI NO: 14029015 NR Description: Unknown protein [Oryza sativa]
  misc_feature (23)..(427): Homolog of NCBI NO: 38344839 NR Description: OSJNBa0064H22.20 [Oryza sativa (japonica
  misc_feature (10)..(420): Homolog of NCBI NO: 15221404 NR Description: putative protein phosphatase; protein id: supported by cDNA: gi_15292894, supported by cDNA: gi_20259036
  misc_feature (2)..(419): Homolog of NCBI NO: 15217454 NR Description: putative protein phosphatase 2C; protein id: supported by cDNA: gi_16930414 [Arabidopsis thaliana]
  misc_feature (28)..(420): Homolog of NCBI NO: 34914644 NR Description: OSJNBa0054L14.21 [Oryza sativa (japonica
  misc_feature (10)..(419): Homolog of NCBI NO: 34394411 NR Description: protein phosphatase 2C-like [Oryza sativa
  misc_feature (2)..(351): Homolog of NCBI NO: 16930415 NR Description: At1g09160/T12M4_13 [Arabidopsis thaliana]
  misc_feature (10)..(353): Homolog of NCBI NO: 34898168 NR Description: protein phosphatase 2C-like [Oryza sativa
MSTKGEHHTVPLSVLLKRESANEKIDNPELIHGQHNQSKKGEDFTLVKTECQRVMGDGVTTFSVFGLFDGHNGSAAAIYTKENLLNNVLAAIPSDLNRDEWVAALPRALVAGFVKTDKDFQERARTSGTTVTFVIVEGWVVSVASVGDSRCILEPAEGGVYYLSADHRLEINEEERDRVTASGGEVGRLNTGGGTEIGPLRCWPGGLCLSRSIGDLDVGEYIVPVPYVKQVKLSSAGGRLIISSDGVWDAISAEEALDCCRGLPPESSAEHIVKEAVGKKGIRDDTTCIVVDILPLEKPAASVPPPKKQGKGMLKSMFKRKTSDSSSNIEKEYAEPDVVEELFEEGSAMLSERLDTKYPLCNMFKLFMCAVCQVEVKPGEGVSIHAGSDNCRKLRPWDGPFLCASCQDKKDAMEGKRSSGDRHSSESD

SEQ ID NO: 96195 - protein, 374 aa, Arabidopsis thaliana
  peptide (1)..(374): Ceres Seq. ID no. 12732337
  misc_feature (1)..(232): Pfam Name: Protein phosphatase 2C Pfam Description: Protein phosphatase 2C
  misc_feature (1)..(374): Homolog of NCBI NO: 18401703 NR Description: expressed protein; protein id: At1g47380.1
  misc_feature (1)..(374): Homolog of NCBI NO: 15292869 NR Description: unknown protein [Arabidopsis thaliana]
  misc_feature (1)..(363): Homolog of NCBI NO: 14029015 NR Description: Unknown protein [Oryza sativa]
  misc_feature (1)..(373): Homolog of NCBI NO: 38344839 NR Description: OSJNBa0064H22.20 [Oryza sativa (japonica
  misc_feature (1)..(366): Homolog of NCBI NO: 15221404 NR Description: putative protein phosphatase; protein id: supported by cDNA: gi_15292894, supported by cDNA: gi_20259036
  misc_feature (1)..(365): Homolog of NCBI NO: 15217454 NR Description: putative protein phosphatase 2C; protein id: supported by cDNA: gi_16930414 [Arabidopsis thaliana]
  misc_feature (1)..(366): Homolog of NCBI NO: 34914644 NR Description: OSJNBa0054L14.21 [Oryza sativa (japonica
  misc_feature (1)..(365): Homolog of NCBI NO: 34394411 NR Description: protein phosphatase 2C-like [Oryza sativa
  misc_feature (1)..(297): Homolog of NCBI NO: 16930415 NR Description: At1g09160/T12M4_13 [Arabidopsis thaliana]
  misc_feature (1)..(299): Homolog of NCBI NO: 34898168 NR Description: protein phosphatase 2C-like [Oryza sativa
MGDGVTTFSVFGLFDGHNGSAAAIYTKENLLNNVLAAIPSDLNRDEWVAALPRALVAGFVKTDKDFQERARTSGTTVTFVIVEGWVVSVASVGDSRCILEPAEGGVYYLSADHRLEINEEERDRVTASGGEVGRLNTGGGTEIGPLRCWPGGLCLSRSIGDLDVGEYIVPVPYVKQVKLSSAGGRLIISSDGVWDAISAEEALDCCRGLPPESSAEHIVKEAVGKKGIRDDTTCIVVDILPLEKPAASVPPPKKQGKGMLKSMFKRKTSDSSSNIEKEYAEPDVVEELFEEGSAMLSERLDTKYPLCNMFKLFMCAVCQVEVKPGEGVSIHAGSDNCRKLRPWDGPFLCASCQDKKDAMEGKRSSGDRHSSESD

SEQ ID NO: 96196 - DNA, 1305 bp, Arabidopsis thaliana
  misc_feature (1)..(1305): Ceres Seq. ID no. 12732345
  misc_feature: MA Experiment ID: 20000307 Result: Down-regulated in Transcription
  misc_feature: MA Experiment 20000307 PARAMETER Experiment Name: At_Germinating_Seeds_Sub_P Parameter: Age (hr) Value: 24 vs. 0
  misc_feature: MA Experiment 20000307 PARAMETER Experiment Name: At_Germinating_Seeds_Sub_P Parameter: Organism Value: A. thaliana
  misc_feature: MA Experiment 20000307 PARAMETER Experiment Name: At_Germinating_Seeds_Sub_P Parameter: Plant Line Value: WS
  misc_feature: MA Experiment 20000307 PARAMETER Experiment Name: At_Germinating_Seeds_Sub_P Parameter: Tissue Value: Germinating Seeds
  misc_feature: MA Experiment ID: 20000355 Result: Down-regulated in Transcription
  misc_feature: MA Experiment 20000355 PARAMETER Experiment Name: At_Siliques_Sub_P Parameter: Age (day) Value: 21
  misc_feature: MA Experiment 20000355 PARAMETER Experiment Name: At_Siliques_Sub_P Parameter: Organism Value: A. thaliana
  misc_feature: MA Experiment 20000355 PARAMETER Experiment Name: At_Siliques_Sub_P Parameter: Plant Line Value: WS
  misc_feature: MA Experiment 20000355 PARAMETER Experiment Name: At_Siliques_Sub_P Parameter: Tissue Value: Less Than 5mm Siliques vs. Whole Plant
atggcagacgtcaaggttcaatccgaatccgaatcctcggattctcatcccttggtcgactatcaatcacttccaccttatcctccgccgcatccaccggttgaagtagaggagaatcaaccaaaaacatctccgactccgccgccgccacactggatgcgttatccaccggtgttaatgcctcagatgatgtacgcgccgccgccaccgatgccgttctcaccttatcatcaatatccgaatcaccaccactttcaccatcaatctcgtggtaataagcatcaaaacgcttttaatggtgagaataaaactatttgggttggtgatttgcaaaactggatggatgaggcttatcttaattctgcttttacttccgccgaagagagagagattgtttcgctgaaggtgattcgtaataagcacaatggttcatcggaaggatatggatttgtggagtttgagtcccatgatgtagctgataaggttttgcaggagtttaacggggcgcctatgccaaatactgaccaaccttttcgtttgaactgggctagttttagcaccggtgagaagcggttagagaacaatggacctgatctctctatatttgttggggatttggcgccagatgtttcggatgctttgttgcacgagaccttctctgagaagtatccgtcggttaaagctgccaaagttgtccttgatgctaatactggtagatcaaaggggtatgggtttgtgaggtttggagatgagaatgaaaggaccaaagcaatgactgagatgaatggtgttaaatgctctagtagagctatgcgtatcggtcctgctaccccaaggaaaactaatggttatcaacaacaaggtggatacatgccgagtggtgcctttacgcgttctgaaggggacacaatcaacacaacaatatttgttggagggcttgactctagtgtcactgatgaagacttaaagcaacctttctctgaattcggggaaatagtgtctgtcaagattcctgttggtaaaggatgcggatttgttcagtttgttaacagaccaaatgcagaggaggctttggaaaaactcaatgggactgtaattggcaaacaaacagtccggctttcttggggccgtaatccagccaataagcagcctagagataagtatggaaaccaatgggttgatccgtactatggaggacagttttacaatgggtatggatacatggtacctcaacctgacccgagaatgtatcctgctgcaccttactatccaatgtacggtggtcatcagcaacaagttagctga

SEQ ID NO: 96197 - protein, 434 aa, Arabidopsis thaliana
  peptide (1)..(434): Ceres Seq. ID no. 12732346
  misc_feature (201)..(273): Pfam Name: RNA recognition motif. (a.k.a. RRM, RBD, or RNP domain) Pfam Description: RNA recognition motif. (a.k.a. RRM, RBD, or RNP
  misc_feature (1)..(434): Homolog of NCBI NO: 15220241 NR Description: RNA binding protein 47 (RBP47), putative; protein At1g47500.1 [Arabidopsis thaliana] >gi|25386564|pir||C96515
  misc_feature (1)..(434): Homolog of NCBI NO: 15220233 NR Description: RNA binding protein 47 (RBP47), putative; protein At1g47490.1, supported by cDNA: gi_12744992, supported by cDNA: supported by cDNA: gi_17065623 [Arabidopsis thaliana] 3 PF|00076
  misc_feature (17)..(434): Homolog of NCBI NO: 15594035 NR Description: nucleic acid binding protein [Nicotiana tabacum]
  misc_feature (53)..(434): Homolog of NCBI NO: 9663769 NR Description: RNA Binding Protein 47 [Nicotiana plumbaginifolia]
  misc_feature (53)..(434): Homolog of NCBI NO: 7489196 NR Description: RNA binding protein homolog - common tobacco >gi|2708532|gb|AAB92518.1| putative RNA binding protein
  misc_feature (52)..(434): Homolog of NCBI NO: 40804404 NR Description: DNA-binding protein [Lycopersicon esculentum]
  misc_feature (25)..(311): Homolog of NCBI NO: 25386576 NR Description: probable RNA binding protein [imported] - thaliana >gi|10120421|gb|AAG13046.1|AC011807_5 Putative RNA
  misc_feature (288)..(420): Homolog of NCBI NO: 25386576 NR Description: probable RNA binding protein [imported] - thaliana >gi|10120421|gb|AAG13046.1|AC011807_5 Putative RNA
  misc_feature (25)..(420): Homolog of NCBI NO: 15222783 NR Description: RNA binding protein 47 (RBP47), putative; protein
  misc_feature (10)..(407): Homolog of NCBI NO: 15230291 NR Description: RNA binding protein 47 (RBP47), putative; protein
MADVKVQSESESSDSHPLVDYQSLPPYPPPHPPVEVEENQPKTSPTPPPPHWMRYPPVLMPQMMYAPPPPMPFSPYHQYPNHHHFHHQSRGNKHQNAFNGENKTIWVGDLQNWMDEAYLNSAFTSAEEREIVSLKVIRNKHNGSSEGYGFVEFESHDVADKVLQEFNGAPMPNTDQPFRLNWASFSTGEKRLENNGPDLSIFVGDLAPDVSDALLHETFSEKYPSVKAAKVVLDANTGRSKGYGFVRFGDENERTKAMTEMNGVKCSSRAMRIGPATPRKTNGYQQQGGYMPSGAFTRSEGDTINTTIFVGGLDSSVTDEDLKQPFSEFGEIVSVKIPVGKGCGFVQFVNRPNAEEALEKLNGTVIGKQTVRLSWGRNPANKQPRDKYGNQWVDPYYGGQFYNGYGYMVPQPDPRMYPAAPYYPMYGGHQQQVS

SEQ ID NO: 96198 - protein, 382 aa, Arabidopsis thaliana
  peptide (1)..(382): Ceres Seq. ID no. 12732347
  misc_feature (149)..(221): Pfam Name: RNA recognition motif. (a.k.a. RRM, RBD, or RNP domain) Pfam Description: RNA recognition motif. (a.k.a. RRM, RBD, or RNP
  misc_feature (1)..(382): Homolog of NCBI NO: 15220241 NR Description: RNA binding protein 47 (RBP47), putative; protein At1g47500.1 [Arabidopsis thaliana] >gi|25386564|pir||C96515
  misc_feature (1)..(382): Homolog of NCBI NO: 15220233 NR Description: RNA binding protein 47 (RBP47), putative; protein At1g47490.1, supported by cDNA: gi_12744992, supported by cDNA: supported by cDNA: gi_17065623 [Arabidopsis thaliana] 3 PF|00076
  misc_feature (1)..(382): Homolog of NCBI NO: 15594035 NR Description: nucleic acid binding protein [Nicotiana tabacum]
  misc_feature (1)..(382): Homolog of NCBI NO: 9663769 NR Description: RNA Binding Protein 47 [Nicotiana plumbaginifolia]
  misc_feature (1)..(382): Homolog of NCBI NO: 7489196 NR Description: RNA binding protein homolog - common tobacco >gi|2708532|gb|AAB92518.1| putative RNA binding protein
  misc_feature (1)..(382): Homolog of NCBI NO: 40804404 NR Description: DNA-binding protein [Lycopersicon esculentum]
  misc_feature (1)..(259): Homolog of NCBI NO: 25386576 NR Description: probable RNA binding protein [imported] - thaliana >gi|10120421|gb|AAG13046.1|AC011807_5 Putative RNA
  misc_feature (236)..(368): Homolog of NCBI NO: 25386576 NR Description: probable RNA binding protein [imported] - thaliana >gi|10120421|gb|AAG13046.1|AC011807_5 Putative RNA
  misc_feature (1)..(368): Homolog of NCBI NO: 15222783 NR Description: RNA binding protein 47 (RBP47), putative; protein
  misc_feature (1)..(355): Homolog of NCBI NO: 15230291 NR Description: RNA binding protein 47 (RBP47), putative; protein
MRYPPVLMPQMMYAPPPPMPFSPYHQYPNHHHFHHQSRGNKHQNAFNGENKTIWVGDLQNWMDEAYLNSAFTSAEEREIVSLKVIRNKHNGSSEGYGFVEFESHDVADKVLQEFNGAPMPNTDQPFRLNWASFSTGEKRLENNGPDLSIFVGDLAPDVSDALLHETFSEKYPSVKAAKVVLDANTGRSKGYGFVRFGDENERTKAMTEMNGVKCSSRAMRIGPATPRKTNGYQQQGGYMPSGAFTRSEGDTINTTIFVGGLDSSVTDEDLKQPFSEFGEIVSVKIPVGKGCGFVQFVNRPNAEEALEKLNGTVIGKQTVRLSWGRNPANKQPRDKYGNQWVDPYYGGQFYNGYGYMVPQPDPRMYPAAPYYPMYGGHQQQVS

SEQ ID NO: 96199 - protein, 375 aa, Arabidopsis thaliana
  peptide (1)..(375): Ceres Seq. ID no. 12732348
  misc_feature (142)..(214): Pfam Name: RNA recognition motif. (a.k.a. RRM, RBD, or RNP domain) Pfam Description: RNA recognition motif. (a.k.a. RRM, RBD, or RNP
  misc_feature (1)..(375): Homolog of NCBI NO: 15220241 NR Description: RNA binding protein 47 (RBP47), putative; protein At1g47500.1 [Arabidopsis thaliana] >gi|25386564|pir||C96515
  misc_feature (1)..(375): Homolog of NCBI NO: 15220233 NR Description: RNA binding protein 47 (RBP47), putative; protein At1g47490.1, supported by cDNA: gi_12744992, supported by cDNA: supported by cDNA: gi_17065623 [Arabidopsis thaliana] 3 PF|00076
  misc_feature (1)..(375): Homolog of NCBI NO: 15594035 NR Description: nucleic acid binding protein [Nicotiana tabacum]
  misc_feature (1)..(375): Homolog of NCBI NO: 9663769 NR Description: RNA Binding Protein 47 [Nicotiana plumbaginifolia]
  misc_feature (1)..(375): Homolog of NCBI NO: 7489196 NR Description: RNA binding protein homolog - common tobacco >gi|2708532|gb|AAB92518.1| putative RNA binding protein
  misc_feature (1)..(375): Homolog of NCBI NO: 40804404 NR Description: DNA-binding protein [Lycopersicon esculentum]
  misc_feature (1)..(252): Homolog of NCBI NO: 25386576 NR Description: probable RNA binding protein [imported] - thaliana >gi|10120421|gb|AAG13046.1|AC011807_5 Putative RNA
  misc_feature (229)..(361): Homolog of NCBI NO: 25386576 NR Description: probable RNA binding protein [imported] - thaliana >gi|10120421|gb|AAG13046.1|AC011807_5 Putative RNA
  misc_feature (1)..(361): Homolog of NCBI NO: 15222783 NR Description: RNA binding protein 47 (RBP47), putative; protein
  misc_feature (1)..(348): Homolog of NCBI NO: 15230291 NR Description: RNA binding protein 47 (RBP47), putative; protein
MPQMMYAPPPPMPFSPYHQYPNHHHFHHQSRGNKHQNAFNGENKTIWVGDLQNWMDEAYLNSAFTSAEEREIVSLKVIRNKHNGSSEGYGFVEFESHDVADKVLQEFNGAPMPNTDQPFRLNWASFSTGEKRLENNGPDLSIFVGDLAPDVSDALLHETFSEKYPSVKAAKVVLDANTGRSKGYGFVRFGDENERTKAMTEMNGVKCSSRAMRIGPATPRKTNGYQQQGGYMPSGAFTRSEGDTINTTIFVGGLDSSVTDEDLKQPFSEFGEIVSVKIPVGKGCGFVQFVNRPNAEEALEKLNGTVIGKQTVRLSWGRNPANKQPRDKYGNQWVDPYYGGQFYNGYGYMVPQPDPRMYPAAPYYPMYGGHQQQVS

SEQ ID NO: 96200 - DNA, 1749 bp, Arabidopsis thaliana
  misc_feature (1)..(1749): Ceres Seq. ID no. 12732353
  misc_feature: MA Experiment ID: 20000265 Result: Down-regulated in Transcription
  misc_feature: MA Experiment 20000265 PARAMETER Experiment Name: At_Open_Flower_P Parameter: Age (day) Value: 21
  misc_feature: MA Experiment 20000265 PARAMETER Experiment Name: At_Open_Flower_P Parameter: Plant Line Value: WS
  misc_feature: MA Experiment 20000265 PARAMETER Experiment Name: At_Open_Flower_P Parameter: Tissue Value: Closed Flower vs. Whole Plant
  misc_feature: MA Experiment ID: 20000286 Result: Down-regulated in Transcription
  misc_feature: MA Experiment 20000286 PARAMETER Experiment Name: At_Open_Flower_P Parameter: Age (day) Value: 21
  misc_feature: MA Experiment 20000286 PARAMETER Experiment Name: At_Open_Flower_P Parameter: Plant Line Value: WS
  misc_feature: MA Experiment 20000286 PARAMETER Experiment Name: At_Open_Flower_P Parameter: Tissue Value: Half Open vs. Whole Plant
  misc_feature: MA Experiment ID: 20000794 Result: Down-regulated in Transcription
  misc_feature: MA Experiment 20000794 PARAMETER Experiment Name: At_Petals_P Parameter: Age (day) Value: 23-25 days
  misc_feature: MA Experiment 20000794 PARAMETER Experiment Name: At_Petals_P Parameter: Plant Line Value: WS
  misc_feature: MA Experiment 20000794 PARAMETER Experiment Name: At_Petals_P Parameter: Tissue Value: Petals vs. Whole plant
  misc_feature: MA Experiment ID: 20001911 Result: Up-regulated in Transcription
  misc_feature: MA Experiment 20001911 PARAMETER Experiment Name: At_Drought_Reproduction_P Parameter: Age (day) Value: 40
  misc_feature: MA Experiment 20001911 PARAMETER Experiment Name: At_Drought_Reproduction_P Parameter: Organism Value: A. thaliana
  misc_feature: MA Experiment 20001911 PARAMETER Experiment Name: At_Drought_Reproduction_P Parameter: Plant Line Value: WS
  misc_feature: MA Experiment 20001911 PARAMETER Experiment Name: At_Drought_Reproduction_P Parameter: Timepoint (day) Value: 10
  misc_feature: MA Experiment 20001911 PARAMETER Experiment Name: At_Drought_Reproduction_P Parameter: Tissue Value: Flowers
  misc_feature: MA Experiment 20001911 PARAMETER Experiment Name: At_Drought_Reproduction_P Parameter: Treatment Value: Drought vs. No Drought
aaagagaaagcaaagaagagaaactaaaacagagcttttttcacatgggaaaggataagactttgccgttgcttgaccctcgtgagccaccggaactcaccggaaccaagtcggcgtcaaaagtatgggccaaagagttcggcgaagagtcgaagcggctttgggagttagcaggaccagcgattttcactgccataagtcaatactctcttggtgctctcactcagactttctccggccgtctcggtgaacttgagctcgccgccgtctcagttgaaaactctgttatctccggtcttgccttcggtgtcatgttagggatggggagtgcattggagacgttgtgtggacaagcatatggcgcgggacagattaggatgatgggaatatatatgcaacgttcatgggtcattctctttactactgctttgtttttgcttcccgtctacatttgggctcctcctattctttccttcttcggcgaggctcctcacatctctaaagccgcggggaagttcgcattgtggatgatcccgcaactatttgcctatgcagccaacttcccgatacagaaattcttgcagtcacagaggaaagttcttgtgatggcttggatctctggagtggttttagttatacatgcagtttttagctggctcttcattctttactttaagtggggacttgtaggtgcagctatcactctcaatacctcgtggtggttgattgttattggtcagcttttgtatatcttaatcaccaaatcagacggtgcgtggactggattttctatgctagcgtttcgggacctctatggatttgtcaaactttccttagcctctgctcttatgctttgtttggagttttggtacttgatggttctggttgttgttaccggtctccttcctaacccgttgataccagtcgatgccatctccatttgcatgaatatagaagggtggactgccatgatttcgatcgggtttaacgctgcgattagtgtgagagtatcgaatgagctgggtgcaggaaacgcagcgttagccaaattctcagtgatagtcgtctccataacttcaactcttatcgggatagtgtgcatgattgttgtcttagccacaaaagacagcttcccttatcttttcacttcaagcgaagctgtggcagcagaaaccacgagaatagccgtcttgttgggcttcactgtcctcttgaacagcctccagcccgtcttgtcaggggttgcggttggagcggggtggcaggctctggttgcatacgtgaacattgcgtgttattacattatcggactacctgctggtcttgttcttggattcacactagacctcggcgttcagggaatatggggaggtatggtagctggaatatgcttgcagacacttatattgattggaatcatctacttcactaactggaacaaagaggctgagcaagcggagagtcgagttcagagatggggaggaacggcgcaggagtgatcaacaactcccttaggacgtggactatatcagttattgatctttttttgtcaatgttcaatgttgagaaaattgtttatcggagaacaacatcatctctttttgttttttgatatgcttaaagttaacgagtctctcagtgattgttagaggggtacggtttgttatgtgttagacttatgttagattctaggatggttgttgctaagccaaagttcttgattaattttaagtatgagatttaatcttc

SEQ ID NO: 96201 - protein, 498 aa, Arabidopsis thaliana
  peptide (1)..(498): Ceres Seq. ID no. 12732354
  misc_feature (15)..(498): Homolog of NCBI NO: 15220246 NR Description: unknown protein; protein id: At1g47530.1, by cDNA: gi_16604504 [Arabidopsis thaliana]
  misc_feature (15)..(498): Homolog of NCBI NO: 16604505 NR Description: At1g47530/F16N3_20 [Arabidopsis thaliana]
  misc_feature (42)..(498): Homolog of NCBI NO: 15222119 NR Description: unknown protein; protein id: At1g12950.1
  misc_feature (37)..(493): Homolog of NCBI NO: 15220701 NR Description: conserved hypothetical protein; protein id:
  misc_feature (4)..(498): Homolog of NCBI NO: 15240824 NR Description: putative transmembrane protein; protein id: supported by cDNA: gi_13937233 [Arabidopsis thaliana] emb|CAA66809.1~gene_id:F16F17.3~strong similarity to unknown
  misc_feature (3)..(498): Homolog of NCBI NO: 15231577 NR Description: integral membrane protein, putative; protein id: supported by cDNA: gi_16323120 [Arabidopsis thaliana] unknown [Arabidopsis thaliana] >gi|9293938|dbj|BAB01841.1|
  misc_feature (18)..(495): Homolog of NCBI NO: 30686958 NR Description: MATE efflux protein family [Arabidopsis thaliana]
  misc_feature (37)..(484): Homolog of NCBI NO: 25402978 NR Description: protein F26F24.14 [imported] - Arabidopsis >gi|9295710|gb|AAF87016.1|AC005292_25 F26F24.14 [Arabidopsis
  misc_feature (38)..(494): Homolog of NCBI NO: 33867697 NR Description: putative anthocyanin permease [Lycopersicon
  misc_feature (36)..(498): Homolog of NCBI NO: 16924114 NR Description: putative multidrug efflux protein [Oryza sativa]
RESKEEKLKQSFFHMGKDKTLPLLDPREPPELTGTKSASKVWAKEFGEESKRLWELAGPAIFTAISQYSLGALTQTFSGRLGELELAAVSVENSVISGLAFGVMLGMGSALETLCGQAYGAGQIRMMGIYMQRSWVILFTTALFLLPVYIWAPPILSFFGEAPHISKAAGKFALWMIPQLFAYAANFPIQKFLQSQRKVLVMAWISGVVLVIHAVFSWLFILYFKWGLVGAAITLNTSWWLIVIGQLLYILITKSDGAWTGFSMLAFRDLYGFVKLSLASALMLCLEFWYLMVLVVVTGLLPNPLIPVDAISICMNIEGWTAMISIGFNAAISVRVSNELGAGNAALAKFSVIVVSITSTLIGIVCMIVVLATKDSFPYLFTSSEAVAAETTRIAVLLGFTVLLNSLQPVLSGVAVGAGWQALVAYVNIACYYIIGLPAGLVLGFTLDLGVQGIWGGMVAGICLQTLILIGIIYFTNWNKEAEQAESRVQRWGGTAQE

SEQ ID NO: 96202 - protein, 484 aa, Arabidopsis thaliana
  peptide (1)..(484): Ceres Seq. ID no. 12732355
  misc_feature (1)..(484): Homolog of NCBI NO: 15220246 NR Description: unknown protein; protein id: At1g47530.1, by cDNA: gi_16604504 [Arabidopsis thaliana]
  misc_feature (1)..(484): Homolog of NCBI NO: 16604505 NR Description: At1g47530/F16N3_20 [Arabidopsis thaliana]
  misc_feature (28)..(484): Homolog of NCBI NO: 15222119 NR Description: unknown protein; protein id: At1g12950.1
  misc_feature (23)..(479): Homolog of NCBI NO: 15220701 NR Description: conserved hypothetical protein; protein id:
  misc_feature (1)..(484): Homolog of NCBI NO: 15240824 NR Description: putative transmembrane protein; protein id: supported by cDNA: gi_13937233 [Arabidopsis thaliana] emb|CAA66809.1~gene_id:F16F17.3~strong similarity to unknown
  misc_feature (1)..(484): Homolog of NCBI NO: 15231577 NR Description: integral membrane protein, putative; protein id: supported by cDNA: gi_16323120 [Arabidopsis thaliana] unknown [Arabidopsis thaliana] >gi|9293938|dbj|BAB01841.1|
  misc_feature (4)..(481): Homolog of NCBI NO: 30686958 NR Description: MATE efflux protein family [Arabidopsis thaliana]
  misc_feature (23)..(470): Homolog of NCBI NO: 25402978 NR Description: protein F26F24.14 [imported] - Arabidopsis >gi|9295710|gb|AAF87016.1|AC005292_25 F26F24.14 [Arabidopsis
  misc_feature (24)..(480): Homolog of NCBI NO: 33867697 NR Description: putative anthocyanin permease [Lycopersicon
  misc_feature (22)..(484): Homolog of NCBI NO: 16924114 NR Description: putative multidrug efflux protein [Oryza sativa]
MGKDKTLPLLDPREPPELTGTKSASKVWAKEFGEESKRLWELAGPAIFTAISQYSLGALTQTFSGRLGELELAAVSVENSVISGLAFGVMLGMGSALETLCGQAYGAGQIRMMGIYMQRSWVILFTTALFLLPVYIWAPPILSFFGEAPHISKAAGKFALWMIPQLFAYAANFPIQKFLQSQRKVLVMAWISGVVLVIHAVFSWLFILYFKWGLVGAAITLNTSWWLIVIGQLLYILITKSDGAWTGFSMLAFRDLYGFVKLSLASALMLCLEFWYLMVLVVVTGLLPNPLIPVDAISICMNIEGWTAMISIGFNAAISVRVSNELGAGNAALAKFSVIVVSITSTLIGIVCMIVVLATKDSFPYLFTSSEAVAAETTRIAVLLGFTVLLNSLQPVLSGVAVGAGWQALVAYVNIACYYIIGLPAGLVLGFTLDLGVQGIWGGMVAGICLQTLILIGIIYFTNWNKEAEQAESRVQRWGGTAQE

SEQ ID NO: 96203 - protein, 395 aa, Arabidopsis thaliana
  peptide (1)..(395): Ceres Seq. ID no. 12732356
  misc_feature (1)..(395): Homolog of NCBI NO: 15220246 NR Description: unknown protein; protein id: At1g47530.1, by cDNA: gi_16604504 [Arabidopsis thaliana]
  misc_feature (1)..(395): Homolog of NCBI NO: 16604505 NR Description: At1g47530/F16N3_20 [Arabidopsis thaliana]
  misc_feature (1)..(395): Homolog of NCBI NO: 15222119 NR Description: unknown protein; protein id: At1g12950.1
  misc_feature (1)..(390): Homolog of NCBI NO: 15220701 NR Description: conserved hypothetical protein; protein id:
  misc_feature (1)..(395): Homolog of NCBI NO: 15240824 NR Description: putative transmembrane protein; protein id: supported by cDNA: gi_13937233 [Arabidopsis thaliana] emb|CAA66809.1~gene_id:F16F17.3~strong similarity to unknown
  misc_feature (1)..(395): Homolog of NCBI NO: 15231577 NR Description: integral membrane protein, putative; protein id: supported by cDNA: gi_16323120 [Arabidopsis thaliana] unknown [Arabidopsis thaliana] >gi|9293938|dbj|BAB01841.1|
  misc_feature (1)..(392): Homolog of NCBI NO: 30686958 NR Description: MATE efflux protein family [Arabidopsis thaliana]
  misc_feature (1)..(381): Homolog of NCBI NO: 25402978 NR Description: protein F26F24.14 [imported] - Arabidopsis >gi|9295710|gb|AAF87016.1|AC005292_25 F26F24.14 [Arabidopsis
  misc_feature (1)..(391): Homolog of NCBI NO: 33867697 NR Description: putative anthocyanin permease [Lycopersicon
  misc_feature (1)..(395): Homolog of NCBI NO: 16924114 NR Description: putative multidrug efflux protein [Oryza sativa]
MLGMGSALETLCGQAYGAGQIRMMGIYMQRSWVILFTTALFLLPVYIWAPPILSFFGEAPHISKAAGKFALWMIPQLFAYAANFPIQKFLQSQRKVLVMAWISGVVLVIHAVFSWLFILYFKWGLVGAAITLNTSWWLIVIGQLLYILITKSDGAWTGFSMLAFRDLYGFVKLSLASALMLCLEFWYLMVLVVVTGLLPNPLIPVDAISICMNIEGWTAMISIGFNAAISVRVSNELGAGNAALAKFSVIVVSITSTLIGIVCMIVVLATKDSFPYLFTSSEAVAAETTRIAVLLGFTVLLNSLQPVLSGVAVGAGWQALVAYVNIACYYIIGLPAGLVLGFTLDLGVQGIWGGMVAGICLQTLILIGIIYFTNWNKEAEQAESRVQRWGGTAQE

SEQ ID NO: 96204 - DNA, 1821 bp, Arabidopsis thaliana
  misc_feature (1)..(1821): Ceres Seq. ID no. 12732390
  misc_feature: MA Experiment ID: 20000307 Result: Up-regulated in Transcription
  misc_feature: MA Experiment 20000307 PARAMETER Experiment Name: At_Germinating_Seeds_Sub_P Parameter: Age (hr) Value: 24 vs. 0
  misc_feature: MA Experiment 20000307 PARAMETER Experiment Name: At_Germinating_Seeds_Sub_P Parameter: Organism Value: A. thaliana
  misc_feature: MA Experiment 20000307 PARAMETER Experiment Name: At_Germinating_Seeds_Sub_P Parameter: Plant Line Value: WS
  misc_feature: MA Experiment 20000307 PARAMETER Experiment Name: At_Germinating_Seeds_Sub_P Parameter: Tissue Value: Germinating Seeds
  misc_feature: MA Experiment ID: 20000327 Result: Down-regulated in Transcription
  misc_feature: MA Experiment 20000327 PARAMETER Experiment Name: At_42deg_Heat_Sub_P Parameter: Age (day) Value: 14
  misc_feature: MA Experiment 20000327 PARAMETER Experiment Name: At_42deg_Heat_Sub_P Parameter: Organism Value: A. thaliana
  misc_feature: MA Experiment 20000327 PARAMETER Experiment Name: At_42deg_Heat_Sub_P Parameter: Plant Line Value: WS
  misc_feature: MA Experiment 20000327 PARAMETER Experiment Name: At_42deg_Heat_Sub_P Parameter: Temperature (deg C) Value: 42 vs. 22
  misc_feature: MA Experiment 20000327 PARAMETER Experiment Name: At_42deg_Heat_Sub_P Parameter: Timepoint (hr) Value: 1
  misc_feature: MA Experiment 20000327 PARAMETER Experiment Name: At_42deg_Heat_Sub_P Parameter: Tissue Value: Aerial
  misc_feature: MA Experiment ID: 20000346 Result: Down-regulated in Transcription
  misc_feature: MA Experiment 20000346 PARAMETER Experiment Name: At_2mM_SA_Sub_P Parameter: Age (day) Value: 14
  misc_feature: MA Experiment 20000346 PARAMETER Experiment Name: At_2mM_SA_Sub_P Parameter: Organism Value: A. thaliana
  misc_feature: MA Experiment 20000346 PARAMETER Experiment Name: At_2mM_SA_Sub_P Parameter: Plant Line Value: WS
  misc_feature: MA Experiment 20000346 PARAMETER Experiment Name: At_2mM_SA_Sub_P Parameter: Timepoint (hr) Value: 1
  misc_feature: MA Experiment 20000346 PARAMETER Experiment Name: At_2mM_SA_Sub_P Parameter: Tissue Value: Aerial
  misc_feature: MA Experiment 20000346 PARAMETER Experiment Name: At_2mM_SA_Sub_P Parameter: Treatment Value: 2mM SA vs. No Treatment
  misc_feature: MA Experiment ID: 20000347 Result: Down-regulated in Transcription
  misc_feature: MA Experiment 20000347 PARAMETER Experiment Name: At_2mM_SA_Sub_P Parameter: Age (day) Value: 14
  misc_feature: MA Experiment 20000347 PARAMETER Experiment Name: At_2mM_SA_Sub_P Parameter: Organism Value: A. thaliana
  misc_feature: MA Experiment 20000347 PARAMETER Experiment Name: At_2mM_SA_Sub_P Parameter: Plant Line Value: WS
  misc_feature: MA Experiment 20000347 PARAMETER Experiment Name: At_2mM_SA_Sub_P Parameter: Timepoint (hr) Value: 6
  misc_feature: MA Experiment 20000347 PARAMETER Experiment Name: At_2mM_SA_Sub_P Parameter: Tissue Value: Aerial
  misc_feature: MA Experiment 20000347 PARAMETER Experiment Name: At_2mM_SA_Sub_P Parameter: Treatment Value: 2mM SA vs. No Treatment
atgatcaaggcaccaattctacagtctctattggcttctagagacgatttaactcataacccagaagtcaacaactttggagggaaagagcaagaatgtttatacctcttgaagagatgccacaacatagacgagttcaagcaagttcacgccagattcatcaagctaagtttgttctattcttcttcattctcagccagcagcgttctcgcaaaatgcgctcactcgggatgggagaacagtatgaattacgcagcttccatattcagaggcatagatgatccttgtacctttgatttcaatacaatgattagagggtatgttaacgtaatgagtttcgaggaagcattgtgtttttacaatgagatgatgcagagagggaatgagccagataatttcacgtacccgtgtcttctcaaggcttgcactcgtttgaagtcaattcgagaagggaagcagattcatgggcaagtgtttaagctcggtcttgaagctgacgtgtttgttcagaatagtttgatcaatatgtatggaagatgtggagagatggaactttcttctgcggtttttgagaaactggaatctaaaacagctgcgtcgtggagctcgatggtctctgctcgtgcaggcatgggaatgtggagcgaatgcttgttactattccgtggaatgtgtagcgaaacgaatttgaaggcggaagaaagtggaatggttagtgctctcttagcttgtgccaacaccggtgcactcaatctaggaatgagcatccatggcttcctgttgagaaacataagcgaactcaacataatagtccaaacttcactagtagatatgtacgttaaatgcgggtgcttagacaaagcgttgcatatatttcagaagatggaaaagaggaataatttgacttacagtgcaatgatctcaggacttgcgttgcacggagaaggagaatcagctttaagaatgttctctaagatgatcaaagaaggtttagaaccagatcatgttgtgtatgtcagtgttctcaatgcatgtagtcactctggtcttgttaaagaaggtcgtcgagtcttcgcagaaatgttaaaggaaggtaaggtggagccaacggctgagcattacggctgtcttgtagatcttctgggaagagccggattgctcgaggaagcattggagactatccaaagcataccaattgagaaaaatgatgttatctggagaaccttcttaagtcaatgcagagttcgtcagaacattgagctaggccaaatagcagctcaagaactgcttaagctaagctcacacaacccaggtgactatttgctgatctctaacttgtattcacaaggtcaaatgtgggatgatgtagccagaactcgaacagaaatcgctatcaagggtttgaaacaaaccccgggttttagcatcgtcgagctaaaaggtaaaacccacaggttcgtttcacaagatcgatcgcacccaaaatgcaaagaaatctacaagatgctacaccagatggaatggcaactaaaattcgaaggatattcaccagacttgacacagatattgctaaacgtagatgaagaagaaaagaaagagagattaaaaggacacagccaaaaggtggctattgcctttggactattgtatacacctccagggtctatcattaaaatagctagaaacctgaggatgtgtagtgactgtcacacatatacaaagaaaatctccatgatctacgaaagagagattgttgtaagagacagaaacaggtttcacctgtttaaaggtggaacttgttcttgtaaagattattggtag

SEQ ID NO: 96205 - protein, 606 aa, Arabidopsis thaliana
  peptide (1)..(606): Ceres Seq. ID no. 12732391
  misc_feature (98)..(132): Pfam Name: PPR repeat Pfam Description: PPR repeat
  misc_feature (20)..(606): Homolog of NCBI NO: 15218900 NR Description: hypothetical protein; protein id: At1g59720.1
  misc_feature (7)..(606): Homolog of NCBI NO: 8778758 NR Description: T30E16.32 [Arabidopsis thaliana]
  misc_feature (85)..(606): Homolog of NCBI NO: 15223099 NR Description: unknown protein; protein id: At1g08070.1 thaliana] >gi|8778839|gb|AAF79838.1|AC026875_18 T6D22.15
  misc_feature (36)..(606): Homolog of NCBI NO: 25346319 NR Description: hypothetical protein F23H11.3 [imported] - thaliana >gi|5080805|gb|AAD39314.1|AC007258_3 Hypothetical
  misc_feature (2)..(606): Homolog of NCBI NO: 15227067 NR Description: hypothetical protein; protein id: At2g02980.1
  misc_feature (30)..(606): Homolog of NCBI NO: 34909232 NR Description: selenium-binding protein-like [Oryza sativa
  misc_feature (2)..(606): Homolog of NCBI NO: 21780142 NR Description: hypothetical protein [Arabidopsis thaliana]
  misc_feature (31)..(591): Homolog of NCBI NO: 7486979 NR Description: hypothetical protein T13K14.230 - Arabidopsis
  misc_feature (47)..(606): Homolog of NCBI NO: 34394298 NR Description: putative pentatricopeptide (PPR)
  misc_feature (64)..(606): Homolog of NCBI NO: 37536510 NR Description: hypothetical protein [Oryza sativa (japonica group)] >gi|12039323|gb|AAG46111.1| hypothetical protein [Oryza >gi|31433315|gb|AAP54844.1| hypothetical protein [Oryza sativa
MIKAPILQSLLASRDDLTHNPEVNNFGGKEQECLYLLKRCHNIDEFKQVHARFIKLSLFYSSSFSASSVLAKCAHSGWENSMNYAASIFRGIDDPCTFDFNTMIRGYVNVMSFEEALCFYNEMMQRGNEPDNFTYPCLLKACTRLKSIREGKQIHGQVFKLGLEADVFVQNSLINMYGRCGEMELSSAVFEKLESKTAASWSSMVSARAGMGMWSECLLLFRGMCSETNLKAEESGMVSALLACANTGALNLGMSIHGFLLRNISELNIIVQTSLVDMYVKCGCLDKALHIFQKMEKRNNLTYSAMISGLALHGEGESALRMFSKMIKEGLEPDHVVYVSVLNACSHSGLVKEGRRVFAEMLKEGKVEPTAEHYGCLVDLLGRAGLLEEALETIQSIPIEKNDVIWRTFLSQCRVRQNIELGQIAAQELLKLSSHNPGDYLLISNLYSQGQMWDDVARTRTEIAIKGLKQTPGFSIVELKGKTHRFVSQDRSHPKCKEIYKMLHQMEWQLKFEGYSPDLTQILLNVDEEEKKERLKGHSQKVAIAFGLLYTPPGSIIKIARNLRMCSDCHTYTKKISMIYEREIVVRDRNRFHLFKGGTCSCKDYW

SEQ ID NO: 96206 - protein, 525 aa, Arabidopsis thaliana
  peptide (1)..(525): Ceres Seq. ID no. 12732392
  misc_feature (17)..(51): Pfam Name: PPR repeat Pfam Description: PPR repeat
  misc_feature (1)..(525): Homolog of NCBI NO: 15218900 NR Description: hypothetical protein; protein id: At1g59720.1
  misc_feature (1)..(525): Homolog of NCBI NO: 8778758 NR Description: T30E16.32 [Arabidopsis thaliana]
  misc_feature (4)..(525): Homolog of NCBI NO: 15223099 NR Description: unknown protein; protein id: At1g08070.1 thaliana] >gi|8778839|gb|AAF79838.1|AC026875_18 T6D22.15
  misc_feature (1)..(525): Homolog of NCBI NO: 25346319 NR Description: hypothetical protein F23H11.3 [imported] - thaliana >gi|5080805|gb|AAD39314.1|AC007258_3 Hypothetical
  misc_feature (1)..(525): Homolog of NCBI NO: 15227067 NR Description: hypothetical protein; protein id: At2g02980.1
  misc_feature (1)..(525): Homolog of NCBI NO: 34909232 NR Description: selenium-binding protein-like [Oryza sativa
  misc_feature (1)..(525): Homolog of NCBI NO: 21780142 NR Description: hypothetical protein [Arabidopsis thaliana]
  misc_feature (1)..(510): Homolog of NCBI NO: 7486979 NR Description: hypothetical protein T13K14.230 - Arabidopsis
  misc_feature (1)..(525): Homolog of NCBI NO: 34394298 NR Description: putative pentatricopeptide (PPR)
  misc_feature (1)..(525): Homolog of NCBI NO: 37536510 NR Description: hypothetical protein [Oryza sativa (japonica group)] >gi|12039323|gb|AAG46111.1| hypothetical protein [Oryza >gi|31433315|gb|AAP54844.1| hypothetical protein [Oryza sativa
MNYAASIFRGIDDPCTFDFNTMIRGYVNVMSFEEALCFYNEMMQRGNEPDNFTYPCLLKACTRLKSIREGKQIHGQVFKLGLEADVFVQNSLINMYGRCGEMELSSAVFEKLESKTAASWSSMVSARAGMGMWSECLLLFRGMCSETNLKAEESGMVSALLACANTGALNLGMSIHGFLLRNISELNIIVQTSLVDMYVKCGCLDKALHIFQKMEKRNNLTYSAMISGLALHGEGESALRMFSKMIKEGLEPDHVVYVSVLNACSHSGLVKEGRRVFAEMLKEGKVEPTAEHYGCLVDLLGRAGLLEEALETIQSIPIEKNDVIWRTFLSQCRVRQNIELGQIAAQELLKLSSHNPGDYLLISNLYSQGQMWDDVARTRTEIAIKGLKQTPGFSIVELKGKTHRFVSQDRSHPKCKEIYKMLHQMEWQLKFEGYSPDLTQILLNVDEEEKKERLKGHSQKVAIAFGLLYTPPGSIIKIARNLRMCSDCHTYTKKISMIYEREIVVRDRNRFHLFKGGTCSCKDYW

SEQ ID NO: 96207 - protein, 504 aa, Arabidopsis thaliana
  peptide (1)..(504): Ceres Seq. ID no. 12732393
  misc_feature (1)..(30): Pfam Name: PPR repeat Pfam Description: PPR repeat
  misc_feature (1)..(504): Homolog of NCBI NO: 15218900 NR Description: hypothetical protein; protein id: At1g59720.1
  misc_feature (1)..(504): Homolog of NCBI NO: 8778758 NR Description: T30E16.32 [Arabidopsis thaliana]
  misc_feature (1)..(504): Homolog of NCBI NO: 15223099 NR Description: unknown protein; protein id: At1g08070.1 thaliana] >gi|8778839|gb|AAF79838.1|AC026875_18 T6D22.15
  misc_feature (1)..(504): Homolog of NCBI NO: 25346319 NR Description: hypothetical protein F23H11.3 [imported] - thaliana >gi|5080805|gb|AAD39314.1|AC007258_3 Hypothetical
  misc_feature (1)..(504): Homolog of NCBI NO: 15227067 NR Description: hypothetical protein; protein id: At2g02980.1
  misc_feature (1)..(504): Homolog of NCBI NO: 34909232 NR Description: selenium-binding protein-like [Oryza sativa
  misc_feature (1)..(504): Homolog of NCBI NO: 21780142 NR Description: hypothetical protein [Arabidopsis thaliana]
  misc_feature (1)..(489): Homolog of NCBI NO: 7486979 NR Description: hypothetical protein T13K14.230 - Arabidopsis
  misc_feature (1)..(504): Homolog of NCBI NO: 34394298 NR Description: putative pentatricopeptide (PPR)
  misc_feature (1)..(504): Homolog of NCBI NO: 37536510 NR Description: hypothetical protein [Oryza sativa (japonica group)] >gi|12039323|gb|AAG46111.1| hypothetical protein [Oryza >gi|31433315|gb|AAP54844.1| hypothetical protein [Oryza sativa
MIRGYVNVMSFEEALCFYNEMMQRGNEPDNFTYPCLLKACTRLKSIREGKQIHGQVFKLGLEADVFVQNSLINMYGRCGEMELSSAVFEKLESKTAASWSSMVSARAGMGMWSECLLLFRGMCSETNLKAEESGMVSALLACANTGALNLGMSIHGFLLRNISELNIIVQTSLVDMYVKCGCLDKALHIFQKMEKRNNLTYSAMISGLALHGEGESALRMFSKMIKEGLEPDHVVYVSVLNACSHSGLVKEGRRVFAEMLKEGKVEPTAEHYGCLVDLLGRAGLLEEALETIQSIPIEKNDVIWRTFLSQCRVRQNIELGQIAAQELLKLSSHNPGDYLLISNLYSQGQMWDDVARTRTEIAIKGLKQTPGFSIVELKGKTHRFVSQDRSHPKCKEIYKMLHQMEWQLKFEGYSPDLTQILLNVDEEEKKERLKGHSQKVAIAFGLLYTPPGSIIKIARNLRMCSDCHTYTKKISMIYEREIVVRDRNRFHLFKGGTCSCKDYW

SEQ ID NO: 96208 - DNA, 918 bp, Arabidopsis thaliana
  misc_feature (1)..(918): Ceres Seq. ID no. 12732424
  misc_feature: MA Experiment ID: 20000327 Result: Up-regulated in Transcription
  misc_feature: MA Experiment 20000327 PARAMETER Experiment Name: At_42deg_Heat_Sub_P Parameter: Age (day) Value: 14
  misc_feature: MA Experiment 20000327 PARAMETER Experiment Name: At_42deg_Heat_Sub_P Parameter: Organism Value: A. thaliana
  misc_feature: MA Experiment 20000327 PARAMETER Experiment Name: At_42deg_Heat_Sub_P Parameter: Plant Line Value: WS
  misc_feature: MA Experiment 20000327 PARAMETER Experiment Name: At_42deg_Heat_Sub_P Parameter: Temperature (deg C) Value: 42 vs. 22
  misc_feature: MA Experiment 20000327 PARAMETER Experiment Name: At_42deg_Heat_Sub_P Parameter: Timepoint (hr) Value: 1
  misc_feature: MA Experiment 20000327 PARAMETER Experiment Name: At_42deg_Heat_Sub_P Parameter: Tissue Value: Aerial
atgacacttgttagagaacgacgtcaccaagaacctctcacactctctattccaccacttatttaccacggcaccgccttctccgtggcatcttcttcatcgtcaagccctgaaacatcgccgattcaaaccttaaacgatctcgagaaactctccgttttaggacaaggaagcggtgggacagtctacaaaacccgtcaccggagaaccaaaacgctttacgccttaaaagtcctccggccaaatctcaacaccacggtcaccgtcgaagccgacatcctcaagcgaatcgaatcgagttttatcattaaatgctatgccgtttttgttagtttatacgatctctgtttcgtgatggagcttatggagaaaggatctctccatgacgcgttacttgctcaacaagttttctccgagccaatggtatcgagtctcgctaacagaatcctccaagggttacgttatctgcaaaaaatgggaatagttcatggagacataaagccttcaaatctccttattaataagaaaggagaggtcaagattgcggattttggagcaagtaggatagtagccggaggagactatggatcgaatgggacatgtgcttatatgagtcctgaacgtgtagatctagagaaatggggttttggaggagaagttggatttgcaggagatgtgtggtcattaggagttgtggttcttgagtgttacattggaagatatccattgaccaaagttggggataaaccggattgggcgacattattttgtgcaatttgctgcaatgagaaggtggatattccagtgagttgttcgttggagtttagagattttgttgggagatgtttggagaaggattggaggaagagagacactgtggaagagcttcttcgtcattcttttgtgaaaaacagatag

SEQ ID NO: 96209 - protein, 305 aa, Arabidopsis thaliana
  peptide (1)..(305): Ceres Seq. ID no. 12732425
  misc_feature (48)..(302): Pfam Name: Protein kinase domain Pfam Description: Protein kinase domain
  misc_feature (1)..(305): Homolog of NCBI NO: 15223165 NR Description: MAP kinase, putative; protein id: At1g32320.1
  misc_feature (1)..(303): Homolog of NCBI NO: 15219482 NR Description: MAP kinase, putative; protein id: At1g73500.1, by cDNA: 112118. [Arabidopsis thaliana] >gi|25287619|pir||G96761
  misc_feature (1)..(303): Homolog of NCBI NO: 15221060 NR Description: MAP kinase kinase 5, putative; protein id: [Arabidopsis thaliana] >gi|6714299|gb|AAF25995.1|AC013354_14
  misc_feature (10)..(302): Homolog of NCBI NO: 33563103 NR Description: mitogen-activated protein kinase kinase [Solanum
  misc_feature (1)..(305): Homolog of NCBI NO: 18071364 NR Description: putative kinase [Oryza sativa (japonica
  misc_feature (10)..(302): Homolog of NCBI NO: 12484128 NR Description: mitogen-activated protein kinase 2 [Nicotiana
  misc_feature (1)..(305): Homolog of NCBI NO: 34902284 NR Description: Unknown protein [Oryza sativa (japonica
  misc_feature (9)..(302): Homolog of NCBI NO: 15232491 NR Description: MAP kinase kinase 5; protein id: At3g21220.1, by cDNA: gi_19698850, supported by cDNA: gi_3219272 [Arabidopsis
  misc_feature (9)..(302): Homolog of NCBI NO: 19698851 NR Description: MAP kinase kinase 5 [Arabidopsis thaliana]
  misc_feature (9)..(302): Homolog of NCBI NO: 25287595 NR Description: mitogen-activated protein kinase kinase (EC
MTLVRERRHQEPLTLSIPPLIYHGTAFSVASSSSSSPETSPIQTLNDLEKLSVLGQGSGGTVYKTRHRRTKTLYALKVLRPNLNTTVTVEADILKRIESSFIIKCYAVFVSLYDLCFVMELMEKGSLHDALLAQQVFSEPMVSSLANRILQGLRYLQKMGIVHGDIKPSNLLINKKGEVKIADFGASRIVAGGDYGSNGTCAYMSPERVDLEKWGFGGEVGFAGDVWSLGVVVLECYIGRYPLTKVGDKPDWATLFCAICCNEKVDIPVSCSLEFRDFVGRCLEKDWRKRDTVEELLRHSFVKNR

SEQ ID NO: 96210 - protein, 187 aa, Arabidopsis thaliana
  peptide (1)..(187): Ceres Seq. ID no. 12732426
  misc_feature (1)..(184): Pfam Name: Protein kinase domain Pfam Description: Protein kinase domain
  misc_feature (1)..(187): Homolog of NCBI NO: 15223165 NR Description: MAP kinase, putative; protein id: At1g32320.1
  misc_feature (1)..(185): Homolog of NCBI NO: 15219482 NR Description: MAP kinase, putative; protein id: At1g73500.1, by cDNA: 112118. [Arabidopsis thaliana] >gi|25287619|pir||G96761
  misc_feature (1)..(185): Homolog of NCBI NO: 15221060 NR Description: MAP kinase kinase 5, putative; protein id: [Arabidopsis thaliana] >gi|6714299|gb|AAF25995.1|AC013354_14
  misc_feature (1)..(184): Homolog of NCBI NO: 33563103 NR Description: mitogen-activated protein kinase kinase [Solanum
  misc_feature (1)..(187): Homolog of NCBI NO: 18071364 NR Description: putative kinase [Oryza sativa (japonica
  misc_feature (1)..(184): Homolog of NCBI NO: 12484128 NR Description: mitogen-activated protein kinase 2 [Nicotiana
  misc_feature (1)..(187): Homolog of NCBI NO: 34902284 NR Description: Unknown protein [Oryza sativa (japonica
  misc_feature (1)..(184): Homolog of NCBI NO: 15232491 NR Description: MAP kinase kinase 5; protein id: At3g21220.1, by cDNA: gi_19698850, supported by cDNA: gi_3219272 [Arabidopsis
  misc_feature (1)..(184): Homolog of NCBI NO: 19698851 NR Description: MAP kinase kinase 5 [Arabidopsis thaliana]
  misc_feature (1)..(184): Homolog of NCBI NO: 25287595 NR Description: mitogen-activated protein kinase kinase (EC
MELMEKGSLHDALLAQQVFSEPMVSSLANRILQGLRYLQKMGIVHGDIKPSNLLINKKGEVKIADFGASRIVAGGDYGSNGTCAYMSPERVDLEKWGFGGEVGFAGDVWSLGVVVLECYIGRYPLTKVGDKPDWATLFCAICCNEKVDIPVSCSLEFRDFVGRCLEKDWRKRDTVEELLRHSFVKNR

SEQ ID NO: 96211 - protein, 184 aa, Arabidopsis thaliana
  peptide (1)..(184): Ceres Seq. ID no. 12732427
  misc_feature (1)..(181): Pfam Name: Protein kinase domain Pfam Description: Protein kinase domain
  misc_feature (1)..(184): Homolog of NCBI NO: 15223165 NR Description: MAP kinase, putative; protein id: At1g32320.1
  misc_feature (1)..(182): Homolog of NCBI NO: 15219482 NR Description: MAP kinase, putative; protein id: At1g73500.1, by cDNA: 112118. [Arabidopsis thaliana] >gi|25287619|pir||G96761
  misc_feature (1)..(182): Homolog of NCBI NO: 15221060 NR Description: MAP kinase kinase 5, putative; protein id: [Arabidopsis thaliana] >gi|6714299|gb|AAF25995.1|AC013354_14
  misc_feature (1)..(181): Homolog of NCBI NO: 33563103 NR Description: mitogen-activated protein kinase kinase [Solanum
  misc_feature (1)..(184): Homolog of NCBI NO: 18071364 NR Description: putative kinase [Oryza sativa (japonica
  misc_feature (1)..(181): Homolog of NCBI NO: 12484128 NR Description: mitogen-activated protein kinase 2 [Nicotiana
  misc_feature (1)..(184): Homolog of NCBI NO: 34902284 NR Description: Unknown protein [Oryza sativa (japonica
  misc_feature (1)..(181): Homolog of NCBI NO: 15232491 NR Description: MAP kinase kinase 5; protein id: At3g21220.1, by cDNA: gi_19698850, supported by cDNA: gi_3219272 [Arabidopsis
  misc_feature (1)..(181): Homolog of NCBI NO: 19698851 NR Description: MAP kinase kinase 5 [Arabidopsis thaliana]
  misc_feature (1)..(181): Homolog of NCBI NO: 25287595 NR Description: mitogen-activated protein kinase kinase (EC
MEKGSLHDALLAQQVFSEPMVSSLANRILQGLRYLQKMGIVHGDIKPSNLLINKKGEVKIADFGASRIVAGGDYGSNGTCAYMSPERVDLEKWGFGGEVGFAGDVWSLGVVVLECYIGRYPLTKVGDKPDWATLFCAICCNEKVDIPVSCSLEFRDFVGRCLEKDWRKRDTVEELLRHSFVKNR

SEQ ID NO: 96212 - DNA, 1908 bp, Arabidopsis thaliana
  misc_feature (1)..(1908): Ceres Seq. ID no. 12732442
  misc_feature: MA Experiment ID: 20000184 Result: Up-regulated in Transcription
  misc_feature: MA Experiment 20000184 PARAMETER Experiment Name: At_Shoots__P Parameter: Age (day) Value: 7
  misc_feature: MA Experiment 20000184 PARAMETER Experiment Name: At_Shoots__P Parameter: Tissue Value: Shoots vs. Whole Plant
  misc_feature: MA Experiment ID: 20000185 Result: Up-regulated in Transcription
  misc_feature: MA Experiment 20000185 PARAMETER Experiment Name: At_Roots__P Parameter: Age (day) Value: 7 vs. 21
  misc_feature: MA Experiment 20000185 PARAMETER Experiment Name: At_Roots__P Parameter: Organism Value: A. thaliana
  misc_feature: MA Experiment 20000185 PARAMETER Experiment Name: At_Roots__P Parameter: Tissue Value: Roots vs. Whole Plant
  misc_feature: MA Experiment ID: 20000438 Result: Up-regulated in Transcription
  misc_feature: MA Experiment 20000438 PARAMETER Experiment Name: At_Shoots__P Parameter: Age (day) Value: 14
  misc_feature: MA Experiment 20000438 PARAMETER Experiment Name: At_Shoots__P Parameter: Tissue Value: Shoots vs. Whole Plant
  misc_feature: MA Experiment ID: 20000439 Result: Up-regulated in Transcription
  misc_feature: MA Experiment 20000439 PARAMETER Experiment Name: At_Roots__P Parameter: Age (day) Value: 14 vs. 21
  misc_feature: MA Experiment 20000439 PARAMETER Experiment Name: At_Roots__P Parameter: Organism Value: A. thaliana
  misc_feature: MA Experiment 20000439 PARAMETER Experiment Name: At_Roots__P Parameter: Tissue Value: Roots vs. Whole Plant
  misc_feature: MA Experiment ID: 20001451 Result: Down-regulated in Transcription
  misc_feature: MA Experiment 20001451 PARAMETER Experiment Name: At_Far-red-induction_P Parameter: Age (day) Value: 7
  misc_feature: MA Experiment 20001451 PARAMETER Experiment Name: At_Far-red-induction_P Parameter: Light Value: Far-red vs. White
  misc_feature: MA Experiment 20001451 PARAMETER Experiment Name: At_Far-red-induction_P Parameter: Organism Value: A. thaliana
  misc_feature: MA Experiment 20001451 PARAMETER Experiment Name: At_Far-red-induction_P Parameter: Plant Line Value: Columbia
  misc_feature: MA Experiment 20001451 PARAMETER Experiment Name: At_Far-red-induction_P Parameter: Timepoint (hr) Value: 24
  misc_feature: MA Experiment 20001451 PARAMETER Experiment Name: At_Far-red-induction_P Parameter: Tissue Value: Whole Plant
  misc_feature: MA Experiment ID: 20001911 Result: Down-regulated in Transcription
  misc_feature: MA Experiment 20001911 PARAMETER Experiment Name: At_Drought_Reproduction_P Parameter: Age (day) Value: 40
  misc_feature: MA Experiment 20001911 PARAMETER Experiment Name: At_Drought_Reproduction_P Parameter: Organism Value: A. thaliana
  misc_feature: MA Experiment 20001911 PARAMETER Experiment Name: At_Drought_Reproduction_P Parameter: Plant Line Value: WS
  misc_feature: MA Experiment 20001911 PARAMETER Experiment Name: At_Drought_Reproduction_P Parameter: Timepoint (day) Value: 10
  misc_feature: MA Experiment 20001911 PARAMETER Experiment Name: At_Drought_Reproduction_P Parameter: Tissue Value: Flowers
  misc_feature: MA Experiment 20001911 PARAMETER Experiment Name: At_Drought_Reproduction_P Parameter: Treatment Value: Drought vs. No Drought
gtctctcctctgcatctcctctgttcctcaggtttctctgctcatggctgcttatggtcaaatctcctcgggaatgactgtagatcctcaggttctctcttcctccagaaacattggagtttccctatcacctctccggagaacactaatcggcgccggagttaggtctactagtatctctctccgtcaatgttctctctccgttagatcgattaaaatctccgaagatagccgcaaacctaaagcttatgcagagaacggtgcttttgatgtgggagttttggattcttcatcatatagattggctgattcaagaacaagtagtaatgattcaaggaggaagactaagattgtgtgtacgattggaccgtcttcgagttctagggaaatgatttggaaactcgcggaagctggaatgaatgtggctcgtttgaatatgtctcatggtgatcatgcttctcatcagataactattgatttagttaaggagtataattctttgtttgttgacaaagctattgctattatgttggatacaaagggtcctgaggttcgaagcggggatgtaccgcagccgatatttcttgaagagggtcaagagtttaactttactatcaagagaggtgtttcgcttaaagacactgttagtgtaaattatgatgattttgtgaacgatgttgaagttggggatatacttttggtggatggtggaatgatgtcgttagctgttaaatcaaagacgagtgatttggtgaagtgtgtggttattgatggtggagagcttcaatctagacgtcacttgaatgttcgaggaaagagtgcgactcttccatccattacagacaaagattgggaagacataaaatttggagtggacaaccaagtcgatttctacgccgtctcctttgttaaggatgctaaagttgtccatgagttgaagaactatctcaaaacctgcagtgcagacatatcggtgattgtgaaaattgaaagtgcagactctataaagaatcttccttctatcatatctgcttgtgatggggcaatggttgctcgtggagatcttggagctgaacttcccattgaagaggtcccgttgttacaggaagaaataatcagaaggtgtagaagcattcataaaccagtgattgttgccacaaacatgctagagagtatgattaatcatccaacgcctacaagagctgaagtctctgacattgcaattgcagtacgtgaaggcgcagatgctatcatgctttctggtgaaaccgcacatggaaagtttccgctgaaagctgttaacgtaatgcatactgtggcgttgagaaccgaggcaagtctacctgtcagaacctcggcatcccgtaccactgcttacaagggtcacatgggccaaatgtttgcttttcatgcttctataatggcaaatacactgagctcaccgctaattgtatttacgagaaccggatccatggcagtgcttctaagccactaccgcccatctgcaacaattttcgccttcacaaaccagagaagaataatgcaaaggcttgctctttatcaaggtgtcatgcctatatatatggagttctcggatgatgcagaagatacatatgcccggtctctcaaactcttacaggacgagaatatgctcaaggaaggacaacatgtaactcttgtccaaagtggctcgcaacccatttggcgtgaagaatcaacacatctcatacaagtccgtaagataaagataggtggatgatgtttttacttcttgagctacacaacatcttgcttttactcagctttctttctcttacacagttcgatccatatttttttgaatcactcacagtgaatcaaacaaccatataaaattttaagttattgaagctttttttctggttatag

SEQ ID NO: 96213 - protein, 585 aa, Arabidopsis thaliana
  peptide (1)..(585): Ceres Seq. ID no. 12732443
  misc_feature (466)..(580): Pfam Name: Pyruvate kinase, alpha/beta domain Pfam Description: Pyruvate kinase, alpha/beta domain
  misc_feature (15)..(585): Homolog of NCBI NO: 18398434 NR Description: pyruvate kinase, plastid isozyme, putative; id: At1g32440.1, supported by cDNA: gi_16648690 [Arabidopsis >gi|16648691|gb|AAL25538.1| At1g32440/F5D14_7 [Arabidopsis
  misc_feature (15)..(585): Homolog of NCBI NO: 25287763 NR Description: hypothetical protein F5D14.22 - Arabidopsis >gi|8920620|gb|AAF81342.1|AC007767_22 Strong similarity to a kinase isozyme G, chloroplast precursor from Nicotiana EST
  misc_feature (83)..(582): Homolog of NCBI NO: 2497542 NR Description: Pyruvate kinase isozyme G, chloroplast precursor
  misc_feature (65)..(582): Homolog of NCBI NO: 37537030 NR Description: putative pyruvate kinase [Oryza sativa (japonica group)] >gi|19225011|gb|AAL86487.1| putative pyruvate kinase
  misc_feature (107)..(577): Homolog of NCBI NO: 34912028 NR Description: putative pyruvate kinase [Oryza sativa (japonica group)] >gi|18844807|dbj|BAB85277.1| putative pyruvate kinase
  misc_feature (112)..(581): Homolog of NCBI NO: 15237303 NR Description: pyruvate kinase; protein id: At5g52920.1, by cDNA: 109919., supported by cDNA: gi_15081611, supported by gi_20147128 [Arabidopsis thaliana] >gi|10177106|dbj|BAB10440.1|
  misc_feature (112)..(581): Homolog of NCBI NO: 15081612 NR Description: AT5g52920/MXC20_15 [Arabidopsis thaliana]
  misc_feature (170)..(582): Homolog of NCBI NO: 2497540 NR Description: PYRUVATE KINASE ISOZYME G, CHLOROPLAST
  misc_feature (113)..(582): Homolog of NCBI NO: 24217414 NR Description: pyruvate kinase [Leptospira interrogans serovar str. 56601] >gi|24202500|gb|AAN51912.1|AE011621_1 pyruvate kinase
  misc_feature (77)..(567): Homolog of NCBI NO: 2497541 NR Description: Pyruvate kinase isozyme A, chloroplast precursor
SLLCISSVPQVSLLMAAYGQISSGMTVDPQVLSSSRNIGVSLSPLRRTLIGAGVRSTSISLRQCSLSVRSIKISEDSRKPKAYAENGAFDVGVLDSSSYRLADSRTSSNDSRRKTKIVCTIGPSSSSREMIWKLAEAGMNVARLNMSHGDHASHQITIDLVKEYNSLFVDKAIAIMLDTKGPEVRSGDVPQPIFLEEGQEFNFTIKRGVSLKDTVSVNYDDFVNDVEVGDILLVDGGMMSLAVKSKTSDLVKCVVIDGGELQSRRHLNVRGKSATLPSITDKDWEDIKFGVDNQVDFYAVSFVKDAKVVHELKNYLKTCSADISVIVKIESADSIKNLPSIISACDGAMVARGDLGAELPIEEVPLLQEEIIRRCRSIHKPVIVATNMLESMINHPTPTRAEVSDIAIAVREGADAIMLSGETAHGKFPLKAVNVMHTVALRTEASLPVRTSASRTTAYKGHMGQMFAFHASIMANTLSSPLIVFTRTGSMAVLLSHYRPSATIFAFTNQRRIMQRLALYQGVMPIYMEFSDDAEDTYARSLKLLQDENMLKEGQHVTLVQSGSQPIWREESTHLIQVRKIKIGG

SEQ ID NO: 96214 - protein, 571 aa, Arabidopsis thaliana
  peptide (1)..(571): Ceres Seq. ID no. 12732444
  misc_feature (452)..(566): Pfam Name: Pyruvate kinase, alpha/beta domain Pfam Description: Pyruvate kinase, alpha/beta domain
  misc_feature (1)..(571): Homolog of NCBI NO: 18398434 NR Description: pyruvate kinase, plastid isozyme, putative; id: At1g32440.1, supported by cDNA: gi_16648690 [Arabidopsis >gi|16648691|gb|AAL25538.1| At1g32440/F5D14_7 [Arabidopsis
  misc_feature (1)..(571): Homolog of NCBI NO: 25287763 NR Description: hypothetical protein F5D14.22 - Arabidopsis >gi|8920620|gb|AAF81342.1|AC007767_22 Strong similarity to a kinase isozyme G, chloroplast precursor from Nicotiana EST
  misc_feature (69)..(568): Homolog of NCBI NO: 2497542 NR Description: Pyruvate kinase isozyme G, chloroplast precursor
  misc_feature (51)..(568): Homolog of NCBI NO: 37537030 NR Description: putative pyruvate kinase [Oryza sativa (japonica group)] >gi|19225011|gb|AAL86487.1| putative pyruvate kinase
  misc_feature (93)..(563): Homolog of NCBI NO: 34912028 NR Description: putative pyruvate kinase [Oryza sativa (japonica group)] >gi|18844807|dbj|BAB85277.1| putative pyruvate kinase
  misc_feature (98)..(567): Homolog of NCBI NO: 15237303 NR Description: pyruvate kinase; protein id: At5g52920.1, by cDNA: 109919., supported by cDNA: gi_15081611, supported by gi_20147128 [Arabidopsis thaliana] >gi|10177106|dbj|BAB10440.1|
  misc_feature (98)..(567): Homolog of NCBI NO: 15081612 NR Description: AT5g52920/MXC20_15 [Arabidopsis thaliana]
  misc_feature (156)..(568): Homolog of NCBI NO: 2497540 NR Description: PYRUVATE KINASE ISOZYME G, CHLOROPLAST
  misc_feature (99)..(568): Homolog of NCBI NO: 24217414 NR Description: pyruvate kinase [Leptospira interrogans serovar str. 56601] >gi|24202500|gb|AAN51912.1|AE011621_1 pyruvate kinase
  misc_feature (63)..(553): Homolog of NCBI NO: 2497541 NR Description: Pyruvate kinase isozyme A, chloroplast precursor
MAAYGQISSGMTVDPQVLSSSRNIGVSLSPLRRTLIGAGVRSTSISLRQCSLSVRSIKISEDSRKPKAYAENGAFDVGVLDSSSYRLADSRTSSNDSRRKTKIVCTIGPSSSSREMIWKLAEAGMNVARLNMSHGDHASHQITIDLVKEYNSLFVDKAIAIMLDTKGPEVRSGDVPQPIFLEEGQEFNFTIKRGVSLKDTVSVNYDDFVNDVEVGDILLVDGGMMSLAVKSKTSDLVKCVVIDGGELQSRRHLNVRGKSATLPSITDKDWEDIKFGVDNQVDFYAVSFVKDAKVVHELKNYLKTCSADISVIVKIESADSIKNLPSIISACDGAMVARGDLGAELPIEEVPLLQEEIIRRCRSIHKPVIVATNMLESMINHPTPTRAEVSDIAIAVREGADAIMLSGETAHGKFPLKAVNVMHTVALRTEASLPVRTSASRTTAYKGHMGQMFAFHASIMANTLSSPLIVFTRTGSMAVLLSHYRPSATIFAFTNQRRIMQRLALYQGVMPIYMEFSDDAEDTYARSLKLLQDENMLKEGQHVTLVQSGSQPIWREESTHLIQVRKIKIGG

SEQ ID NO: 96215 - protein, 561 aa, Arabidopsis thaliana
  peptide (1)..(561): Ceres Seq. ID no. 12732445
  misc_feature (442)..(556): Pfam Name: Pyruvate kinase, alpha/beta domain Pfam Description: Pyruvate kinase, alpha/beta domain
  misc_feature (1)..(561): Homolog of NCBI NO: 18398434 NR Description: pyruvate kinase, plastid isozyme, putative; id: At1g32440.1, supported by cDNA: gi_16648690 [Arabidopsis >gi|16648691|gb|AAL25538.1| At1g32440/F5D14_7 [Arabidopsis
  misc_feature (1)..(561): Homolog of NCBI NO: 25287763 NR Description: hypothetical protein F5D14.22 - Arabidopsis >gi|8920620|gb|AAF81342.1|AC007767_22 Strong similarity to a kinase isozyme G, chloroplast precursor from Nicotiana EST
  misc_feature (59)..(558): Homolog of NCBI NO: 2497542 NR Description: Pyruvate kinase isozyme G, chloroplast precursor
  misc_feature (41)..(558): Homolog of NCBI NO: 37537030 NR Description: putative pyruvate kinase [Oryza sativa (japonica group)] >gi|19225011|gb|AAL86487.1| putative pyruvate kinase
  misc_feature (83)..(553): Homolog of NCBI NO: 34912028 NR Description: putative pyruvate kinase [Oryza sativa (japonica group)] >gi|18844807|dbj|BAB85277.1| putative pyruvate kinase
  misc_feature (88)..(557): Homolog of NCBI NO: 15237303 NR Description: pyruvate kinase; protein id: At5g52920.1, by cDNA: 109919., supported by cDNA: gi_15081611, supported by gi_20147128 [Arabidopsis thaliana] >gi|10177106|dbj|BAB10440.1|
  misc_feature (88)..(557): Homolog of NCBI NO: 15081612 NR Description: AT5g52920/MXC20_15 [Arabidopsis thaliana]
  misc_feature (146)..(558): Homolog of NCBI NO: 2497540 NR Description: PYRUVATE KINASE ISOZYME G, CHLOROPLAST
  misc_feature (89)..(558): Homolog of NCBI NO: 24217414 NR Description: pyruvate kinase [Leptospira interrogans serovar str. 56601] >gi|24202500|gb|AAN51912.1|AE011621_1 pyruvate kinase
  misc_feature (53)..(543): Homolog of NCBI NO: 2497541 NR Description: Pyruvate kinase isozyme A, chloroplast precursor
MTVDPQVLSSSRNIGVSLSPLRRTLIGAGVRSTSISLRQCSLSVRSIKISEDSRKPKAYAENGAFDVGVLDSSSYRLADSRTSSNDSRRKTKIVCTIGPSSSSREMIWKLAEAGMNVARLNMSHGDHASHQITIDLVKEYNSLFVDKAIAIMLDTKGPEVRSGDVPQPIFLEEGQEFNFTIKRGVSLKDTVSVNYDDFVNDVEVGDILLVDGGMMSLAVKSKTSDLVKCVVIDGGELQSRRHLNVRGKSATLPSITDKDWEDIKFGVDNQVDFYAVSFVKDAKVVHELKNYLKTCSADISVIVKIESADSIKNLPSIISACDGAMVARGDLGAELPIEEVPLLQEEIIRRCRSIHKPVIVATNMLESMINHPTPTRAEVSDIAIAVREGADAIMLSGETAHGKFPLKAVNVMHTVALRTEASLPVRTSASRTTAYKGHMGQMFAFHASIMANTLSSPLIVFTRTGSMAVLLSHYRPSATIFAFTNQRRIMQRLALYQGVMPIYMEFSDDAEDTYARSLKLLQDENMLKEGQHVTLVQSGSQPIWREESTHLIQVRKIKIGG

SEQ ID NO: 96216 - DNA, 1821 bp, Arabidopsis thaliana
  misc_feature (1)..(1821): Ceres Seq. ID no. 12732446
  misc_feature: MA Experiment ID: 20000169 Result: Up-regulated in Transcription
  misc_feature: MA Experiment 20000169 PARAMETER Experiment Name: At_100uM_ABA_P Parameter: Age (day) Value: 14
  misc_feature: MA Experiment 20000169 PARAMETER Experiment Name: At_100uM_ABA_P Parameter: Organism Value: A. thaliana
  misc_feature: MA Experiment 20000169 PARAMETER Experiment Name: At_100uM_ABA_P Parameter: Plant Line Value: WS
  misc_feature: MA Experiment 20000169 PARAMETER Experiment Name: At_100uM_ABA_P Parameter: Timepoint (hr) Value: 6
  misc_feature: MA Experiment 20000169 PARAMETER Experiment Name: At_100uM_ABA_P Parameter: Tissue Value: Aerial
  misc_feature: MA Experiment 20000169 PARAMETER Experiment Name: At_100uM_ABA_P Parameter: Treatment Value: 100uM ABA vs. No Treatment
  misc_feature: MA Experiment ID: 20000184 Result: Up-regulated in Transcription
  misc_feature: MA Experiment 20000184 PARAMETER Experiment Name: At_Shoots__P Parameter: Age (day) Value: 7
  misc_feature: MA Experiment 20000184 PARAMETER Experiment Name: At_Shoots__P Parameter: Tissue Value: Shoots vs. Whole Plant
  misc_feature: MA Experiment ID: 20000185 Result: Up-regulated in Transcription
  misc_feature: MA Experiment 20000185 PARAMETER Experiment Name: At_Roots__P Parameter: Age (day) Value: 7 vs. 21
  misc_feature: MA Experiment 20000185 PARAMETER Experiment Name: At_Roots__P Parameter: Organism Value: A. thaliana
  misc_feature: MA Experiment 20000185 PARAMETER Experiment Name: At_Roots__P Parameter: Tissue Value: Roots vs. Whole Plant
  misc_feature: MA Experiment ID: 20000227 Result: Down-regulated in Transcription
  misc_feature: MA Experiment 20000227 PARAMETER Experiment Name: At_Root-Tips-vs-Tops_P Parameter: Tissue Value: Root Tips vs. Root Tops
  misc_feature: MA Experiment ID: 20000234 Result: Down-regulated in Transcription
  misc_feature: MA Experiment 20000234 PARAMETER Experiment Name: At_Siliques_P Parameter: Age (day) Value: 21
  misc_feature: MA Experiment 20000234 PARAMETER Experiment Name: At_Siliques_P Parameter: Organism Value: A. thaliana
  misc_feature: MA Experiment 20000234 PARAMETER Experiment Name: At_Siliques_P Parameter: Plant Line Value: WS
  misc_feature: MA Experiment 20000234 PARAMETER Experiment Name: At_Siliques_P Parameter: Tissue Value: Less Than 5mm Siliques vs. Whole Plant
  misc_feature: MA Experiment ID: 20000235 Result: Down-regulated in Transcription
  misc_feature: MA Experiment 20000235 PARAMETER Experiment Name: At_Siliques_P Parameter: Age (day) Value: 21
  misc_feature: MA Experiment 20000235 PARAMETER Experiment Name: At_Siliques_P Parameter: Organism Value: A. thaliana
  misc_feature: MA Experiment 20000235 PARAMETER Experiment Name: At_Siliques_P Parameter: Plant Line Value: WS
  misc_feature: MA Experiment 20000235 PARAMETER Experiment Name: At_Siliques_P Parameter: Tissue Value: 5-10mm Siliques vs. Whole Plant
  misc_feature: MA Experiment ID: 20000264 Result: Up-regulated in Transcription
  misc_feature: MA Experiment 20000264 PARAMETER Experiment Name: At_Open_Flower_P Parameter: Age (day) Value: 21
  misc_feature: MA Experiment 20000264 PARAMETER Experiment Name: At_Open_Flower_P Parameter: Plant Line Value: WS
  misc_feature: MA Experiment 20000264 PARAMETER Experiment Name: At_Open_Flower_P Parameter: Tissue Value: Open Flower vs. Whole Plant
  misc_feature: MA Experiment ID: 20000269 Result: Up-regulated in Transcription
  misc_feature: MA Experiment 20000269 PARAMETER Experiment Name: At_1mM_KNO3_L-vs-H_Roots_P Parameter: Age (day) Value: 7,10,12
  misc_feature: MA Experiment 20000269 PARAMETER Experiment Name: At_1mM_KNO3_L-vs-H_Roots_P Parameter: Organism Value: A. thaliana
  misc_feature: MA Experiment 20000269 PARAMETER Experiment Name: At_1mM_KNO3_L-vs-H_Roots_P Parameter: Plant Line Value: WS
  misc_feature: MA Experiment 20000269 PARAMETER Experiment Name: At_1mM_KNO3_L-vs-H_Roots_P Parameter: Timepoint (day) Value: 7,10,12
  misc_feature: MA Experiment 20000269 PARAMETER Experiment Name: At_1mM_KNO3_L-vs-H_Roots_P Parameter: Tissue Value: Roots
  misc_feature: MA Experiment 20000269 PARAMETER Experiment Name: At_1mM_KNO3_L-vs-H_Roots_P Parameter: Treatment Value: 1mM KNO3 vs. 50mM KNO3
  misc_feature: MA Experiment ID: 20000437 Result: Down-regulated in Transcription
  misc_feature: MA Experiment 20000437 PARAMETER Experiment Name: At_Drought_P Parameter: Age (day) Value: 8
  misc_feature: MA Experiment 20000437 PARAMETER Experiment Name: At_Drought_P Parameter: Organism Value: A. thaliana
  misc_feature: MA Experiment 20000437 PARAMETER Experiment Name: At_Drought_P Parameter: Plant Line Value: WS
  misc_feature: MA Experiment 20000437 PARAMETER Experiment Name: At_Drought_P Parameter: Timepoint (hr) Value: 24
  misc_feature: MA Experiment 20000437 PARAMETER Experiment Name: At_Drought_P Parameter: Tissue Value: Whole Plant
  misc_feature: MA Experiment 20000437 PARAMETER Experiment Name: At_Drought_P Parameter: Treatment Value: Drought vs. No Drought
  misc_feature: MA Experiment ID: 20000439 Result: Up-regulated in Transcription
  misc_feature: MA Experiment 20000439 PARAMETER Experiment Name: At_Roots__P Parameter: Age (day) Value: 14 vs. 21
  misc_feature: MA Experiment 20000439 PARAMETER Experiment Name: At_Roots__P Parameter: Organism Value: A. thaliana
  misc_feature: MA Experiment 20000439 PARAMETER Experiment Name: At_Roots__P Parameter: Tissue Value: Roots vs. Whole Plant
  misc_feature: MA Experiment ID: 20000460 Result: Down-regulated in Transcription
  misc_feature: MA Experiment 20000460 PARAMETER Experiment Name: At_10percent_PEG_P Parameter: Age (day) Value: 12
  misc_feature: MA Experiment 20000460 PARAMETER Experiment Name: At_10percent_PEG_P Parameter: Organism Value: A. thaliana
  misc_feature: MA Experiment 20000460 PARAMETER Experiment Name: At_10percent_PEG_P Parameter: Plant Line Value: WS
  misc_feature: MA Experiment 20000460 PARAMETER Experiment Name: At_10percent_PEG_P Parameter: Timepoint (day) Value: 12
  misc_feature: MA Experiment 20000460 PARAMETER Experiment Name: At_10percent_PEG_P Parameter: Tissue Value: Whole Plant
  misc_feature: MA Experiment 20000460 PARAMETER Experiment Name: At_10percent_PEG_P Parameter: Treatment Value: 10percent PEG vs. No Treatment
  misc_feature: MA Experiment ID: 20000495 Result: Up-regulated in Transcription
  misc_feature: MA Experiment 20000495 PARAMETER Experiment Name: At_Guard_Cells_P Parameter: Harvest Date Value: 8/2/2002
  misc_feature: MA Experiment 20000495 PARAMETER Experiment Name: At_Guard_Cells_P Parameter: Organism Value: A. thaliana
  misc_feature: MA Experiment 20000495 PARAMETER Experiment Name: At_Guard_Cells_P Parameter: Tissue Value: Guard Cells vs. Leaves
  misc_feature: MA Experiment ID: 20000527 Result: Down-regulated in Transcription
  misc_feature: MA Experiment 20000527 PARAMETER Experiment Name: At_10percent_PEG_P Parameter: Age (day) Value: 20
  misc_feature: MA Experiment 20000527 PARAMETER Experiment Name: At_10percent_PEG_P Parameter: Organism Value: A. thaliana
  misc_feature: MA Experiment 20000527 PARAMETER Experiment Name: At_10percent_PEG_P Parameter: Plant Line Value: WS
  misc_feature: MA Experiment 20000527 PARAMETER Experiment Name: At_10percent_PEG_P Parameter: Timepoint (day) Value: 20
  misc_feature: MA Experiment 20000527 PARAMETER Experiment Name: At_10percent_PEG_P Parameter: Tissue Value: Whole Plant
  misc_feature: MA Experiment 20000527 PARAMETER Experiment Name: At_10percent_PEG_P Parameter: Treatment Value: 10percent PEG vs. No Treatment
  misc_feature: MA Experiment ID: 20000575 Result: Down-regulated in Transcription
  misc_feature: MA Experiment 20000575 PARAMETER Experiment Name: At_100uM_ABA_Mutants__P Parameter: Organism Value: A. thaliana
  misc_feature: MA Experiment 20000575 PARAMETER Experiment Name: At_100uM_ABA_Mutants__P Parameter: Plant Line Value: CS22
  misc_feature: MA Experiment 20000575 PARAMETER Experiment Name: At_100uM_ABA_Mutants__P Parameter: Timepoint (hr) Value: 6
  misc_feature: MA Experiment 20000575 PARAMETER Experiment Name: At_100uM_ABA_Mutants__P Parameter: Tissue Value: Whole Plant
  misc_feature: MA Experiment 20000575 PARAMETER Experiment Name: At_100uM_ABA_Mutants__P Parameter: Treatment Value: 1uM ABA vs. No Treatment
  misc_feature: MA Experiment ID: 20000794 Result: Up-regulated in Transcription
  misc_feature: MA Experiment 20000794 PARAMETER Experiment Name: At_Petals_P Parameter: Age (day) Value: 23-25 days
  misc_feature: MA Experiment 20000794 PARAMETER Experiment Name: At_Petals_P Parameter: Plant Line Value: WS
  misc_feature: MA Experiment 20000794 PARAMETER Experiment Name: At_Petals_P Parameter: Tissue Value: Petals vs. Whole plant
  misc_feature: MA Experiment ID: 20001451 Result: Up-regulated in Transcription
  misc_feature: MA Experiment 20001451 PARAMETER Experiment Name: At_Far-red-induction_P Parameter: Age (day) Value: 7
  misc_feature: MA Experiment 20001451 PARAMETER Experiment Name: At_Far-red-induction_P Parameter: Light Value: Far-red vs. White
  misc_feature: MA Experiment 20001451 PARAMETER Experiment Name: At_Far-red-induction_P Parameter: Organism Value: A. thaliana
  misc_feature: MA Experiment 20001451 PARAMETER Experiment Name: At_Far-red-induction_P Parameter: Plant Line Value: Columbia
  misc_feature: MA Experiment 20001451 PARAMETER Experiment Name: At_Far-red-induction_P Parameter: Timepoint (hr) Value: 24
  misc_feature: MA Experiment 20001451 PARAMETER Experiment Name: At_Far-red-induction_P Parameter: Tissue Value: Whole Plant
  misc_feature: MA Experiment ID: 20001504 Result: Down-regulated in Transcription
  misc_feature: MA Experiment 20001504 PARAMETER Experiment Name: At_Far-red-enriched_P Parameter: Age (day) Value: 10
  misc_feature: MA Experiment 20001504 PARAMETER Experiment Name: At_Far-red-enriched_P Parameter: Light Value: Far-red enriched vs. White
  misc_feature: MA Experiment 20001504 PARAMETER Experiment Name: At_Far-red-enriched_P Parameter: Organism Value: A. thaliana
  misc_feature: MA Experiment 20001504 PARAMETER Experiment Name: At_Far-red-enriched_P Parameter: Plant Line Value: Columbia
  misc_feature: MA Experiment 20001504 PARAMETER Experiment Name: At_Far-red-enriched_P Parameter: Timepoint (day) Value: 6
  misc_feature: MA Experiment 20001504 PARAMETER Experiment Name: At_Far-red-enriched_P Parameter: Tissue Value: Whole Plant
  misc_feature: MA Experiment ID: 20001554 Result: Up-regulated in Transcription
  misc_feature: MA Experiment 20001554 PARAMETER Experiment Name: At_Drought_Soil_Dry_P Parameter: Age (day) Value: 21
  misc_feature: MA Experiment 20001554 PARAMETER Experiment Name: At_Drought_Soil_Dry_P Parameter: Organism Value: A. thaliana
  misc_feature: MA Experiment 20001554 PARAMETER Experiment Name: At_Drought_Soil_Dry_P Parameter: Plant Line Value: WS
  misc_feature: MA Experiment 20001554 PARAMETER Experiment Name: At_Drought_Soil_Dry_P Parameter: Post Timepoint (hr) Value: None
  misc_feature: MA Experiment 20001554 PARAMETER Experiment Name: At_Drought_Soil_Dry_P Parameter: Post-Treatment Value: None
  misc_feature: MA Experiment 20001554 PARAMETER Experiment Name: At_Drought_Soil_Dry_P Parameter: Timepoint (day) Value: 7
  misc_feature: MA Experiment 20001554 PARAMETER Experiment Name: At_Drought_Soil_Dry_P Parameter: Treatment Value: Drought vs. No Drought
  misc_feature: MA Experiment ID: 20001555 Result: Up-regulated in Transcription
  misc_feature: MA Experiment 20001555 PARAMETER Experiment Name: At_Drought_Soil_Dry_P Parameter: Age (day) Value: 24
  misc_feature: MA Experiment 20001555 PARAMETER Experiment Name: At_Drought_Soil_Dry_P Parameter: Organism Value: A. thaliana
  misc_feature: MA Experiment 20001555 PARAMETER Experiment Name: At_Drought_Soil_Dry_P Parameter: Plant Line Value: WS
  misc_feature: MA Experiment 20001555 PARAMETER Experiment Name: At_Drought_Soil_Dry_P Parameter: Post Timepoint (hr) Value: None
  misc_feature: MA Experiment 20001555 PARAMETER Experiment Name: At_Drought_Soil_Dry_P Parameter: Post-Treatment Value: None
  misc_feature: MA Experiment 20001555 PARAMETER Experiment Name: At_Drought_Soil_Dry_P Parameter: Timepoint (day) Value: 10
  misc_feature: MA Experiment 20001555 PARAMETER Experiment Name: At_Drought_Soil_Dry_P Parameter: Treatment Value: Drought vs. No Drought
  misc_feature: MA Experiment ID: 20001556 Result: Up-regulated in Transcription
  misc_feature: MA Experiment 20001556 PARAMETER Experiment Name: At_Drought_Soil_Dry_P Parameter: Age (day) Value: 26
  misc_feature: MA Experiment 20001556 PARAMETER Experiment Name: At_Drought_Soil_Dry_P Parameter: Organism Value: A. thaliana
  misc_feature: MA Experiment 20001556 PARAMETER Experiment Name: At_Drought_Soil_Dry_P Parameter: Plant Line Value: WS
  misc_feature: MA Experiment 20001556 PARAMETER Experiment Name: At_Drought_Soil_Dry_P Parameter: Post Timepoint (hr) Value: None
  misc_feature: MA Experiment 20001556 PARAMETER Experiment Name: At_Drought_Soil_Dry_P Parameter: Post-Treatment Value: None
  misc_feature: MA Experiment 20001556 PARAMETER Experiment Name: At_Drought_Soil_Dry_P Parameter: Timepoint (day) Value: 12
  misc_feature: MA Experiment 20001556 PARAMETER Experiment Name: At_Drought_Soil_Dry_P Parameter: Treatment Value: Drought vs. No Drought
  misc_feature: MA Experiment ID: 20001757 Result: Down-regulated in Transcription
  misc_feature: MA Experiment 20001757 PARAMETER Experiment Name: At_50mM_NH4NO3_L-to-H_P Parameter: Timepoint (hr) Value: 6
  misc_feature: MA Experiment 20001757 PARAMETER Experiment Name: At_50mM_NH4NO3_L-to-H_P Parameter: Tissue Value: Leaf
  misc_feature: MA Experiment 20001757 PARAMETER Experiment Name: At_50mM_NH4NO3_L-to-H_P Parameter: Treatment Value: 50mM NH4NO3 vs 100mM Mannitol
  misc_feature: MA Experiment ID: 20001904 Result: Up-regulated in Transcription
  misc_feature: MA Experiment 20001904 PARAMETER Experiment Name: At_Drought_Reproduction_P Parameter: Age (day) Value: 37
  misc_feature: MA Experiment 20001904 PARAMETER Experiment Name: At_Drought_Reproduction_P Parameter: Organism Value: A. thaliana
  misc_feature: MA Experiment 20001904 PARAMETER Experiment Name: At_Drought_Reproduction_P Parameter: Plant Line Value: WS
  misc_feature: MA Experiment 20001904 PARAMETER Experiment Name: At_Drought_Reproduction_P Parameter: Timepoint (day) Value: 7
  misc_feature: MA Experiment 20001904 PARAMETER Experiment Name: At_Drought_Reproduction_P Parameter: Tissue Value: Rosettes
  misc_feature: MA Experiment 20001904 PARAMETER Experiment Name: At_Drought_Reproduction_P Parameter: Treatment Value: Drought vs. No Drought
  misc_feature: MA Experiment ID: 20001905 Result: Up-regulated in Transcription
  misc_feature: MA Experiment 20001905 PARAMETER Experiment Name: At_Drought_Reproduction_P Parameter: Age (day) Value: 40
  misc_feature: MA Experiment 20001905 PARAMETER Experiment Name: At_Drought_Reproduction_P Parameter: Organism Value: A. thaliana
  misc_feature: MA Experiment 20001905 PARAMETER Experiment Name: At_Drought_Reproduction_P Parameter: Plant Line Value: WS
  misc_feature: MA Experiment 20001905 PARAMETER Experiment Name: At_Drought_Reproduction_P Parameter: Timepoint (day) Value: 10
  misc_feature: MA Experiment 20001905 PARAMETER Experiment Name: At_Drought_Reproduction_P Parameter: Tissue Value: Rosettes
  misc_feature: MA Experiment 20001905 PARAMETER Experiment Name: At_Drought_Reproduction_P Parameter: Treatment Value: Drought vs. No Drought
  misc_feature: MA Experiment ID: 20001906 Result: Up-regulated in Transcription
  misc_feature: MA Experiment 20001906 PARAMETER Experiment Name: At_Drought_Reproduction_P Parameter: Age (day) Value: 35
  misc_feature: MA Experiment 20001906 PARAMETER Experiment Name: At_Drought_Reproduction_P Parameter: Organism Value: A. thaliana
  misc_feature: MA Experiment 20001906 PARAMETER Experiment Name: At_Drought_Reproduction_P Parameter: Plant Line Value: WS
  misc_feature: MA Experiment 20001906 PARAMETER Experiment Name: At_Drought_Reproduction_P Parameter: Timepoint (day) Value: 5
  misc_feature: MA Experiment 20001906 PARAMETER Experiment Name: At_Drought_Reproduction_P Parameter: Tissue Value: Siliques
  misc_feature: MA Experiment 20001906 PARAMETER Experiment Name: At_Drought_Reproduction_P Parameter: Treatment Value: Drought vs. No Drought
  misc_feature: MA Experiment ID: 20001909 Result: Up-regulated in Transcription
  misc_feature: MA Experiment 20001909 PARAMETER Experiment Name: At_Drought_Reproduction_P Parameter: Age (day) Value: 35
  misc_feature: MA Experiment 20001909 PARAMETER Experiment Name: At_Drought_Reproduction_P Parameter: Organism Value: A. thaliana
  misc_feature: MA Experiment 20001909 PARAMETER Experiment Name: At_Drought_Reproduction_P Parameter: Plant Line Value: WS
  misc_feature: MA Experiment 20001909 PARAMETER Experiment Name: At_Drought_Reproduction_P Parameter: Timepoint (day) Value: 5
  misc_feature: MA Experiment 20001909 PARAMETER Experiment Name: At_Drought_Reproduction_P Parameter: Tissue Value: Flowers
  misc_feature: MA Experiment 20001909 PARAMETER Experiment Name: At_Drought_Reproduction_P Parameter: Treatment Value: Drought vs. No Drought
  misc_feature: MA Experiment ID: 20001910 Result: Up-regulated in Transcription
  misc_feature: MA Experiment 20001910 PARAMETER Experiment Name: At_Drought_Reproduction_P Parameter: Age (day) Value: 37
  misc_feature: MA Experiment 20001910 PARAMETER Experiment Name: At_Drought_Reproduction_P Parameter: Organism Value: A. thaliana
  misc_feature: MA Experiment 20001910 PARAMETER Experiment Name: At_Drought_Reproduction_P Parameter: Plant Line Value: WS
  misc_feature: MA Experiment 20001910 PARAMETER Experiment Name: At_Drought_Reproduction_P Parameter: Timepoint (day) Value: 7
  misc_feature: MA Experiment 20001910 PARAMETER Experiment Name: At_Drought_Reproduction_P Parameter: Tissue Value: Flowers
  misc_feature: MA Experiment 20001910 PARAMETER Experiment Name: At_Drought_Reproduction_P Parameter: Treatment Value: Drought vs. No Drought
atgcagacgatgaagaagaaagaaggagaagaagaaacaagagatgggacagtggattactatggtcgtccctctattcgttctaactcaggccaatgggttgctggcatcgtcattcttctgaaccaggggctggctacactagccttctttggagttggagtgaacttggtgctcttcctaactcgcgttttgcagcagaacaacgcagacgcagctaacaacgttagcaaatggacagggactgtttatatcttctcattggttggagcgtttctcagcgattcgtattggggtcgttacaagacttgtgctatcttccaagtcatttttgtcattggactttcatcgctatcgctatcatcatacatgttcttgattagaccaagaggttgtggggacgaagtcacgccttgtggttcacattccatgatggagatcacaatgttctacttctcgatctacttgatcgcattgggatatggcggttaccaaccaaacattgcaacgcttggagcggatcagttcgatgaggagcatcctaaagaagggtactcgaagattgcgtttttcagctacttttaccttgctttaaacctcggatcgctcttttcgaacaccatcttggggtattttgaggatgagggaatgtgggcactcgggttttgggcatccactggctctgctatcattgggttgattcttttccttgttggaacaccgagataccgatatttcaagcccacggggaatcctctttcgaggttttgccaagttttggtcgctgcaacgaagaaatcatcggtggaggcaccattaagagggagagaggagatgtatgacggagacagcgaagggaaaaatgcttcagttaacacagggagaaggatagtgcataccgatgaattcaagttcttggacaaagcagcgtacatcacagctagagatctagatgacaagaaacaagactcagtgaacccatggaggctctgtccagtgacacaagtcgaggaagtcaagtgtattcttagactgatgccaatttggctctgcactataatctactcagtcgtcttcactcaaatggcctctctctttgtggagcaaggcgctgcaatgaatacctctgtctcagatttcaaaatccccccggcaagtatgtccagcttcgacatccttagcgtcgctttgttcatattcctgtaccgcagagttctcgagccagtagccaacagattcaaaaagaatggatcaaaaggaatcaccgagcttcacaggatgggaatcggacttgtgattgctgtcatagctatgattgcagccgggattgtggaatgctataggcttaagtatgcagacaagagttgtactcactgtgatggctcaagctccttaagcatcttctggcaggctccacaatactcactcatcggggcatcagaagtgttcatgtacgtgggtcagcttgagttcttcaacgcgcaaacaccagacggactaaagagcttcgggagcgctctgtgtatgatgtcaatgtcaatggggaactttgttagtagcttgttggtaacaatggtggtgaagatctcaacagaggatcacatgcctggttggattccaaggaatctcaacaaaggtcacttagacagattctatttcctcctggctgcgttgacgagcattgacctggtggtatacattgcatgtgcaaaatggtacaaacctatacaactagaaggaaaagatgagatgcaagacatgagtgatgatgactatgacaccgagagtgaagaggaacgagagaaggattctaaagtctaa

SEQ ID NO: 96217 - protein, 606 aa, Arabidopsis thaliana
  peptide (1)..(606): Ceres Seq. ID no. 12732447
  misc_feature (101)..(512): Pfam Name: POT family Pfam Description: POT family
  misc_feature (5)..(579): Homolog of NCBI NO: 30685529 NR Description: peptide transporter - like protein [Arabidopsis
  misc_feature (5)..(579): Homolog of NCBI NO: 26451333 NR Description: putative peptide transporter [Arabidopsis
  misc_feature (5)..(579): Homolog of NCBI NO: 7488004 NR Description: peptide transport protein homolog F17L22.140 -
  misc_feature (13)..(574): Homolog of NCBI NO: 15076661 NR Description: peptide transporter [Oryza sativa (japonica >gi|15076663|dbj|BAB62327.1| peptide transporter [Oryza sativa
  misc_feature (13)..(574): Homolog of NCBI NO: 4102839 NR Description: LeOPT1 [Lycopersicon esculentum]
  misc_feature (15)..(574): Homolog of NCBI NO: 15226861 NR Description: histidine transport protein (PTR2-B); protein id: supported by cDNA: gi_13937184, supported by cDNA: gi_633939
  misc_feature (15)..(574): Homolog of NCBI NO: 1076331 NR Description: histidine transport protein - Arabidopsis thaliana
  misc_feature (7)..(574): Homolog of NCBI NO: 15232435 NR Description: peptide transport - like protein; protein id: supported by cDNA: 117581., supported by cDNA: gi_13430485,
  misc_feature (4)..(574): Homolog of NCBI NO: 31088360 NR Description: peptide transporter 1 [Vicia faba]
  misc_feature (15)..(574): Homolog of NCBI NO: 30696666 NR Description: oligopeptide transporter -related [Arabidopsis >gi|16604436|gb|AAL24224.1| At1g62200/F19K23_13 [Arabidopsis
MQTMKKKEGEEETRDGTVDYYGRPSIRSNSGQWVAGIVILLNQGLATLAFFGVGVNLVLFLTRVLQQNNADAANNVSKWTGTVYIFSLVGAFLSDSYWGRYKTCAIFQVIFVIGLSSLSLSSYMFLIRPRGCGDEVTPCGSHSMMEITMFYFSIYLIALGYGGYQPNIATLGADQFDEEHPKEGYSKIAFFSYFYLALNLGSLFSNTILGYFEDEGMWALGFWASTGSAIIGLILFLVGTPRYRYFKPTGNPLSRFCQVLVAATKKSSVEAPLRGREEMYDGDSEGKNASVNTGRRIVHTDEFKFLDKAAYITARDLDDKKQDSVNPWRLCPVTQVEEVKCILRLMPIWLCTIIYSVVFTQMASLFVEQGAAMNTSVSDFKIPPASMSSFDILSVALFIFLYRRVLEPVANRFKKNGSKGITELHRMGIGLVIAVIAMIAAGIVECYRLKYADKSCTHCDGSSSLSIFWQAPQYSLIGASEVFMYVGQLEFFNAQTPDGLKSFGSALCMMSMSMGNFVSSLLVTMVVKISTEDHMPGWIPRNLNKGHLDRFYFLLAALTSIDLVVYIACAKWYKPIQLEGKDEMQDMSDDDYDTESEEEREKDSKV

SEQ ID NO: 96218 - protein, 603 aa, Arabidopsis thaliana
  peptide (1)..(603): Ceres Seq. ID no. 12732448
  misc_feature (98)..(509): Pfam Name: POT family Pfam Description: POT family
  misc_feature (2)..(576): Homolog of NCBI NO: 30685529 NR Description: peptide transporter - like protein [Arabidopsis
  misc_feature (2)..(576): Homolog of NCBI NO: 26451333 NR Description: putative peptide transporter [Arabidopsis
  misc_feature (2)..(576): Homolog of NCBI NO: 7488004 NR Description: peptide transport protein homolog F17L22.140 -
  misc_feature (10)..(571): Homolog of NCBI NO: 15076661 NR Description: peptide transporter [Oryza sativa (japonica >gi|15076663|dbj|BAB62327.1| peptide transporter [Oryza sativa
  misc_feature (10)..(571): Homolog of NCBI NO: 4102839 NR Description: LeOPT1 [Lycopersicon esculentum]
  misc_feature (12)..(571): Homolog of NCBI NO: 15226861 NR Description: histidine transport protein (PTR2-B); protein id: supported by cDNA: gi_13937184, supported by cDNA: gi_633939
  misc_feature (12)..(571): Homolog of NCBI NO: 1076331 NR Description: histidine transport protein - Arabidopsis thaliana
  misc_feature (4)..(571): Homolog of NCBI NO: 15232435 NR Description: peptide transport - like protein; protein id: supported by cDNA: 117581., supported by cDNA: gi_13430485,
  misc_feature (1)..(571): Homolog of NCBI NO: 31088360 NR Description: peptide transporter 1 [Vicia faba]
  misc_feature (12)..(571): Homolog of NCBI NO: 30696666 NR Description: oligopeptide transporter -related [Arabidopsis >gi|16604436|gb|AAL24224.1| At1g62200/F19K23_13 [Arabidopsis
MKKKEGEEETRDGTVDYYGRPSIRSNSGQWVAGIVILLNQGLATLAFFGVGVNLVLFLTRVLQQNNADAANNVSKWTGTVYIFSLVGAFLSDSYWGRYKTCAIFQVIFVIGLSSLSLSSYMFLIRPRGCGDEVTPCGSHSMMEITMFYFSIYLIALGYGGYQPNIATLGADQFDEEHPKEGYSKIAFFSYFYLALNLGSLFSNTILGYFEDEGMWALGFWASTGSAIIGLILFLVGTPRYRYFKPTGNPLSRFCQVLVAATKKSSVEAPLRGREEMYDGDSEGKNASVNTGRRIVHTDEFKFLDKAAYITARDLDDKKQDSVNPWRLCPVTQVEEVKCILRLMPIWLCTIIYSVVFTQMASLFVEQGAAMNTSVSDFKIPPASMSSFDILSVALFIFLYRRVLEPVANRFKKNGSKGITELHRMGIGLVIAVIAMIAAGIVECYRLKYADKSCTHCDGSSSLSIFWQAPQYSLIGASEVFMYVGQLEFFNAQTPDGLKSFGSALCMMSMSMGNFVSSLLVTMVVKISTEDHMPGWIPRNLNKGHLDRFYFLLAALTSIDLVVYIACAKWYKPIQLEGKDEMQDMSDDDYDTESEEEREKDSKV

SEQ ID NO: 96219 - protein, 483 aa, Arabidopsis thaliana
  peptide (1)..(483): Ceres Seq. ID no. 12732449
  misc_feature (1)..(389): Pfam Name: POT family Pfam Description: POT family
  misc_feature (1)..(456): Homolog of NCBI NO: 30685529 NR Description: peptide transporter - like protein [Arabidopsis
  misc_feature (1)..(456): Homolog of NCBI NO: 26451333 NR Description: putative peptide transporter [Arabidopsis
  misc_feature (1)..(456): Homolog of NCBI NO: 7488004 NR Description: peptide transport protein homolog F17L22.140 -
  misc_feature (1)..(451): Homolog of NCBI NO: 15076661 NR Description: peptide transporter [Oryza sativa (japonica >gi|15076663|dbj|BAB62327.1| peptide transporter [Oryza sativa
  misc_feature (1)..(451): Homolog of NCBI NO: 4102839 NR Description: LeOPT1 [Lycopersicon esculentum]
  misc_feature (1)..(451): Homolog of NCBI NO: 15226861 NR Description: histidine transport protein (PTR2-B); protein id: supported by cDNA: gi_13937184, supported by cDNA: gi_633939
  misc_feature (1)..(451): Homolog of NCBI NO: 1076331 NR Description: histidine transport protein - Arabidopsis thaliana
  misc_feature (1)..(451): Homolog of NCBI NO: 15232435 NR Description: peptide transport - like protein; protein id: supported by cDNA: 117581., supported by cDNA: gi_13430485,
  misc_feature (1)..(451): Homolog of NCBI NO: 31088360 NR Description: peptide transporter 1 [Vicia faba]
  misc_feature (1)..(451): Homolog of NCBI NO: 30696666 NR Description: oligopeptide transporter -related [Arabidopsis >gi|16604436|gb|AAL24224.1| At1g62200/F19K23_13 [Arabidopsis
MFLIRPRGCGDEVTPCGSHSMMEITMFYFSIYLIALGYGGYQPNIATLGADQFDEEHPKEGYSKIAFFSYFYLALNLGSLFSNTILGYFEDEGMWALGFWASTGSAIIGLILFLVGTPRYRYFKPTGNPLSRFCQVLVAATKKSSVEAPLRGREEMYDGDSEGKNASVNTGRRIVHTDEFKFLDKAAYITARDLDDKKQDSVNPWRLCPVTQVEEVKCILRLMPIWLCTIIYSVVFTQMASLFVEQGAAMNTSVSDFKIPPASMSSFDILSVALFIFLYRRVLEPVANRFKKNGSKGITELHRMGIGLVIAVIAMIAAGIVECYRLKYADKSCTHCDGSSSLSIFWQAPQYSLIGASEVFMYVGQLEFFNAQTPDGLKSFGSALCMMSMSMGNFVSSLLVTMVVKISTEDHMPGWIPRNLNKGHLDRFYFLLAALTSIDLVVYIACAKWYKPIQLEGKDEMQDMSDDDYDTESEEEREKDSKV

SEQ ID NO: 96220 - DNA, 945 bp, Arabidopsis thaliana
  misc_feature (1)..(945): Ceres Seq. ID no. 12732498
  misc_feature: MA Experiment ID: 20000314 Result: Down-regulated in Transcription
  misc_feature: MA Experiment 20000314 PARAMETER Experiment Name: At_14day_Shoots-Roots_Sub_P Parameter: Age (day) Value: 14
  misc_feature: MA Experiment 20000314 PARAMETER Experiment Name: At_14day_Shoots-Roots_Sub_P Parameter: Organism Value: A. thaliana
  misc_feature: MA Experiment 20000314 PARAMETER Experiment Name: At_14day_Shoots-Roots_Sub_P Parameter: Plant Line Value: WS
  misc_feature: MA Experiment 20000314 PARAMETER Experiment Name: At_14day_Shoots-Roots_Sub_P Parameter: Tissue Value: Roots vs. Whole Plant
atgggtggttgcgtctcctccaacctccttactccgaccgatgacagcagcttctctcacctcaccagctcctccttaagccaacatttcgtcaagctaacttccaccacttacggtcttctcaatctcgactcttcttcaccttctcctccgtctccttcctcctcctcctccgccaaatccgttatcacgccaatgactccgcctgagagattcactatcaacggtaaggaggcggcgatgatgatggttaagtctgagccgacgacggaggttattaacttctgggagctaatgtcaggtttagacggcgatacttgtcgattctctccgattccggtgaaatgtaatggattttccggcggattaaagaaagagaactccgatcctaatttgaaaaaccctaacgattacgaggttttgaaaccgttagatccgaaattagcggaggaatctgagaggttatgtgacggcggagagaatcgcgttgtgatttatacgacgtcgttgcgcggtgttcgacggacgtttgaggcgtgtaacgccgtgagagctgcgattgagagttttggtgtagtggtttgtgagagagatgtgtcaatggatagaggatttagagaagagttatccaatctaatggcggtagaatcgacggcggcggtgttgccgcctcgggtttttgtgaaggggaagtacattggtggagcagaggaagtgatgagattggtggaagaaggattgcttggtgaattgcttaaagagattccgaggaagaaagatcggtgtggcggcggttgcggtggttgcggcggattagcgtttttgccgtgttcgggttgtaatggaagctgtaaagtggtggaaggatgggggaatgatgcagtggtggtgaagtgtaaggagtgtaatgagaatggtcttgttcgttgtccaatatgcagctaa

SEQ ID NO: 96221 - protein, 314 aa, Arabidopsis thaliana
  peptide (1)..(314): Ceres Seq. ID no. 12732499
  misc_feature (162)..(252): Pfam Name: Glutaredoxin Pfam Description: Glutaredoxin
  misc_feature (1)..(314): Homolog of NCBI NO: 15223291 NR Description: unknown protein; protein id: At1g32760.1 thaliana] >gi|6714276|gb|AAF25972.1|AC017118_9 F6N18.14
  misc_feature (123)..(314): Homolog of NCBI NO: 15235179 NR Description: putative protein; protein id: At4g10630.1
  misc_feature (3)..(214): Homolog of NCBI NO: 15235179 NR Description: putative protein; protein id: At4g10630.1
  misc_feature (142)..(314): Homolog of NCBI NO: 38346321 NR Description: OJ000126_13.3 [Oryza sativa (japonica
  misc_feature (147)..(314): Homolog of NCBI NO: 15237554 NR Description: putative protein; protein id: At5g03870.1
  misc_feature (51)..(313): Homolog of NCBI NO: 15217659 NR Description: peptide transporter, putative; protein id: supported by cDNA: gi_15810442, supported by cDNA: gi_17381051
  misc_feature (51)..(313): Homolog of NCBI NO: 17381052 NR Description: putative peptide transporter protein [Arabidopsis
  misc_feature (113)..(314): Homolog of NCBI NO: 15228503 NR Description: hypothetical protein; protein id: At3g28850.1 thaliana] >gi|11994793|dbj|BAB03183.1|
  misc_feature (299)..(313): Homolog of NCBI NO: 15228503 NR Description: hypothetical protein; protein id: At3g28850.1 thaliana] >gi|11994793|dbj|BAB03183.1|
  misc_feature (148)..(314): Homolog of NCBI NO: 15240060 NR Description: putative protein; protein id: At5g06470.1 thaliana] >gi|9758427|dbj|BAB08969.1|
MGGCVSSNLLTPTDDSSFSHLTSSSLSQHFVKLTSTTYGLLNLDSSSPSPPSPSSSSSAKSVITPMTPPERFTINGKEAAMMMVKSEPTTEVINFWELMSGLDGDTCRFSPIPVKCNGFSGGLKKENSDPNLKNPNDYEVLKPLDPKLAEESERLCDGGENRVVIYTTSLRGVRRTFEACNAVRAAIESFGVVVCERDVSMDRGFREELSNLMAVESTAAVLPPRVFVKGKYIGGAEEVMRLVEEGLLGELLKEIPRKKDRCGGGCGGCGGLAFLPCSGCNGSCKVVEGWGNDAVVVKCKECNENGLVRCPICS

SEQ ID NO: 96222 - protein, 249 aa, Arabidopsis thaliana
  peptide (1)..(249): Ceres Seq. ID no. 12732500
  misc_feature (97)..(187): Pfam Name: Glutaredoxin Pfam Description: Glutaredoxin
  misc_feature (1)..(249): Homolog of NCBI NO: 15223291 NR Description: unknown protein; protein id: At1g32760.1 thaliana] >gi|6714276|gb|AAF25972.1|AC017118_9 F6N18.14
  misc_feature (58)..(249): Homolog of NCBI NO: 15235179 NR Description: putative protein; protein id: At4g10630.1
  misc_feature (1)..(149): Homolog of NCBI NO: 15235179 NR Description: putative protein; protein id: At4g10630.1
  misc_feature (77)..(249): Homolog of NCBI NO: 38346321 NR Description: OJ000126_13.3 [Oryza sativa (japonica
  misc_feature (82)..(249): Homolog of NCBI NO: 15237554 NR Description: putative protein; protein id: At5g03870.1
  misc_feature (1)..(248): Homolog of NCBI NO: 15217659 NR Description: peptide transporter, putative; protein id: supported by cDNA: gi_15810442, supported by cDNA: gi_17381051
  misc_feature (1)..(248): Homolog of NCBI NO: 17381052 NR Description: putative peptide transporter protein [Arabidopsis
  misc_feature (48)..(249): Homolog of NCBI NO: 15228503 NR Description: hypothetical protein; protein id: At3g28850.1 thaliana] >gi|11994793|dbj|BAB03183.1|
  misc_feature (234)..(248): Homolog of NCBI NO: 15228503 NR Description: hypothetical protein; protein id: At3g28850.1 thaliana] >gi|11994793|dbj|BAB03183.1|
  misc_feature (83)..(249): Homolog of NCBI NO: 15240060 NR Description: putative protein; protein id: At5g06470.1 thaliana] >gi|9758427|dbj|BAB08969.1|
MTPPERFTINGKEAAMMMVKSEPTTEVINFWELMSGLDGDTCRFSPIPVKCNGFSGGLKKENSDPNLKNPNDYEVLKPLDPKLAEESERLCDGGENRVVIYTTSLRGVRRTFEACNAVRAAIESFGVVVCERDVSMDRGFREELSNLMAVESTAAVLPPRVFVKGKYIGGAEEVMRLVEEGLLGELLKEIPRKKDRCGGGCGGCGGLAFLPCSGCNGSCKVVEGWGNDAVVVKCKECNENGLVRCPICS

SEQ ID NO: 96223 - protein, 234 aa, Arabidopsis thaliana
  peptide (1)..(234): Ceres Seq. ID no. 12732501
  misc_feature (82)..(172): Pfam Name: Glutaredoxin Pfam Description: Glutaredoxin
  misc_feature (1)..(234): Homolog of NCBI NO: 15223291 NR Description: unknown protein; protein id: At1g32760.1 thaliana] >gi|6714276|gb|AAF25972.1|AC017118_9 F6N18.14
  misc_feature (43)..(234): Homolog of NCBI NO: 15235179 NR Description: putative protein; protein id: At4g10630.1
  misc_feature (1)..(134): Homolog of NCBI NO: 15235179 NR Description: putative protein; protein id: At4g10630.1
  misc_feature (62)..(234): Homolog of NCBI NO: 38346321 NR Description: OJ000126_13.3 [Oryza sativa (japonica
  misc_feature (67)..(234): Homolog of NCBI NO: 15237554 NR Description: putative protein; protein id: At5g03870.1
  misc_feature (1)..(233): Homolog of NCBI NO: 15217659 NR Description: peptide transporter, putative; protein id: supported by cDNA: gi_15810442, supported by cDNA: gi_17381051
  misc_feature (1)..(233): Homolog of NCBI NO: 17381052 NR Description: putative peptide transporter protein [Arabidopsis
  misc_feature (33)..(234): Homolog of NCBI NO: 15228503 NR Description: hypothetical protein; protein id: At3g28850.1 thaliana] >gi|11994793|dbj|BAB03183.1|
  misc_feature (219)..(233): Homolog of NCBI NO: 15228503 NR Description: hypothetical protein; protein id: At3g28850.1 thaliana] >gi|11994793|dbj|BAB03183.1|
  misc_feature (68)..(234): Homolog of NCBI NO: 15240060 NR Description: putative protein; protein id: At5g06470.1 thaliana] >gi|9758427|dbj|BAB08969.1|
MMMVKSEPTTEVINFWELMSGLDGDTCRFSPIPVKCNGFSGGLKKENSDPNLKNPNDYEVLKPLDPKLAEESERLCDGGENRVVIYTTSLRGVRRTFEACNAVRAAIESFGVVVCERDVSMDRGFREELSNLMAVESTAAVLPPRVFVKGKYIGGAEEVMRLVEEGLLGELLKEIPRKKDRCGGGCGGCGGLAFLPCSGCNGSCKVVEGWGNDAVVVKCKECNENGLVRCPICS

SEQ ID NO: 96224 - DNA, 1077 bp, Arabidopsis thaliana
  misc_feature (1)..(1077): Ceres Seq. ID no. 12732502
  misc_feature: MA Experiment ID: 20000185 Result: Down-regulated in Transcription
  misc_feature: MA Experiment 20000185 PARAMETER Experiment Name: At_Roots__P Parameter: Age (day) Value: 7 vs. 21
  misc_feature: MA Experiment 20000185 PARAMETER Experiment Name: At_Roots__P Parameter: Organism Value: A. thaliana
  misc_feature: MA Experiment 20000185 PARAMETER Experiment Name: At_Roots__P Parameter: Tissue Value: Roots vs. Whole Plant
  misc_feature: MA Experiment ID: 20000234 Result: Down-regulated in Transcription
  misc_feature: MA Experiment 20000234 PARAMETER Experiment Name: At_Siliques_P Parameter: Age (day) Value: 21
  misc_feature: MA Experiment 20000234 PARAMETER Experiment Name: At_Siliques_P Parameter: Organism Value: A. thaliana
  misc_feature: MA Experiment 20000234 PARAMETER Experiment Name: At_Siliques_P Parameter: Plant Line Value: WS
  misc_feature: MA Experiment 20000234 PARAMETER Experiment Name: At_Siliques_P Parameter: Tissue Value: Less Than 5mm Siliques vs. Whole Plant
  misc_feature: MA Experiment ID: 20000264 Result: Down-regulated in Transcription
  misc_feature: MA Experiment 20000264 PARAMETER Experiment Name: At_Open_Flower_P Parameter: Age (day) Value: 21
  misc_feature: MA Experiment 20000264 PARAMETER Experiment Name: At_Open_Flower_P Parameter: Plant Line Value: WS
  misc_feature: MA Experiment 20000264 PARAMETER Experiment Name: At_Open_Flower_P Parameter: Tissue Value: Open Flower vs. Whole Plant
  misc_feature: MA Experiment ID: 20000265 Result: Down-regulated in Transcription
  misc_feature: MA Experiment 20000265 PARAMETER Experiment Name: At_Open_Flower_P Parameter: Age (day) Value: 21
  misc_feature: MA Experiment 20000265 PARAMETER Experiment Name: At_Open_Flower_P Parameter: Plant Line Value: WS
  misc_feature: MA Experiment 20000265 PARAMETER Experiment Name: At_Open_Flower_P Parameter: Tissue Value: Closed Flower vs. Whole Plant
  misc_feature: MA Experiment ID: 20000286 Result: Down-regulated in Transcription
  misc_feature: MA Experiment 20000286 PARAMETER Experiment Name: At_Open_Flower_P Parameter: Age (day) Value: 21
  misc_feature: MA Experiment 20000286 PARAMETER Experiment Name: At_Open_Flower_P Parameter: Plant Line Value: WS
  misc_feature: MA Experiment 20000286 PARAMETER Experiment Name: At_Open_Flower_P Parameter: Tissue Value: Half Open vs. Whole Plant
  misc_feature: MA Experiment ID: 20000438 Result: Down-regulated in Transcription
  misc_feature: MA Experiment 20000438 PARAMETER Experiment Name: At_Shoots__P Parameter: Age (day) Value: 14
  misc_feature: MA Experiment 20000438 PARAMETER Experiment Name: At_Shoots__P Parameter: Tissue Value: Shoots vs. Whole Plant
  misc_feature: MA Experiment ID: 20000794 Result: Down-regulated in Transcription
  misc_feature: MA Experiment 20000794 PARAMETER Experiment Name: At_Petals_P Parameter: Age (day) Value: 23-25 days
  misc_feature: MA Experiment 20000794 PARAMETER Experiment Name: At_Petals_P Parameter: Plant Line Value: WS
  misc_feature: MA Experiment 20000794 PARAMETER Experiment Name: At_Petals_P Parameter: Tissue Value: Petals vs. Whole plant
  misc_feature: MA Experiment ID: 20001906 Result: Down-regulated in Transcription
  misc_feature: MA Experiment 20001906 PARAMETER Experiment Name: At_Drought_Reproduction_P Parameter: Age (day) Value: 35
  misc_feature: MA Experiment 20001906 PARAMETER Experiment Name: At_Drought_Reproduction_P Parameter: Organism Value: A. thaliana
  misc_feature: MA Experiment 20001906 PARAMETER Experiment Name: At_Drought_Reproduction_P Parameter: Plant Line Value: WS
  misc_feature: MA Experiment 20001906 PARAMETER Experiment Name: At_Drought_Reproduction_P Parameter: Timepoint (day) Value: 5
  misc_feature: MA Experiment 20001906 PARAMETER Experiment Name: At_Drought_Reproduction_P Parameter: Tissue Value: Siliques
  misc_feature: MA Experiment 20001906 PARAMETER Experiment Name: At_Drought_Reproduction_P Parameter: Treatment Value: Drought vs. No Drought
atggctgataataaggtcaatctttcgattaatggacaatcaaaagtgcctccaggtttcagattccatcccaccgaagaagaacttctccattactatctccgtaagaaagttaactctcaaaagatcgatcttgatgtcattcgtgaagttgatctaaacaagcttgagccttgggatattcaagaggaatgtagaatcggttcaacgccacaaaacgactggtacttcttcagccacaaggacaagaagtatccaaccgggaccaggacgaaccgggcaacagtcgctggattctggaaagctaccggacgtgacaaaatcatctgcagttgtgtccggagaattggactgaggaagacactcgtgttctacaaaggaagagctcctcacggtcagaaatccgactggatcatgcatgagtatcgcctcgacgatactccaatgtctaatggctatgctgatgttgttacagaagatccaatgagctataacgaagaaggttgggtggtatgtcgagtgttcaggaagaagaactatcaaaagattgacgattgtcctaaaatcactctatcttctttacctgatgacacggaggaagagaaggggcccacctttcacaacactcaaaacgttaccggtttagaccatgttcttctctacatggaccgtaccggttctaacatttgcatgcccgagagccaaacaacgactcaacatcaagatgatgtcttattcatgcaactcccaagtcttgagacacctaaatccgagagcccggtcgaccaaagtttcctgactccaagcaaactcgatttctctcccgttcaagagaagataaccgaaagaccggtttgcagcaactgggctagtcttgaccggctcgtagcttggcaattgaacaatggtcatcataatccgtgtcatcgtaagagttttgatgaagaagaagaaaatggtgatactatgatgcagcgatgggatcttcattggaataatgatgataatgttgatctttggagtagtttcactgagtcttcttcgtctttagacccacttcttcatttatctgtatga

SEQ ID NO: 96225 - protein, 358 aa, Arabidopsis thaliana
  peptide (1)..(358): Ceres Seq. ID no. 12732503
  misc_feature (16)..(145): Pfam Name: No apical meristem (NAM) protein Pfam Description: No apical meristem (NAM) protein
  misc_feature (1)..(358): Homolog of NCBI NO: 15223299 NR Description: OsNAC7 protein, putative; protein id: At1g32770.1
  misc_feature (1)..(304): Homolog of NCBI NO: 27754598 NR Description: putative NAM (no apical meristem) protein
  misc_feature (1)..(301): Homolog of NCBI NO: 30690500 NR Description: No apical meristem (NAM) protein family
  misc_feature (6)..(301): Homolog of NCBI NO: 7485760 NR Description: NAM (no apical meristem)-like protein [imported] -
  misc_feature (6)..(165): Homolog of NCBI NO: 6006373 NR Description: Similar to NAM like protein (AC005310) [Oryza
  misc_feature (166)..(179): Homolog of NCBI NO: 6006373 NR Description: Similar to NAM like protein (AC005310) [Oryza
  misc_feature (6)..(219): Homolog of NCBI NO: 21536577 NR Description: NAM-like protein [Arabidopsis thaliana]
  misc_feature (6)..(219): Homolog of NCBI NO: 15228643 NR Description: NAM-like protein; protein id: At3g61910.1,
  misc_feature (12)..(349): Homolog of NCBI NO: 15219419 NR Description: NAM (no apical meristem)-like protein OsNAC4, protein id: At1g79580.1 [Arabidopsis thaliana]
  misc_feature (9)..(183): Homolog of NCBI NO: 15217491 NR Description: unknown protein; protein id: At1g33280.1
MADNKVNLSINGQSKVPPGFRFHPTEEELLHYYLRKKVNSQKIDLDVIREVDLNKLEPWDIQEECRIGSTPQNDWYFFSHKDKKYPTGTRTNRATVAGFWKATGRDKIICSCVRRIGLRKTLVFYKGRAPHGQKSDWIMHEYRLDDTPMSNGYADVVTEDPMSYNEEGWVVCRVFRKKNYQKIDDCPKITLSSLPDDTEEEKGPTFHNTQNVTGLDHVLLYMDRTGSNICMPESQTTTQHQDDVLFMQLPSLETPKSESPVDQSFLTPSKLDFSPVQEKITERPVCSNWASLDRLVAWQLNNGHHNPCHRKSFDEEEENGDTMMQRWDLHWNNDDNVDLWSSFTESSSSLDPLLHLSV

SEQ ID NO: 96226 - protein, 220 aa, Arabidopsis thaliana
  peptide (1)..(220): Ceres Seq. ID no. 12732504
  misc_feature (1)..(220): Homolog of NCBI NO: 15223299 NR Description: OsNAC7 protein, putative; protein id: At1g32770.1
  misc_feature (1)..(166): Homolog of NCBI NO: 27754598 NR Description: putative NAM (no apical meristem) protein
  misc_feature (1)..(163): Homolog of NCBI NO: 30690500 NR Description: No apical meristem (NAM) protein family
  misc_feature (1)..(163): Homolog of NCBI NO: 7485760 NR Description: NAM (no apical meristem)-like protein [imported] -
  misc_feature (1)..(27): Homolog of NCBI NO: 6006373 NR Description: Similar to NAM like protein (AC005310) [Oryza
  misc_feature (28)..(41): Homolog of NCBI NO: 6006373 NR Description: Similar to NAM like protein (AC005310) [Oryza
  misc_feature (1)..(81): Homolog of NCBI NO: 21536577 NR Description: NAM-like protein [Arabidopsis thaliana]
  misc_feature (1)..(81): Homolog of NCBI NO: 15228643 NR Description: NAM-like protein; protein id: At3g61910.1,
  misc_feature (1)..(211): Homolog of NCBI NO: 15219419 NR Description: NAM (no apical meristem)-like protein OsNAC4, protein id: At1g79580.1 [Arabidopsis thaliana]
  misc_feature (1)..(45): Homolog of NCBI NO: 15217491 NR Description: unknown protein; protein id: At1g33280.1
MHEYRLDDTPMSNGYADVVTEDPMSYNEEGWVVCRVFRKKNYQKIDDCPKITLSSLPDDTEEEKGPTFHNTQNVTGLDHVLLYMDRTGSNICMPESQTTTQHQDDVLFMQLPSLETPKSESPVDQSFLTPSKLDFSPVQEKITERPVCSNWASLDRLVAWQLNNGHHNPCHRKSFDEEEENGDTMMQRWDLHWNNDDNVDLWSSFTESSSSLDPLLHLSV

SEQ ID NO: 96227 - protein, 210 aa, Arabidopsis thaliana
  peptide (1)..(210): Ceres Seq. ID no. 12732505
  misc_feature (1)..(210): Homolog of NCBI NO: 15223299 NR Description: OsNAC7 protein, putative; protein id: At1g32770.1
  misc_feature (1)..(156): Homolog of NCBI NO: 27754598 NR Description: putative NAM (no apical meristem) protein
  misc_feature (1)..(153): Homolog of NCBI NO: 30690500 NR Description: No apical meristem (NAM) protein family
  misc_feature (1)..(153): Homolog of NCBI NO: 7485760 NR Description: NAM (no apical meristem)-like protein [imported] -
  misc_feature (1)..(17): Homolog of NCBI NO: 6006373 NR Description: Similar to NAM like protein (AC005310) [Oryza
  misc_feature (18)..(31): Homolog of NCBI NO: 6006373 NR Description: Similar to NAM like protein (AC005310) [Oryza
  misc_feature (1)..(71): Homolog of NCBI NO: 21536577 NR Description: NAM-like protein [Arabidopsis thaliana]
  misc_feature (1)..(71): Homolog of NCBI NO: 15228643 NR Description: NAM-like protein; protein id: At3g61910.1,
  misc_feature (1)..(201): Homolog of NCBI NO: 15219419 NR Description: NAM (no apical meristem)-like protein OsNAC4, protein id: At1g79580.1 [Arabidopsis thaliana]
  misc_feature (1)..(35): Homolog of NCBI NO: 15217491 NR Description: unknown protein; protein id: At1g33280.1
MSNGYADVVTEDPMSYNEEGWVVCRVFRKKNYQKIDDCPKITLSSLPDDTEEEKGPTFHNTQNVTGLDHVLLYMDRTGSNICMPESQTTTQHQDDVLFMQLPSLETPKSESPVDQSFLTPSKLDFSPVQEKITERPVCSNWASLDRLVAWQLNNGHHNPCHRKSFDEEEENGDTMMQRWDLHWNNDDNVDLWSSFTESSSSLDPLLHLSV

SEQ ID NO: 96228 - DNA, 1901 bp, Arabidopsis thaliana
  misc_feature (1)..(1901): Ceres Seq. ID no. 12732514
  misc_feature: MA Experiment ID: 20000171 Result: Up-regulated in Transcription
  misc_feature: MA Experiment 20000171 PARAMETER Experiment Name: At_42deg_Heat_P Parameter: Age (day) Value: 14
  misc_feature: MA Experiment 20000171 PARAMETER Experiment Name: At_42deg_Heat_P Parameter: Organism Value: A. thaliana
  misc_feature: MA Experiment 20000171 PARAMETER Experiment Name: At_42deg_Heat_P Parameter: Plant Line Value: WS
  misc_feature: MA Experiment 20000171 PARAMETER Experiment Name: At_42deg_Heat_P Parameter: Temperature (deg C) Value: 42 vs. 22
  misc_feature: MA Experiment 20000171 PARAMETER Experiment Name: At_42deg_Heat_P Parameter: Timepoint (hr) Value: 1
  misc_feature: MA Experiment 20000171 PARAMETER Experiment Name: At_42deg_Heat_P Parameter: Tissue Value: Aerial
  misc_feature: MA Experiment ID: 20000173 Result: Up-regulated in Transcription
  misc_feature: MA Experiment 20000173 PARAMETER Experiment Name: At_42deg_Heat_P Parameter: Age (day) Value: 14
  misc_feature: MA Experiment 20000173 PARAMETER Experiment Name: At_42deg_Heat_P Parameter: Organism Value: A. thaliana
  misc_feature: MA Experiment 20000173 PARAMETER Experiment Name: At_42deg_Heat_P Parameter: Plant Line Value: WS
  misc_feature: MA Experiment 20000173 PARAMETER Experiment Name: At_42deg_Heat_P Parameter: Temperature (deg C) Value: 42 vs. 22
  misc_feature: MA Experiment 20000173 PARAMETER Experiment Name: At_42deg_Heat_P Parameter: Timepoint (hr) Value: 6
  misc_feature: MA Experiment 20000173 PARAMETER Experiment Name: At_42deg_Heat_P Parameter: Tissue Value: Aerial
  misc_feature: MA Experiment ID: 20000179 Result: Down-regulated in Transcription
  misc_feature: MA Experiment 20000179 PARAMETER Experiment Name: At_Germinating_Seeds_P Parameter: Age (hr) Value: 6 vs. 0
  misc_feature: MA Experiment 20000179 PARAMETER Experiment Name: At_Germinating_Seeds_P Parameter: Tissue Value: Germinating Seeds
  misc_feature: MA Experiment ID: 20000180 Result: Down-regulated in Transcription
  misc_feature: MA Experiment 20000180 PARAMETER Experiment Name: At_Germinating_Seeds_P Parameter: Age (hr) Value: 24 vs. 0
  misc_feature: MA Experiment 20000180 PARAMETER Experiment Name: At_Germinating_Seeds_P Parameter: Tissue Value: Germinating Seeds
  misc_feature: MA Experiment ID: 20000268 Result: Up-regulated in Transcription
  misc_feature: MA Experiment 20000268 PARAMETER Experiment Name: At_100mM_NaCl__P Parameter: Age (day) Value: 14
  misc_feature: MA Experiment 20000268 PARAMETER Experiment Name: At_100mM_NaCl__P Parameter: Organism Value: A. thaliana
  misc_feature: MA Experiment 20000268 PARAMETER Experiment Name: At_100mM_NaCl__P Parameter: Plant Line Value: WS
  misc_feature: MA Experiment 20000268 PARAMETER Experiment Name: At_100mM_NaCl__P Parameter: Timepoint (hr) Value: 6
  misc_feature: MA Experiment 20000268 PARAMETER Experiment Name: At_100mM_NaCl__P Parameter: Tissue Value: Whole Plant
  misc_feature: MA Experiment 20000268 PARAMETER Experiment Name: At_100mM_NaCl__P Parameter: Treatment Value: 100mM NaCl vs. No Treatment
  misc_feature: MA Experiment ID: 20000456 Result: Up-regulated in Transcription
  misc_feature: MA Experiment 20000456 PARAMETER Experiment Name: At_100uM_BA_P Parameter: Age (day) Value: 14
  misc_feature: MA Experiment 20000456 PARAMETER Experiment Name: At_100uM_BA_P Parameter: Organism Value: A. thaliana
  misc_feature: MA Experiment 20000456 PARAMETER Experiment Name: At_100uM_BA_P Parameter: Plant Line Value: WS
  misc_feature: MA Experiment 20000456 PARAMETER Experiment Name: At_100uM_BA_P Parameter: Timepoint (hr) Value: 6
  misc_feature: MA Experiment 20000456 PARAMETER Experiment Name: At_100uM_BA_P Parameter: Tissue Value: Aerial
  misc_feature: MA Experiment 20000456 PARAMETER Experiment Name: At_100uM_BA_P Parameter: Treatment Value: 100uM BA vs. No Treatment
  misc_feature: MA Experiment ID: 20000709 Result: Up-regulated in Transcription
  misc_feature: MA Experiment 20000709 PARAMETER Experiment Name: At_15mM_NH4NO3_L-to-H_P Parameter: Age (hr) Value: 14
  misc_feature: MA Experiment 20000709 PARAMETER Experiment Name: At_15mM_NH4NO3_L-to-H_P Parameter: Organism Value: A. thaliana
  misc_feature: MA Experiment 20000709 PARAMETER Experiment Name: At_15mM_NH4NO3_L-to-H_P Parameter: Plant Line Value: WS
  misc_feature: MA Experiment 20000709 PARAMETER Experiment Name: At_15mM_NH4NO3_L-to-H_P Parameter: Timepoint (hr) Value: 4
  misc_feature: MA Experiment 20000709 PARAMETER Experiment Name: At_15mM_NH4NO3_L-to-H_P Parameter: Tissue Value: Aerial
  misc_feature: MA Experiment 20000709 PARAMETER Experiment Name: At_15mM_NH4NO3_L-to-H_P Parameter: Treatment Value: 15mM NH4NO3 vs. 30mM Mannitol
  misc_feature: MA Experiment ID: 20000794 Result: Up-regulated in Transcription
  misc_feature: MA Experiment 20000794 PARAMETER Experiment Name: At_Petals_P Parameter: Age (day) Value: 23-25 days
  misc_feature: MA Experiment 20000794 PARAMETER Experiment Name: At_Petals_P Parameter: Plant Line Value: WS
  misc_feature: MA Experiment 20000794 PARAMETER Experiment Name: At_Petals_P Parameter: Tissue Value: Petals vs. Whole plant
  misc_feature: MA Experiment ID: 20001247 Result: Down-regulated in Transcription
  misc_feature: MA Experiment 20001247 PARAMETER Experiment Name: At_Far-red-induction_P Parameter: Age (day) Value: 7
  misc_feature: MA Experiment 20001247 PARAMETER Experiment Name: At_Far-red-induction_P Parameter: Light Value: Far-red vs. White
  misc_feature: MA Experiment 20001247 PARAMETER Experiment Name: At_Far-red-induction_P Parameter: Organism Value: A. thaliana
  misc_feature: MA Experiment 20001247 PARAMETER Experiment Name: At_Far-red-induction_P Parameter: Plant Line Value: Columbia
  misc_feature: MA Experiment 20001247 PARAMETER Experiment Name: At_Far-red-induction_P Parameter: Timepoint (hr) Value: 1
  misc_feature: MA Experiment 20001247 PARAMETER Experiment Name: At_Far-red-induction_P Parameter: Tissue Value: Whole Plant
  misc_feature: MA Experiment ID: 20001905 Result: Up-regulated in Transcription
  misc_feature: MA Experiment 20001905 PARAMETER Experiment Name: At_Drought_Reproduction_P Parameter: Age (day) Value: 40
  misc_feature: MA Experiment 20001905 PARAMETER Experiment Name: At_Drought_Reproduction_P Parameter: Organism Value: A. thaliana
  misc_feature: MA Experiment 20001905 PARAMETER Experiment Name: At_Drought_Reproduction_P Parameter: Plant Line Value: WS
  misc_feature: MA Experiment 20001905 PARAMETER Experiment Name: At_Drought_Reproduction_P Parameter: Timepoint (day) Value: 10
  misc_feature: MA Experiment 20001905 PARAMETER Experiment Name: At_Drought_Reproduction_P Parameter: Tissue Value: Rosettes
  misc_feature: MA Experiment 20001905 PARAMETER Experiment Name: At_Drought_Reproduction_P Parameter: Treatment Value: Drought vs. No Drought
  misc_feature: MA Experiment ID: 20001906 Result: Up-regulated in Transcription
  misc_feature: MA Experiment 20001906 PARAMETER Experiment Name: At_Drought_Reproduction_P Parameter: Age (day) Value: 35
  misc_feature: MA Experiment 20001906 PARAMETER Experiment Name: At_Drought_Reproduction_P Parameter: Organism Value: A. thaliana
  misc_feature: MA Experiment 20001906 PARAMETER Experiment Name: At_Drought_Reproduction_P Parameter: Plant Line Value: WS
  misc_feature: MA Experiment 20001906 PARAMETER Experiment Name: At_Drought_Reproduction_P Parameter: Timepoint (day) Value: 5
  misc_feature: MA Experiment 20001906 PARAMETER Experiment Name: At_Drought_Reproduction_P Parameter: Tissue Value: Siliques
  misc_feature: MA Experiment 20001906 PARAMETER Experiment Name: At_Drought_Reproduction_P Parameter: Treatment Value: Drought vs. No Drought
  misc_feature: MA Experiment ID: 20001908 Result: Up-regulated in Transcription
  misc_feature: MA Experiment 20001908 PARAMETER Experiment Name: At_Drought_Reproduction_P Parameter: Age (day) Value: 40
  misc_feature: MA Experiment 20001908 PARAMETER Experiment Name: At_Drought_Reproduction_P Parameter: Organism Value: A. thaliana
  misc_feature: MA Experiment 20001908 PARAMETER Experiment Name: At_Drought_Reproduction_P Parameter: Plant Line Value: WS
  misc_feature: MA Experiment 20001908 PARAMETER Experiment Name: At_Drought_Reproduction_P Parameter: Timepoint (day) Value: 10
  misc_feature: MA Experiment 20001908 PARAMETER Experiment Name: At_Drought_Reproduction_P Parameter: Tissue Value: Siliques
  misc_feature: MA Experiment 20001908 PARAMETER Experiment Name: At_Drought_Reproduction_P Parameter: Treatment Value: Drought vs. No Drought
  misc_feature: MA Experiment ID: 20001911 Result: Up-regulated in Transcription
  misc_feature: MA Experiment 20001911 PARAMETER Experiment Name: At_Drought_Reproduction_P Parameter: Age (day) Value: 40
  misc_feature: MA Experiment 20001911 PARAMETER Experiment Name: At_Drought_Reproduction_P Parameter: Organism Value: A. thaliana
  misc_feature: MA Experiment 20001911 PARAMETER Experiment Name: At_Drought_Reproduction_P Parameter: Plant Line Value: WS
  misc_feature: MA Experiment 20001911 PARAMETER Experiment Name: At_Drought_Reproduction_P Parameter: Timepoint (day) Value: 10
  misc_feature: MA Experiment 20001911 PARAMETER Experiment Name: At_Drought_Reproduction_P Parameter: Tissue Value: Flowers
  misc_feature: MA Experiment 20001911 PARAMETER Experiment Name: At_Drought_Reproduction_P Parameter: Treatment Value: Drought vs. No Drought
acagaaaaatcgaaactttttagggtttttttttttgtgataacgagagagaaaaaagtgatggacttgtcggttgagaacggaggtttagctccaggttttaggtttcatccgacggacgaagaacttgtcgtctattatctcaaaagaaagatccgtcggaaaaaactcagagtcgaagcaatcggcgagactgatgtctataagtttgatcctgaggaattacctgagaaagcgttgtataagactagagatcgtcaatggttctttttcagcttaagggataggaaacatggaagtaggtcaagtagagctactgaacgtggctattggaaagcaacagggaaggatagagtcattcattgtgattcgagacccgttggagagaagaagactcttgttttccatagaggcagggcacctaatggcgaacggactaattgggtgatgcatgagtatacattgcacaaagaggagctcaagaggtgtggtggtgaagatgttaaggatgcttatgttctttacaagatttataagaaaagtgggtctggtcctaagaatggtgagcaatatggagctccttttattgaagaagaatgggctgaagatgatgatgatgatgttgatgagcctgctaatcagctcgttgtttcggctagtgttgataatagtttatgggggaaagggcttaaccaatctgaattggatgataatgatattgaagagctgatgagtcaggttagagatcagtctggtccaacattgcagcagaatggggtgtctggactgaactctcatgtagacacgtataatctggagaacctggaggaagatatgtatttggaaatcaatgatcttatggaacctgaacctgaaccaacttctgtggaagtcatggagaataactggaacgaggatggttctggtctcctgaatgatgatgatttcgttggtgctgattcatatttccttgatttgggagtgacaaatcctcagttagattttgttagtggtgatttgaaaaatgggtttgcacaaagtcttcaggtgaatacttctttaatgacttaccaggccaataataaccagttccagcagcaatcagggaagaaccaagctagtaactggccactccgtaacagctataccagacagataaacaatggatcatcgtgggtgcaggagctaaacaatgacggacttaccgttacccggtttggtgaggcgcctggtacaggtgattcatctgaattcctaaaccctgttccttctggtataagtacaactaatgaagatgacccgtcaaaagacgagtctagtaagtttgcttctagtgtatggactttcctggaatccattcctgcaaagccagcatatgcatcagagaatccatttgtgaagctgaaccttgttagaatgtcaaccagtggtggtcgtttcaggtttacttctaaaagcacaggtaataatgttgttgttatggatagtgactcagcagtgaagaggaacaagtctggaggaaacaacgataagaagaagaagaagaacaaaggtttcttttgcttatcgatcattggggctttatgtgctttgttttgggtgatcataggaacaatgggaggttcagggaggcctttgttatggtgagaaccgaaaaatccaagaggttaagagacataaaggcttggttttgtgtgaaccattagagagtcaagtcattgtaattattctcttggattattagattcagaagctgtttagtatcacagtttatgcttggaagttttctctggtattgttaaaaaagtaccaatagaaataagcaaaagaattttcttatcttttaggatatttgaacaaatgatgttacttaactagattattaacttggaggttgttgt

SEQ ID NO: 96229 - protein, 548 aa, Arabidopsis thaliana
  peptide (1)..(548): Ceres Seq. ID no. 12732515
  misc_feature (30)..(156): Pfam Name: No apical meristem (NAM) protein Pfam Description: No apical meristem (NAM) protein
  misc_feature (21)..(548): Homolog of NCBI NO: 18398627 NR Description: NAM protein, putative; protein id: At1g32870.1
  misc_feature (21)..(548): Homolog of NCBI NO: 14334572 NR Description: putative NAM protein [Arabidopsis thaliana]
  misc_feature (21)..(548): Homolog of NCBI NO: 25403164 NR Description: CDS protein F9L11.7 [imported] - Arabidopsis
  misc_feature (272)..(538): Homolog of NCBI NO: 21105742 NR Description: nam-like protein 7 [Petunia x hybrida]
  misc_feature (15)..(249): Homolog of NCBI NO: 21105742 NR Description: nam-like protein 7 [Petunia x hybrida]
  misc_feature (31)..(257): Homolog of NCBI NO: 21618244 NR Description: NAM-like protein [Arabidopsis thaliana]
  misc_feature (351)..(547): Homolog of NCBI NO: 21618244 NR Description: NAM-like protein [Arabidopsis thaliana]
  misc_feature (31)..(257): Homolog of NCBI NO: 18399166 NR Description: expressed protein; protein id: At1g34180.1,
  misc_feature (351)..(547): Homolog of NCBI NO: 18399166 NR Description: expressed protein; protein id: At1g34180.1,
  misc_feature (31)..(257): Homolog of NCBI NO: 25518168 NR Description: BTF3b factor protein F23M19.14 - Arabidopsis >gi|5091626|gb|AAD39614.1|AC007454_13 Similar to gb|X92204 NAM
TEKSKLFRVFFFVITREKKVMDLSVENGGLAPGFRFHPTDEELVVYYLKRKIRRKKLRVEAIGETDVYKFDPEELPEKALYKTRDRQWFFFSLRDRKHGSRSSRATERGYWKATGKDRVIHCDSRPVGEKKTLVFHRGRAPNGERTNWVMHEYTLHKEELKRCGGEDVKDAYVLYKIYKKSGSGPKNGEQYGAPFIEEEWAEDDDDDVDEPANQLVVSASVDNSLWGKGLNQSELDDNDIEELMSQVRDQSGPTLQQNGVSGLNSHVDTYNLENLEEDMYLEINDLMEPEPEPTSVEVMENNWNEDGSGLLNDDDFVGADSYFLDLGVTNPQLDFVSGDLKNGFAQSLQVNTSLMTYQANNNQFQQQSGKNQASNWPLRNSYTRQINNGSSWVQELNNDGLTVTRFGEAPGTGDSSEFLNPVPSGISTTNEDDPSKDESSKFASSVWTFLESIPAKPAYASENPFVKLNLVRMSTSGGRFRFTSKSTGNNVVVMDSDSAVKRNKSGGNNDKKKKKNKGFFCLSIIGALCALFWVIIGTMGGSGRPLLW

SEQ ID NO: 96230 - protein, 528 aa, Arabidopsis thaliana
  peptide (1)..(528): Ceres Seq. ID no. 12732516
  misc_feature (10)..(136): Pfam Name: No apical meristem (NAM) protein Pfam Description: No apical meristem (NAM) protein
  misc_feature (1)..(528): Homolog of NCBI NO: 18398627 NR Description: NAM protein, putative; protein id: At1g32870.1
  misc_feature (1)..(528): Homolog of NCBI NO: 14334572 NR Description: putative NAM protein [Arabidopsis thaliana]
  misc_feature (1)..(528): Homolog of NCBI NO: 25403164 NR Description: CDS protein F9L11.7 [imported] - Arabidopsis
  misc_feature (252)..(518): Homolog of NCBI NO: 21105742 NR Description: nam-like protein 7 [Petunia x hybrida]
  misc_feature (1)..(229): Homolog of NCBI NO: 21105742 NR Description: nam-like protein 7 [Petunia x hybrida]
  misc_feature (11)..(237): Homolog of NCBI NO: 21618244 NR Description: NAM-like protein [Arabidopsis thaliana]
  misc_feature (331)..(527): Homolog of NCBI NO: 21618244 NR Description: NAM-like protein [Arabidopsis thaliana]
  misc_feature (11)..(237): Homolog of NCBI NO: 18399166 NR Description: expressed protein; protein id: At1g34180.1,
  misc_feature (331)..(527): Homolog of NCBI NO: 18399166 NR Description: expressed protein; protein id: At1g34180.1,
  misc_feature (11)..(237): Homolog of NCBI NO: 25518168 NR Description: BTF3b factor protein F23M19.14 - Arabidopsis >gi|5091626|gb|AAD39614.1|AC007454_13 Similar to gb|X92204 NAM
MDLSVENGGLAPGFRFHPTDEELVVYYLKRKIRRKKLRVEAIGETDVYKFDPEELPEKALYKTRDRQWFFFSLRDRKHGSRSSRATERGYWKATGKDRVIHCDSRPVGEKKTLVFHRGRAPNGERTNWVMHEYTLHKEELKRCGGEDVKDAYVLYKIYKKSGSGPKNGEQYGAPFIEEEWAEDDDDDVDEPANQLVVSASVDNSLWGKGLNQSELDDNDIEELMSQVRDQSGPTLQQNGVSGLNSHVDTYNLENLEEDMYLEINDLMEPEPEPTSVEVMENNWNEDGSGLLNDDDFVGADSYFLDLGVTNPQLDFVSGDLKNGFAQSLQVNTSLMTYQANNNQFQQQSGKNQASNWPLRNSYTRQINNGSSWVQELNNDGLTVTRFGEAPGTGDSSEFLNPVPSGISTTNEDDPSKDESSKFASSVWTFLESIPAKPAYASENPFVKLNLVRMSTSGGRFRFTSKSTGNNVVVMDSDSAVKRNKSGGNNDKKKKKNKGFFCLSIIGALCALFWVIIGTMGGSGRPLLW

SEQ ID NO: 96231 - protein, 399 aa, Arabidopsis thaliana
  peptide (1)..(399): Ceres Seq. ID no. 12732517
  misc_feature (1)..(399): Homolog of NCBI NO: 18398627 NR Description: NAM protein, putative; protein id: At1g32870.1
  misc_feature (1)..(399): Homolog of NCBI NO: 14334572 NR Description: putative NAM protein [Arabidopsis thaliana]
  misc_feature (1)..(399): Homolog of NCBI NO: 25403164 NR Description: CDS protein F9L11.7 [imported] - Arabidopsis
  misc_feature (123)..(389): Homolog of NCBI NO: 21105742 NR Description: nam-like protein 7 [Petunia x hybrida]
  misc_feature (1)..(100): Homolog of NCBI NO: 21105742 NR Description: nam-like protein 7 [Petunia x hybrida]
  misc_feature (1)..(108): Homolog of NCBI NO: 21618244 NR Description: NAM-like protein [Arabidopsis thaliana]
  misc_feature (202)..(398): Homolog of NCBI NO: 21618244 NR Description: NAM-like protein [Arabidopsis thaliana]
  misc_feature (1)..(108): Homolog of NCBI NO: 18399166 NR Description: expressed protein; protein id: At1g34180.1,
  misc_feature (202)..(398): Homolog of NCBI NO: 18399166 NR Description: expressed protein; protein id: At1g34180.1,
  misc_feature (1)..(108): Homolog of NCBI NO: 25518168 NR Description: BTF3b factor protein F23M19.14 - Arabidopsis >gi|5091626|gb|AAD39614.1|AC007454_13 Similar to gb|X92204 NAM
MHEYTLHKEELKRCGGEDVKDAYVLYKIYKKSGSGPKNGEQYGAPFIEEEWAEDDDDDVDEPANQLVVSASVDNSLWGKGLNQSELDDNDIEELMSQVRDQSGPTLQQNGVSGLNSHVDTYNLENLEEDMYLEINDLMEPEPEPTSVEVMENNWNEDGSGLLNDDDFVGADSYFLDLGVTNPQLDFVSGDLKNGFAQSLQVNTSLMTYQANNNQFQQQSGKNQASNWPLRNSYTRQINNGSSWVQELNNDGLTVTRFGEAPGTGDSSEFLNPVPSGISTTNEDDPSKDESSKFASSVWTFLESIPAKPAYASENPFVKLNLVRMSTSGGRFRFTSKSTGNNVVVMDSDSAVKRNKSGGNNDKKKKKNKGFFCLSIIGALCALFWVIIGTMGGSGRPLLW

SEQ ID NO: 96232 - DNA, 1395 bp, Arabidopsis thaliana
  misc_feature (1)..(1395): Ceres Seq. ID no. 12732522
  misc_feature: MA Experiment ID: 20001557 Result: Up-regulated in Transcription
  misc_feature: MA Experiment 20001557 PARAMETER Experiment Name: At_Drought_Soil_Dry_P Parameter: Age (day) Value: 27
  misc_feature: MA Experiment 20001557 PARAMETER Experiment Name: At_Drought_Soil_Dry_P Parameter: Organism Value: A. thaliana
  misc_feature: MA Experiment 20001557 PARAMETER Experiment Name: At_Drought_Soil_Dry_P Parameter: Plant Line Value: WS
  misc_feature: MA Experiment 20001557 PARAMETER Experiment Name: At_Drought_Soil_Dry_P Parameter: Post Timepoint (hr) Value: 3
  misc_feature: MA Experiment 20001557 PARAMETER Experiment Name: At_Drought_Soil_Dry_P Parameter: Post-Treatment Value: Re-Water vs. No Drought
  misc_feature: MA Experiment 20001557 PARAMETER Experiment Name: At_Drought_Soil_Dry_P Parameter: Timepoint (day) Value: 13
  misc_feature: MA Experiment 20001557 PARAMETER Experiment Name: At_Drought_Soil_Dry_P Parameter: Treatment Value: Drought vs. No Drought
atggaagatgcagcggagcaagaacgtggtttccacgtgatcaccataaggaagcagatagtcacggctgctcttcccctccaagaccattggcttcctctttcaaacctcgacctcctcctccctcctgtccaaatcagcgtttgcttctgctacaagaaaccacgtcatttcttatccgtggctgaaaccctaaaagcgtctttggctgaggctctcgtctcctactatgcctttgccggtgaactcgtgaaaaactcctctggagaacccgagattctctgcaacaaccgcggcgtagacttccttgaggcggttgctgacgtggagctccgggagcttaacttgcatgatcctgatgaaagtatcgccaagcttgttccgaagaagaagcatggagttatagctattcaggtaactcaacttaaatgtgggagcatagtggtaggatgcacatttgatcatcgaattgcagatgctttctccatgaacatgttccttgtttcttgggctgagatctctagattcaatgcaccaatctcttctgtcccatcgttccggagatctatactaaacccgcgacgaccactgattatcgactcatctatagacaagatgtatatgcctgtcacgtctttgccccttccacaagaaacaacaaatgacctagataatatcctcacaagccgtatctattacatcaaagaaaatgcgttggaagatctccaaactctagcaagcggtagctcccccaagactggttatggtcagaggacgaaactagagtcgttcagcgcgtttctatggaaacttgtggcgaaacacacaggaagagatctagtttcgaacaagaactcgaaaatgggtattgttgtcgacggaaggagaagacttatggagaaagaagacaacacttactttggaaacgttctttccatcccatttggtggacagagtatcgatgacttgattgacaagccattgtcttgggtgaccaacgaagttcacagattcttggaagaagcagtgaccaaagaacatttcttaaacttgattgattgggttgagattcaccgcccgataccggcagtgtcgaggatctatagtacgggaaccgacgatggaccagcttttgtggtctcctccgggaggagttttccggtgaacaaggttgatttcggttggggcttaccggtttttgggtcataccatttcccatgggagggaagctccggatatgtgatgccgatgccgagtccggtggacgacgggaacggagattgggtggtttacttgcatcttacgaaaggacagttaaagttcattgaggaggaggcttcccatgtgcttaaacccatagacaattattatctcaagattaacaccatcaattaa

SEQ ID NO: 96233 - protein, 464 aa, Arabidopsis thaliana
  peptide (1)..(464): Ceres Seq. ID no. 12732523
  misc_feature (11)..(449): Pfam Name: Transferase family Pfam Description: Transferase family
  misc_feature (1)..(464): Homolog of NCBI NO: 15223333 NR Description: hypothetical protein; protein id: At1g32910.1
  misc_feature (1)..(460): Homolog of NCBI NO: 7487911 NR Description: hypothetical protein YUP8H12R.39 - Arabidopsis
  misc_feature (1)..(460): Homolog of NCBI NO: 15219263 NR Description: hypothetical protein; protein id: At1g78990.1
  misc_feature (7)..(460): Homolog of NCBI NO: 15237343 NR Description: putative protein; protein id: At5g16410.1
  misc_feature (12)..(458): Homolog of NCBI NO: 38567901 NR Description: OSJNBa0060N03.21 [Oryza sativa (japonica
  misc_feature (32)..(462): Homolog of NCBI NO: 15222365 NR Description: hypothetical protein; protein id: At1g31490.1
  misc_feature (26)..(444): Homolog of NCBI NO: 15239747 NR Description: anthranilate N-benzoyltransferase; protein id: supported by cDNA: 114130. [Arabidopsis thaliana]
  misc_feature (26)..(444): Homolog of NCBI NO: 21536883 NR Description: anthranilate N-benzoyltransferase [Arabidopsis
  misc_feature (23)..(444): Homolog of NCBI NO: 27475616 NR Description: hydroxycinnamoyl transferase [Nicotiana tabacum]
  misc_feature (259)..(458): Homolog of NCBI NO: 34903004 NR Description: unnamed protein product [Oryza sativa (japonica group)] >gi|34903012|ref|NP_912853.1| unnamed protein product
MEDAAEQERGFHVITIRKQIVTAALPLQDHWLPLSNLDLLLPPVQISVCFCYKKPRHFLSVAETLKASLAEALVSYYAFAGELVKNSSGEPEILCNNRGVDFLEAVADVELRELNLHDPDESIAKLVPKKKHGVIAIQVTQLKCGSIVVGCTFDHRIADAFSMNMFLVSWAEISRFNAPISSVPSFRRSILNPRRPLIIDSSIDKMYMPVTSLPLPQETTNDLDNILTSRIYYIKENALEDLQTLASGSSPKTGYGQRTKLESFSAFLWKLVAKHTGRDLVSNKNSKMGIVVDGRRRLMEKEDNTYFGNVLSIPFGGQSIDDLIDKPLSWVTNEVHRFLEEAVTKEHFLNLIDWVEIHRPIPAVSRIYSTGTDDGPAFVVSSGRSFPVNKVDFGWGLPVFGSYHFPWEGSSGYVMPMPSPVDDGNGDWVVYLHLTKGQLKFIEEEASHVLKPIDNYYLKINTIN

SEQ ID NO: 96234 - protein, 302 aa, Arabidopsis thaliana
  peptide (1)..(302): Ceres Seq. ID no. 12732524
  misc_feature (1)..(287): Pfam Name: Transferase family Pfam Description: Transferase family
  misc_feature (1)..(302): Homolog of NCBI NO: 15223333 NR Description: hypothetical protein; protein id: At1g32910.1
  misc_feature (1)..(298): Homolog of NCBI NO: 7487911 NR Description: hypothetical protein YUP8H12R.39 - Arabidopsis
  misc_feature (1)..(298): Homolog of NCBI NO: 15219263 NR Description: hypothetical protein; protein id: At1g78990.1
  misc_feature (1)..(298): Homolog of NCBI NO: 15237343 NR Description: putative protein; protein id: At5g16410.1
  misc_feature (1)..(296): Homolog of NCBI NO: 38567901 NR Description: OSJNBa0060N03.21 [Oryza sativa (japonica
  misc_feature (1)..(300): Homolog of NCBI NO: 15222365 NR Description: hypothetical protein; protein id: At1g31490.1
  misc_feature (1)..(282): Homolog of NCBI NO: 15239747 NR Description: anthranilate N-benzoyltransferase; protein id: supported by cDNA: 114130. [Arabidopsis thaliana]
  misc_feature (1)..(282): Homolog of NCBI NO: 21536883 NR Description: anthranilate N-benzoyltransferase [Arabidopsis
  misc_feature (1)..(282): Homolog of NCBI NO: 27475616 NR Description: hydroxycinnamoyl transferase [Nicotiana tabacum]
  misc_feature (97)..(296): Homolog of NCBI NO: 34903004 NR Description: unnamed protein product [Oryza sativa (japonica group)] >gi|34903012|ref|NP_912853.1| unnamed protein product
MNMFLVSWAEISRFNAPISSVPSFRRSILNPRRPLIIDSSIDKMYMPVTSLPLPQETTNDLDNILTSRIYYIKENALEDLQTLASGSSPKTGYGQRTKLESFSAFLWKLVAKHTGRDLVSNKNSKMGIVVDGRRRLMEKEDNTYFGNVLSIPFGGQSIDDLIDKPLSWVTNEVHRFLEEAVTKEHFLNLIDWVEIHRPIPAVSRIYSTGTDDGPAFVVSSGRSFPVNKVDFGWGLPVFGSYHFPWEGSSGYVMPMPSPVDDGNGDWVVYLHLTKGQLKFIEEEASHVLKPIDNYYLKINTIN

SEQ ID NO: 96235 - protein, 300 aa, Arabidopsis thaliana
  peptide (1)..(300): Ceres Seq. ID no. 12732525
  misc_feature (1)..(285): Pfam Name: Transferase family Pfam Description: Transferase family
  misc_feature (1)..(300): Homolog of NCBI NO: 15223333 NR Description: hypothetical protein; protein id: At1g32910.1
  misc_feature (1)..(296): Homolog of NCBI NO: 7487911 NR Description: hypothetical protein YUP8H12R.39 - Arabidopsis
  misc_feature (1)..(296): Homolog of NCBI NO: 15219263 NR Description: hypothetical protein; protein id: At1g78990.1
  misc_feature (1)..(296): Homolog of NCBI NO: 15237343 NR Description: putative protein; protein id: At5g16410.1
  misc_feature (1)..(294): Homolog of NCBI NO: 38567901 NR Description: OSJNBa0060N03.21 [Oryza sativa (japonica
  misc_feature (1)..(298): Homolog of NCBI NO: 15222365 NR Description: hypothetical protein; protein id: At1g31490.1
  misc_feature (1)..(280): Homolog of NCBI NO: 15239747 NR Description: anthranilate N-benzoyltransferase; protein id: supported by cDNA: 114130. [Arabidopsis thaliana]
  misc_feature (1)..(280): Homolog of NCBI NO: 21536883 NR Description: anthranilate N-benzoyltransferase [Arabidopsis
  misc_feature (1)..(280): Homolog of NCBI NO: 27475616 NR Description: hydroxycinnamoyl transferase [Nicotiana tabacum]
  misc_feature (95)..(294): Homolog of NCBI NO: 34903004 NR Description: unnamed protein product [Oryza sativa (japonica group)] >gi|34903012|ref|NP_912853.1| unnamed protein product
MFLVSWAEISRFNAPISSVPSFRRSILNPRRPLIIDSSIDKMYMPVTSLPLPQETTNDLDNILTSRIYYIKENALEDLQTLASGSSPKTGYGQRTKLESFSAFLWKLVAKHTGRDLVSNKNSKMGIVVDGRRRLMEKEDNTYFGNVLSIPFGGQSIDDLIDKPLSWVTNEVHRFLEEAVTKEHFLNLIDWVEIHRPIPAVSRIYSTGTDDGPAFVVSSGRSFPVNKVDFGWGLPVFGSYHFPWEGSSGYVMPMPSPVDDGNGDWVVYLHLTKGQLKFIEEEASHVLKPIDNYYLKINTIN

SEQ ID NO: 96236 - DNA, 1914 bp, Arabidopsis thaliana
  misc_feature (1)..(1914): Ceres Seq. ID no. 12732552
  misc_feature: MA Experiment ID: 20000180 Result: Down-regulated in Transcription
  misc_feature: MA Experiment 20000180 PARAMETER Experiment Name: At_Germinating_Seeds_P Parameter: Age (hr) Value: 24 vs. 0
  misc_feature: MA Experiment 20000180 PARAMETER Experiment Name: At_Germinating_Seeds_P Parameter: Tissue Value: Germinating Seeds
  misc_feature: MA Experiment ID: 20000184 Result: Down-regulated in Transcription
  misc_feature: MA Experiment 20000184 PARAMETER Experiment Name: At_Shoots__P Parameter: Age (day) Value: 7
  misc_feature: MA Experiment 20000184 PARAMETER Experiment Name: At_Shoots__P Parameter: Tissue Value: Shoots vs. Whole Plant
  misc_feature: MA Experiment ID: 20000213 Result: Down-regulated in Transcription
  misc_feature: MA Experiment 20000213 PARAMETER Experiment Name: At_4deg_Cold_P Parameter: Timepoint (hr) Value: 2
  misc_feature: MA Experiment ID: 20000235 Result: Down-regulated in Transcription
  misc_feature: MA Experiment 20000235 PARAMETER Experiment Name: At_Siliques_P Parameter: Age (day) Value: 21
  misc_feature: MA Experiment 20000235 PARAMETER Experiment Name: At_Siliques_P Parameter: Organism Value: A. thaliana
  misc_feature: MA Experiment 20000235 PARAMETER Experiment Name: At_Siliques_P Parameter: Plant Line Value: WS
  misc_feature: MA Experiment 20000235 PARAMETER Experiment Name: At_Siliques_P Parameter: Tissue Value: 5-10mm Siliques vs. Whole Plant
  misc_feature: MA Experiment ID: 20001247 Result: Up-regulated in Transcription
  misc_feature: MA Experiment 20001247 PARAMETER Experiment Name: At_Far-red-induction_P Parameter: Age (day) Value: 7
  misc_feature: MA Experiment 20001247 PARAMETER Experiment Name: At_Far-red-induction_P Parameter: Light Value: Far-red vs. White
  misc_feature: MA Experiment 20001247 PARAMETER Experiment Name: At_Far-red-induction_P Parameter: Organism Value: A. thaliana
  misc_feature: MA Experiment 20001247 PARAMETER Experiment Name: At_Far-red-induction_P Parameter: Plant Line Value: Columbia
  misc_feature: MA Experiment 20001247 PARAMETER Experiment Name: At_Far-red-induction_P Parameter: Timepoint (hr) Value: 1
  misc_feature: MA Experiment 20001247 PARAMETER Experiment Name: At_Far-red-induction_P Parameter: Tissue Value: Whole Plant
  misc_feature: MA Experiment ID: 20001248 Result: Up-regulated in Transcription
  misc_feature: MA Experiment 20001248 PARAMETER Experiment Name: At_Far-red-induction_P Parameter: Age (day) Value: 7
  misc_feature: MA Experiment 20001248 PARAMETER Experiment Name: At_Far-red-induction_P Parameter: Light Value: Far-red vs. White
  misc_feature: MA Experiment 20001248 PARAMETER Experiment Name: At_Far-red-induction_P Parameter: Organism Value: A. thaliana
  misc_feature: MA Experiment 20001248 PARAMETER Experiment Name: At_Far-red-induction_P Parameter: Plant Line Value: Columbia
  misc_feature: MA Experiment 20001248 PARAMETER Experiment Name: At_Far-red-induction_P Parameter: Timepoint (hr) Value: 4
  misc_feature: MA Experiment 20001248 PARAMETER Experiment Name: At_Far-red-induction_P Parameter: Tissue Value: Whole Plant
  misc_feature: MA Experiment ID: 20001450 Result: Up-regulated in Transcription
  misc_feature: MA Experiment 20001450 PARAMETER Experiment Name: At_Far-red-induction_P Parameter: Age (day) Value: 7
  misc_feature: MA Experiment 20001450 PARAMETER Experiment Name: At_Far-red-induction_P Parameter: Light Value: Far-red vs. White
  misc_feature: MA Experiment 20001450 PARAMETER Experiment Name: At_Far-red-induction_P Parameter: Organism Value: A. thaliana
  misc_feature: MA Experiment 20001450 PARAMETER Experiment Name: At_Far-red-induction_P Parameter: Plant Line Value: Columbia
  misc_feature: MA Experiment 20001450 PARAMETER Experiment Name: At_Far-red-induction_P Parameter: Timepoint (hr) Value: 8
  misc_feature: MA Experiment 20001450 PARAMETER Experiment Name: At_Far-red-induction_P Parameter: Tissue Value: Whole Plant
  misc_feature: MA Experiment ID: 20001911 Result: Up-regulated in Transcription
  misc_feature: MA Experiment 20001911 PARAMETER Experiment Name: At_Drought_Reproduction_P Parameter: Age (day) Value: 40
  misc_feature: MA Experiment 20001911 PARAMETER Experiment Name: At_Drought_Reproduction_P Parameter: Organism Value: A. thaliana
  misc_feature: MA Experiment 20001911 PARAMETER Experiment Name: At_Drought_Reproduction_P Parameter: Plant Line Value: WS
  misc_feature: MA Experiment 20001911 PARAMETER Experiment Name: At_Drought_Reproduction_P Parameter: Timepoint (day) Value: 10
  misc_feature: MA Experiment 20001911 PARAMETER Experiment Name: At_Drought_Reproduction_P Parameter: Tissue Value: Flowers
  misc_feature: MA Experiment 20001911 PARAMETER Experiment Name: At_Drought_Reproduction_P Parameter: Treatment Value: Drought vs. No Drought
atgacgacggagcaagctttgttgtctatggaagctttacctttaggtttcagattcagaccaacggatgaagaactcatcaatcattacctaaggttaaaaatcaacggccgtgatttagaggttagagtcatccctgagatcgatgtttgcaagtgggaaccatgggacttacctgggctatcggtgataaagacagatgatcaagaatggttctttttttgtcctcgtgatcgaaagtatccgagtggtcatcgttctaatagagctactgatattggttactggaaagctactgggaaagatcgaactattaagtctaagaagatgattattggtatgaagaagactcttgttttctatcgtggaagagctcctagaggagagcgtactaattggattatgcatgagtatcgtgctacagacaaggaactagatggtactggacctggtcagaatccgtatgttttgtgtcgcttgttccacaagcctagtgatagttgtgatcctgcacactgtgaggaaatagagaaagttaattttactccaaccaccaccactagatgctctcctgatgacacatcttctgaaatggtccaagaaacagctacatctggtgtacatgctctagatagatcagatgacactgagaggtgtttaagtgacaagggcaataatgatgtgaaacctgatgtttcagtgataaacaatacttctgtcaatcacgctgaaacttctcgtgccaaagaccgtaatttgggcaagacgttagtagaggaaaatccacttctaagggacgttccaactcttcatggacccatcttgagtgagaaatcatattatccaggacagtcaagcatcggttttgctacatctcacatggattctatgtattctagtgattttggaaactgtgattatgggctacattttcaagatggtgcctctgaacaagatgcatctttaacagatgtcttggatgaagtattccataaccataatgaatcctctaatgacaggaaagactttgtacttccgaatatgatgcattggcctggtaatacaagactgttgtctactgagtacccatttctcaaagattctgttgcttttgttgacggcagtgctgaagtttccggctcacagcaatttgttcctgacattttagcttctagatgggtcagtgaacagaacgttgatagcaaggaggcagtagagattctatcttcaaccgggtcctctcggaccttgacgccacttcataacaacgtttttgggcaatatgcttcatcgtcttacgcagctatcgatccatttaactataatgtcaatcagcctgaacagtcatcctttgagcaaagccatgttgaccgcaacattagtcccagtaacatttttgagttcaaggctaggtctcgagagaatcagagagatctggactctgttgtggaccaaggcactgctcctagaagaattcggctgcagatcgaacagccattgacgccagttaccaacaagaaagagagagatgcggacaactatgaagaagaagatgaagtacaatctgccatgtccaaggtcgtagaggaagaaccggctaatttaagtgctcaggggactgctcagaggagaatccgcctgcagacgagattgaggaagcctctcataaccctaaacaatacaaaaagaaactcaaatggcagagaaggagaagcaagccataggaaggaaaaagaagatatatcatcatcatcatcatggcagaaacagaagaagagcttggtgcagtttagtagtgtggtgataatagtggcggtgatagttgttttagtagaaatatggaaagagtcaagagatgcgaaatgtagcttcttgtttcatcaattagattccttcaaaggcatgtttacttga

SEQ ID NO: 96237 - protein, 637 aa, Arabidopsis thaliana
  peptide (1)..(637): Ceres Seq. ID no. 12732553
  misc_feature (13)..(141): Pfam Name: No apical meristem (NAM) protein Pfam Description: No apical meristem (NAM) protein
  misc_feature (1)..(576): Homolog of NCBI NO: 6910587 NR Description: CDS [Arabidopsis thaliana]
  misc_feature (8)..(215): Homolog of NCBI NO: 7486659 NR Description: hypothetical protein F8D20.90 - Arabidopsis
  misc_feature (294)..(398): Homolog of NCBI NO: 7486659 NR Description: hypothetical protein F8D20.90 - Arabidopsis
  misc_feature (10)..(541): Homolog of NCBI NO: 21358787 NR Description: nam-like protein 1 [Petunia x hybrida]
  misc_feature (1)..(313): Homolog of NCBI NO: 30689531 NR Description: No apical meristem (NAM) protein family thaliana] >gi|9408601|gb|AAF87300.1|AF281062_1 TIP [Arabidopsis
  misc_feature (7)..(163): Homolog of NCBI NO: 15229161 NR Description: NAC2-like protein; protein id: At3g49530.1,
  misc_feature (12)..(237): Homolog of NCBI NO: 15218843 NR Description: jasmonic acid, putative; protein id: At1g65910.1
  misc_feature (12)..(198): Homolog of NCBI NO: 15237939 NR Description: NAM (no apical meristem)-like protein; protein At5g17260.1 [Arabidopsis thaliana] >gi|10177071|dbj|BAB10513.1|
  misc_feature (12)..(163): Homolog of NCBI NO: 34902214 NR Description: Hypothetical protein [Oryza sativa (japonica group)] >gi|27452910|gb|AAO15294.1| Hypothetical protein [Oryza
  misc_feature (62)..(536): Homolog of NCBI NO: 34905174 NR Description: P0498E12.3 [Oryza sativa (japonica
MTTEQALLSMEALPLGFRFRPTDEELINHYLRLKINGRDLEVRVIPEIDVCKWEPWDLPGLSVIKTDDQEWFFFCPRDRKYPSGHRSNRATDIGYWKATGKDRTIKSKKMIIGMKKTLVFYRGRAPRGERTNWIMHEYRATDKELDGTGPGQNPYVLCRLFHKPSDSCDPAHCEEIEKVNFTPTTTTRCSPDDTSSEMVQETATSGVHALDRSDDTERCLSDKGNNDVKPDVSVINNTSVNHAETSRAKDRNLGKTLVEENPLLRDVPTLHGPILSEKSYYPGQSSIGFATSHMDSMYSSDFGNCDYGLHFQDGASEQDASLTDVLDEVFHNHNESSNDRKDFVLPNMMHWPGNTRLLSTEYPFLKDSVAFVDGSAEVSGSQQFVPDILASRWVSEQNVDSKEAVEILSSTGSSRTLTPLHNNVFGQYASSSYAAIDPFNYNVNQPEQSSFEQSHVDRNISPSNIFEFKARSRENQRDLDSVVDQGTAPRRIRLQIEQPLTPVTNKKERDADNYEEEDEVQSAMSKVVEEEPANLSAQGTAQRRIRLQTRLRKPLITLNNTKRNSNGREGEASHRKEKEDISSSSSWQKQKKSLVQFSSVVIIVAVIVVLVEIWKESRDAKCSFLFHQLDSFKGMFT

SEQ ID NO: 96238 - protein, 628 aa, Arabidopsis thaliana
  peptide (1)..(628): Ceres Seq. ID no. 12732554
  misc_feature (4)..(132): Pfam Name: No apical meristem (NAM) protein Pfam Description: No apical meristem (NAM) protein
  misc_feature (1)..(567): Homolog of NCBI NO: 6910587 NR Description: CDS [Arabidopsis thaliana]
  misc_feature (1)..(206): Homolog of NCBI NO: 7486659 NR Description: hypothetical protein F8D20.90 - Arabidopsis
  misc_feature (285)..(389): Homolog of NCBI NO: 7486659 NR Description: hypothetical protein F8D20.90 - Arabidopsis
  misc_feature (1)..(532): Homolog of NCBI NO: 21358787 NR Description: nam-like protein 1 [Petunia x hybrida]
  misc_feature (1)..(304): Homolog of NCBI NO: 30689531 NR Description: No apical meristem (NAM) protein family thaliana] >gi|9408601|gb|AAF87300.1|AF281062_1 TIP [Arabidopsis
  misc_feature (1)..(154): Homolog of NCBI NO: 15229161 NR Description: NAC2-like protein; protein id: At3g49530.1,
  misc_feature (3)..(228): Homolog of NCBI NO: 15218843 NR Description: jasmonic acid, putative; protein id: At1g65910.1
  misc_feature (3)..(189): Homolog of NCBI NO: 15237939 NR Description: NAM (no apical meristem)-like protein; protein At5g17260.1 [Arabidopsis thaliana] >gi|10177071|dbj|BAB10513.1|
  misc_feature (3)..(154): Homolog of NCBI NO: 34902214 NR Description: Hypothetical protein [Oryza sativa (japonica group)] >gi|27452910|gb|AAO15294.1| Hypothetical protein [Oryza
  misc_feature (53)..(527): Homolog of NCBI NO: 34905174 NR Description: P0498E12.3 [Oryza sativa (japonica
MEALPLGFRFRPTDEELINHYLRLKINGRDLEVRVIPEIDVCKWEPWDLPGLSVIKTDDQEWFFFCPRDRKYPSGHRSNRATDIGYWKATGKDRTIKSKKMIIGMKKTLVFYRGRAPRGERTNWIMHEYRATDKELDGTGPGQNPYVLCRLFHKPSDSCDPAHCEEIEKVNFTPTTTTRCSPDDTSSEMVQETATSGVHALDRSDDTERCLSDKGNNDVKPDVSVINNTSVNHAETSRAKDRNLGKTLVEENPLLRDVPTLHGPILSEKSYYPGQSSIGFATSHMDSMYSSDFGNCDYGLHFQDGASEQDASLTDVLDEVFHNHNESSNDRKDFVLPNMMHWPGNTRLLSTEYPFLKDSVAFVDGSAEVSGSQQFVPDILASRWVSEQNVDSKEAVEILSSTGSSRTLTPLHNNVFGQYASSSYAAIDPFNYNVNQPEQSSFEQSHVDRNISPSNIFEFKARSRENQRDLDSVVDQGTAPRRIRLQIEQPLTPVTNKKERDADNYEEEDEVQSAMSKVVEEEPANLSAQGTAQRRIRLQTRLRKPLITLNNTKRNSNGREGEASHRKEKEDISSSSSWQKQKKSLVQFSSVVIIVAVIVVLVEIWKESRDAKCSFLFHQLDSFKGMFT

SEQ ID NO: 96239 - protein, 528 aa, Arabidopsis thaliana
  peptide (1)..(528): Ceres Seq. ID no. 12732555
  misc_feature (1)..(467): Homolog of NCBI NO: 6910587 NR Description: CDS [Arabidopsis thaliana]
  misc_feature (1)..(106): Homolog of NCBI NO: 7486659 NR Description: hypothetical protein F8D20.90 - Arabidopsis
  misc_feature (185)..(289): Homolog of NCBI NO: 7486659 NR Description: hypothetical protein F8D20.90 - Arabidopsis
  misc_feature (1)..(432): Homolog of NCBI NO: 21358787 NR Description: nam-like protein 1 [Petunia x hybrida]
  misc_feature (1)..(204): Homolog of NCBI NO: 30689531 NR Description: No apical meristem (NAM) protein family thaliana] >gi|9408601|gb|AAF87300.1|AF281062_1 TIP [Arabidopsis
  misc_feature (1)..(54): Homolog of NCBI NO: 15229161 NR Description: NAC2-like protein; protein id: At3g49530.1,
  misc_feature (1)..(128): Homolog of NCBI NO: 15218843 NR Description: jasmonic acid, putative; protein id: At1g65910.1
  misc_feature (1)..(89): Homolog of NCBI NO: 15237939 NR Description: NAM (no apical meristem)-like protein; protein At5g17260.1 [Arabidopsis thaliana] >gi|10177071|dbj|BAB10513.1|
  misc_feature (1)..(54): Homolog of NCBI NO: 34902214 NR Description: Hypothetical protein [Oryza sativa (japonica group)] >gi|27452910|gb|AAO15294.1| Hypothetical protein [Oryza
  misc_feature (1)..(427): Homolog of NCBI NO: 34905174 NR Description: P0498E12.3 [Oryza sativa (japonica
MIIGMKKTLVFYRGRAPRGERTNWIMHEYRATDKELDGTGPGQNPYVLCRLFHKPSDSCDPAHCEEIEKVNFTPTTTTRCSPDDTSSEMVQETATSGVHALDRSDDTERCLSDKGNNDVKPDVSVINNTSVNHAETSRAKDRNLGKTLVEENPLLRDVPTLHGPILSEKSYYPGQSSIGFATSHMDSMYSSDFGNCDYGLHFQDGASEQDASLTDVLDEVFHNHNESSNDRKDFVLPNMMHWPGNTRLLSTEYPFLKDSVAFVDGSAEVSGSQQFVPDILASRWVSEQNVDSKEAVEILSSTGSSRTLTPLHNNVFGQYASSSYAAIDPFNYNVNQPEQSSFEQSHVDRNISPSNIFEFKARSRENQRDLDSVVDQGTAPRRIRLQIEQPLTPVTNKKERDADNYEEEDEVQSAMSKVVEEEPANLSAQGTAQRRIRLQTRLRKPLITLNNTKRNSNGREGEASHRKEKEDISSSSSWQKQKKSLVQFSSVVIIVAVIVVLVEIWKESRDAKCSFLFHQLDSFKGMFT

SEQ ID NO: 96240 - DNA, 1631 bp, Arabidopsis thaliana
  misc_feature (1)..(1631): Ceres Seq. ID no. 12732556
  misc_feature: MA Experiment ID: 20000185 Result: Up-regulated in Transcription
  misc_feature: MA Experiment 20000185 PARAMETER Experiment Name: At_Roots__P Parameter: Age (day) Value: 7 vs. 21
  misc_feature: MA Experiment 20000185 PARAMETER Experiment Name: At_Roots__P Parameter: Organism Value: A. thaliana
  misc_feature: MA Experiment 20000185 PARAMETER Experiment Name: At_Roots__P Parameter: Tissue Value: Roots vs. Whole Plant
  misc_feature: MA Experiment ID: 20000227 Result: Down-regulated in Transcription
  misc_feature: MA Experiment 20000227 PARAMETER Experiment Name: At_Root-Tips-vs-Tops_P Parameter: Tissue Value: Root Tips vs. Root Tops
  misc_feature: MA Experiment ID: 20000439 Result: Up-regulated in Transcription
  misc_feature: MA Experiment 20000439 PARAMETER Experiment Name: At_Roots__P Parameter: Age (day) Value: 14 vs. 21
  misc_feature: MA Experiment 20000439 PARAMETER Experiment Name: At_Roots__P Parameter: Organism Value: A. thaliana
  misc_feature: MA Experiment 20000439 PARAMETER Experiment Name: At_Roots__P Parameter: Tissue Value: Roots vs. Whole Plant
  misc_feature: MA Experiment ID: 20000495 Result: Up-regulated in Transcription
  misc_feature: MA Experiment 20000495 PARAMETER Experiment Name: At_Guard_Cells_P Parameter: Harvest Date Value: 8/2/2002
  misc_feature: MA Experiment 20000495 PARAMETER Experiment Name: At_Guard_Cells_P Parameter: Organism Value: A. thaliana
  misc_feature: MA Experiment 20000495 PARAMETER Experiment Name: At_Guard_Cells_P Parameter: Tissue Value: Guard Cells vs. Leaves
  misc_feature: MA Experiment ID: 20000496 Result: Up-regulated in Transcription
  misc_feature: MA Experiment 20000496 PARAMETER Experiment Name: At_Guard_Cells_P Parameter: Harvest Date Value: 7/19/2002
  misc_feature: MA Experiment 20000496 PARAMETER Experiment Name: At_Guard_Cells_P Parameter: Organism Value: Canola
  misc_feature: MA Experiment 20000496 PARAMETER Experiment Name: At_Guard_Cells_P Parameter: Tissue Value: Guard Cells vs. Leaves
  misc_feature: MA Experiment ID: 20000573 Result: Down-regulated in Transcription
  misc_feature: MA Experiment 20000573 PARAMETER Experiment Name: At_100uM_ABA_Mutants__P Parameter: Organism Value: A. thaliana
  misc_feature: MA Experiment 20000573 PARAMETER Experiment Name: At_100uM_ABA_Mutants__P Parameter: Plant Line Value: CS22 vs. Ler wt
  misc_feature: MA Experiment 20000573 PARAMETER Experiment Name: At_100uM_ABA_Mutants__P Parameter: Timepoint (hr) Value: N/A
  misc_feature: MA Experiment 20000573 PARAMETER Experiment Name: At_100uM_ABA_Mutants__P Parameter: Tissue Value: Whole Plant
  misc_feature: MA Experiment 20000573 PARAMETER Experiment Name: At_100uM_ABA_Mutants__P Parameter: Treatment Value: None
gctccatgccttctctactctctcttcattctctcctaagctatggcgagaagagaaggagaagtgacggagacccttctgaaaaagtcgacggagaatcgcggagaagatcgggatgggttagggatgaaggagaaggtttggagggaatctaaaaagctatgggttgtggctgggccggcgatctttacgaggttctccacgtccggactatctttgataagtcaagctttcattggccatcttggctctaccgagttggccgcttactccatcactctcaccgttctcctccgttttagtaatggtatcttgttaggcatggctagtgcgctagaaacactatgtggtcaagcctatggagcaaaacaatatcatatgcttgggatctacctccaaagatcatggatcgtcctcacaggctgtaccatttgccttatgcccatctacatctttgcaggccctattctcttggctttaggtcaagaggaacgccttgttcgtgtggctcggatcatagctctatgggtcataggcatcaacatctcctttgtgccttccttcacttgccaaatgttcctccaagctcagagtaagaacaagatcatcgcctacgttgctgctgtttcgttaggagtccatgtcttcttgtcgtggcttctagtggttcattttgatttcgggatcgctggtgccatgacctcttcgctcgtagcacattggttgcctaacattgcgcaggttttatttgtcacatgcggtggatgtacggaaacgtggagaggattctcttggttggctttcaaggatctttggcccgtttttaaactatctgtatcttccggtggcatgatttgcttggagctatggtacaactcgatcttgattctgctcacgggaaacttgaaaaacgctgaggttgctcttaacgcacttgcaatctgcatcaatataaatgcactggagatgatggtagccttcggcttcatggcagcagcaagtgtaagagtttcaaacgagatcgggagtgggaattctaatggagccaaatttgcaacaatggttgtggtttcgacatcactttcgataggaatcatcttcttctttatcttcctgtttttaagagaaagggtttcatacatttttacaacaagtgaagctgttgccacacaagtagccgatctttctccactcttggccttctccattctcttgaacagtattcaaccagttctctctggagttgctgttggagcgggatggcagaaatatgttacggtcgttaaccttgcttgctattaccttgttggaattccttccggtctttttcttggctatgtcgttggtttacaagtcaaaggtgtttggttaggaatgattttcggaatcttcgttcagacttgcgtgcttacagtaatgactatgagaacagactgggatcaacaggtgtcttcgtcgttgaaacgtttgaaccgttgggttgaaccagaatccccaagtcgaaaccaaactttacaaaacgaatgatggtgaagattgaagtaaaacttgagtttgtattcgaattttgaatttctacttcaccctcgaatgtacacacttgcgtaaaatgtaaatgtgaaacaagtggt

SEQ ID NO: 96241 - protein, 494 aa, Arabidopsis thaliana
  peptide (1)..(494): Ceres Seq. ID no. 12732557
  misc_feature (1)..(494): Homolog of NCBI NO: 22329916 NR Description: hypothetical protein; protein id: At1g33080.1, by cDNA: gi_19423993 [Arabidopsis thaliana] unknown protein [Arabidopsis thaliana]
  misc_feature (1)..(494): Homolog of NCBI NO: 15223402 NR Description: unknown protein; protein id: At1g33110.1, by cDNA: gi_17065359 [Arabidopsis thaliana] Unknown protein [Arabidopsis thaliana]
  misc_feature (1)..(324): Homolog of NCBI NO: 6910588 NR Description: CDS [Arabidopsis thaliana]
  misc_feature (329)..(439): Homolog of NCBI NO: 6910588 NR Description: CDS [Arabidopsis thaliana]
  misc_feature (468)..(494): Homolog of NCBI NO: 6910588 NR Description: CDS [Arabidopsis thaliana]
  misc_feature (1)..(494): Homolog of NCBI NO: 15223391 NR Description: hypothetical protein; protein id: At1g33090.1
  misc_feature (1)..(494): Homolog of NCBI NO: 15223394 NR Description: unknown protein; protein id: At1g33100.1
  misc_feature (1)..(439): Homolog of NCBI NO: 6910584 NR Description: CDS [Arabidopsis thaliana]
  misc_feature (145)..(473): Homolog of NCBI NO: 25518156 NR Description: T9L6.1 protein - Arabidopsis thaliana
  misc_feature (1)..(90): Homolog of NCBI NO: 25518156 NR Description: T9L6.1 protein - Arabidopsis thaliana
MARREGEVTETLLKKSTENRGEDRDGLGMKEKVWRESKKLWVVAGPAIFTRFSTSGLSLISQAFIGHLGSTELAAYSITLTVLLRFSNGILLGMASALETLCGQAYGAKQYHMLGIYLQRSWIVLTGCTICLMPIYIFAGPILLALGQEERLVRVARIIALWVIGINISFVPSFTCQMFLQAQSKNKIIAYVAAVSLGVHVFLSWLLVVHFDFGIAGAMTSSLVAHWLPNIAQVLFVTCGGCTETWRGFSWLAFKDLWPVFKLSVSSGGMICLELWYNSILILLTGNLKNAEVALNALAICININALEMMVAFGFMAAASVRVSNEIGSGNSNGAKFATMVVVSTSLSIGIIFFFIFLFLRERVSYIFTTSEAVATQVADLSPLLAFSILLNSIQPVLSGVAVGAGWQKYVTVVNLACYYLVGIPSGLFLGYVVGLQVKGVWLGMIFGIFVQTCVLTVMTMRTDWDQQVSSSLKRLNRWVEPESPSRNQTLQNE

SEQ ID NO: 96242 - protein, 466 aa, Arabidopsis thaliana
  peptide (1)..(466): Ceres Seq. ID no. 12732558
  misc_feature (1)..(466): Homolog of NCBI NO: 22329916 NR Description: hypothetical protein; protein id: At1g33080.1, by cDNA: gi_19423993 [Arabidopsis thaliana] unknown protein [Arabidopsis thaliana]
  misc_feature (1)..(466): Homolog of NCBI NO: 15223402 NR Description: unknown protein; protein id: At1g33110.1, by cDNA: gi_17065359 [Arabidopsis thaliana] Unknown protein [Arabidopsis thaliana]
  misc_feature (1)..(296): Homolog of NCBI NO: 6910588 NR Description: CDS [Arabidopsis thaliana]
  misc_feature (301)..(411): Homolog of NCBI NO: 6910588 NR Description: CDS [Arabidopsis thaliana]
  misc_feature (440)..(466): Homolog of NCBI NO: 6910588 NR Description: CDS [Arabidopsis thaliana]
  misc_feature (1)..(466): Homolog of NCBI NO: 15223391 NR Description: hypothetical protein; protein id: At1g33090.1
  misc_feature (1)..(466): Homolog of NCBI NO: 15223394 NR Description: unknown protein; protein id: At1g33100.1
  misc_feature (1)..(411): Homolog of NCBI NO: 6910584 NR Description: CDS [Arabidopsis thaliana]
  misc_feature (117)..(445): Homolog of NCBI NO: 25518156 NR Description: T9L6.1 protein - Arabidopsis thaliana
  misc_feature (1)..(62): Homolog of NCBI NO: 25518156 NR Description: T9L6.1 protein - Arabidopsis thaliana
MKEKVWRESKKLWVVAGPAIFTRFSTSGLSLISQAFIGHLGSTELAAYSITLTVLLRFSNGILLGMASALETLCGQAYGAKQYHMLGIYLQRSWIVLTGCTICLMPIYIFAGPILLALGQEERLVRVARIIALWVIGINISFVPSFTCQMFLQAQSKNKIIAYVAAVSLGVHVFLSWLLVVHFDFGIAGAMTSSLVAHWLPNIAQVLFVTCGGCTETWRGFSWLAFKDLWPVFKLSVSSGGMICLELWYNSILILLTGNLKNAEVALNALAICININALEMMVAFGFMAAASVRVSNEIGSGNSNGAKFATMVVVSTSLSIGIIFFFIFLFLRERVSYIFTTSEAVATQVADLSPLLAFSILLNSIQPVLSGVAVGAGWQKYVTVVNLACYYLVGIPSGLFLGYVVGLQVKGVWLGMIFGIFVQTCVLTVMTMRTDWDQQVSSSLKRLNRWVEPESPSRNQTLQNE

SEQ ID NO: 96243 - protein, 401 aa, Arabidopsis thaliana
  peptide (1)..(401): Ceres Seq. ID no. 12732559
  misc_feature (1)..(401): Homolog of NCBI NO: 22329916 NR Description: hypothetical protein; protein id: At1g33080.1, by cDNA: gi_19423993 [Arabidopsis thaliana] unknown protein [Arabidopsis thaliana]
  misc_feature (1)..(401): Homolog of NCBI NO: 15223402 NR Description: unknown protein; protein id: At1g33110.1, by cDNA: gi_17065359 [Arabidopsis thaliana] Unknown protein [Arabidopsis thaliana]
  misc_feature (1)..(231): Homolog of NCBI NO: 6910588 NR Description: CDS [Arabidopsis thaliana]
  misc_feature (236)..(346): Homolog of NCBI NO: 6910588 NR Description: CDS [Arabidopsis thaliana]
  misc_feature (375)..(401): Homolog of NCBI NO: 6910588 NR Description: CDS [Arabidopsis thaliana]
  misc_feature (1)..(401): Homolog of NCBI NO: 15223391 NR Description: hypothetical protein; protein id: At1g33090.1
  misc_feature (1)..(401): Homolog of NCBI NO: 15223394 NR Description: unknown protein; protein id: At1g33100.1
  misc_feature (1)..(346): Homolog of NCBI NO: 6910584 NR Description: CDS [Arabidopsis thaliana]
  misc_feature (52)..(380): Homolog of NCBI NO: 25518156 NR Description: T9L6.1 protein - Arabidopsis thaliana
  misc_feature (1)..(386): Homolog of NCBI NO: 15238439 NR Description: putative protein; protein id: At5g65380.1, by cDNA: gi_14030730 [Arabidopsis thaliana] emb|CAB89401.1~gene_id:MNA5.11~strong similarity to unknown
MASALETLCGQAYGAKQYHMLGIYLQRSWIVLTGCTICLMPIYIFAGPILLALGQEERLVRVARIIALWVIGINISFVPSFTCQMFLQAQSKNKIIAYVAAVSLGVHVFLSWLLVVHFDFGIAGAMTSSLVAHWLPNIAQVLFVTCGGCTETWRGFSWLAFKDLWPVFKLSVSSGGMICLELWYNSILILLTGNLKNAEVALNALAICININALEMMVAFGFMAAASVRVSNEIGSGNSNGAKFATMVVVSTSLSIGIIFFFIFLFLRERVSYIFTTSEAVATQVADLSPLLAFSILLNSIQPVLSGVAVGAGWQKYVTVVNLACYYLVGIPSGLFLGYVVGLQVKGVWLGMIFGIFVQTCVLTVMTMRTDWDQQVSSSLKRLNRWVEPESPSRNQTLQNE

SEQ ID NO: 96244 - DNA, 1712 bp, Arabidopsis thaliana
  misc_feature (1)..(1712): Ceres Seq. ID no. 12732560
  misc_feature: MA Experiment ID: 20000179 Result: Down-regulated in Transcription
  misc_feature: MA Experiment 20000179 PARAMETER Experiment Name: At_Germinating_Seeds_P Parameter: Age (hr) Value: 6 vs. 0
  misc_feature: MA Experiment 20000179 PARAMETER Experiment Name: At_Germinating_Seeds_P Parameter: Tissue Value: Germinating Seeds
  misc_feature: MA Experiment ID: 20000180 Result: Down-regulated in Transcription
  misc_feature: MA Experiment 20000180 PARAMETER Experiment Name: At_Germinating_Seeds_P Parameter: Age (hr) Value: 24 vs. 0
  misc_feature: MA Experiment 20000180 PARAMETER Experiment Name: At_Germinating_Seeds_P Parameter: Tissue Value: Germinating Seeds
  misc_feature: MA Experiment ID: 20000182 Result: Up-regulated in Transcription
  misc_feature: MA Experiment 20000182 PARAMETER Experiment Name: At_2mM_SA_P Parameter: Age (day) Value: 14
  misc_feature: MA Experiment 20000182 PARAMETER Experiment Name: At_2mM_SA_P Parameter: Organism Value: A. thaliana
  misc_feature: MA Experiment 20000182 PARAMETER Experiment Name: At_2mM_SA_P Parameter: Plant Line Value: WS
  misc_feature: MA Experiment 20000182 PARAMETER Experiment Name: At_2mM_SA_P Parameter: Timepoint (hr) Value: 6
  misc_feature: MA Experiment 20000182 PARAMETER Experiment Name: At_2mM_SA_P Parameter: Tissue Value: Aerial
  misc_feature: MA Experiment 20000182 PARAMETER Experiment Name: At_2mM_SA_P Parameter: Treatment Value: 2mM SA vs. No Treatment
  misc_feature: MA Experiment ID: 20000234 Result: Down-regulated in Transcription
  misc_feature: MA Experiment 20000234 PARAMETER Experiment Name: At_Siliques_P Parameter: Age (day) Value: 21
  misc_feature: MA Experiment 20000234 PARAMETER Experiment Name: At_Siliques_P Parameter: Organism Value: A. thaliana
  misc_feature: MA Experiment 20000234 PARAMETER Experiment Name: At_Siliques_P Parameter: Plant Line Value: WS
  misc_feature: MA Experiment 20000234 PARAMETER Experiment Name: At_Siliques_P Parameter: Tissue Value: Less Than 5mm Siliques vs. Whole Plant
  misc_feature: MA Experiment ID: 20000235 Result: Down-regulated in Transcription
  misc_feature: MA Experiment 20000235 PARAMETER Experiment Name: At_Siliques_P Parameter: Age (day) Value: 21
  misc_feature: MA Experiment 20000235 PARAMETER Experiment Name: At_Siliques_P Parameter: Organism Value: A. thaliana
  misc_feature: MA Experiment 20000235 PARAMETER Experiment Name: At_Siliques_P Parameter: Plant Line Value: WS
  misc_feature: MA Experiment 20000235 PARAMETER Experiment Name: At_Siliques_P Parameter: Tissue Value: 5-10mm Siliques vs. Whole Plant
  misc_feature: MA Experiment ID: 20000265 Result: Down-regulated in Transcription
  misc_feature: MA Experiment 20000265 PARAMETER Experiment Name: At_Open_Flower_P Parameter: Age (day) Value: 21
  misc_feature: MA Experiment 20000265 PARAMETER Experiment Name: At_Open_Flower_P Parameter: Plant Line Value: WS
  misc_feature: MA Experiment 20000265 PARAMETER Experiment Name: At_Open_Flower_P Parameter: Tissue Value: Closed Flower vs. Whole Plant
  misc_feature: MA Experiment ID: 20000286 Result: Down-regulated in Transcription
  misc_feature: MA Experiment 20000286 PARAMETER Experiment Name: At_Open_Flower_P Parameter: Age (day) Value: 21
  misc_feature: MA Experiment 20000286 PARAMETER Experiment Name: At_Open_Flower_P Parameter: Plant Line Value: WS
  misc_feature: MA Experiment 20000286 PARAMETER Experiment Name: At_Open_Flower_P Parameter: Tissue Value: Half Open vs. Whole Plant
  misc_feature: MA Experiment ID: 20000438 Result: Up-regulated in Transcription
  misc_feature: MA Experiment 20000438 PARAMETER Experiment Name: At_Shoots__P Parameter: Age (day) Value: 14
  misc_feature: MA Experiment 20000438 PARAMETER Experiment Name: At_Shoots__P Parameter: Tissue Value: Shoots vs. Whole Plant
  misc_feature: MA Experiment ID: 20000439 Result: Up-regulated in Transcription
  misc_feature: MA Experiment 20000439 PARAMETER Experiment Name: At_Roots__P Parameter: Age (day) Value: 14 vs. 21
  misc_feature: MA Experiment 20000439 PARAMETER Experiment Name: At_Roots__P Parameter: Organism Value: A. thaliana
  misc_feature: MA Experiment 20000439 PARAMETER Experiment Name: At_Roots__P Parameter: Tissue Value: Roots vs. Whole Plant
  misc_feature: MA Experiment ID: 20000441 Result: Up-regulated in Transcription
  misc_feature: MA Experiment 20000441 PARAMETER Experiment Name: At_1uM_BR-BRZ__P Parameter: Tissue Value: Shoot Apices
  misc_feature: MA Experiment 20000441 PARAMETER Experiment Name: At_1uM_BR-BRZ__P Parameter: Treatment Value: 1uM BR vs. No Treatment
  misc_feature: MA Experiment ID: 20000443 Result: Up-regulated in Transcription
  misc_feature: MA Experiment 20000443 PARAMETER Experiment Name: At_1uM_BR-BRZ__P Parameter: Tissue Value: Shoot Apices
  misc_feature: MA Experiment 20000443 PARAMETER Experiment Name: At_1uM_BR-BRZ__P Parameter: Treatment Value: 1uM BRZ vs. No Treatment
  misc_feature: MA Experiment ID: 20000496 Result: Down-regulated in Transcription
  misc_feature: MA Experiment 20000496 PARAMETER Experiment Name: At_Guard_Cells_P Parameter: Harvest Date Value: 7/19/2002
  misc_feature: MA Experiment 20000496 PARAMETER Experiment Name: At_Guard_Cells_P Parameter: Organism Value: Canola
  misc_feature: MA Experiment 20000496 PARAMETER Experiment Name: At_Guard_Cells_P Parameter: Tissue Value: Guard Cells vs. Leaves
  misc_feature: MA Experiment ID: 20000709 Result: Up-regulated in Transcription
  misc_feature: MA Experiment 20000709 PARAMETER Experiment Name: At_15mM_NH4NO3_L-to-H_P Parameter: Age (hr) Value: 14
  misc_feature: MA Experiment 20000709 PARAMETER Experiment Name: At_15mM_NH4NO3_L-to-H_P Parameter: Organism Value: A. thaliana
  misc_feature: MA Experiment 20000709 PARAMETER Experiment Name: At_15mM_NH4NO3_L-to-H_P Parameter: Plant Line Value: WS
  misc_feature: MA Experiment 20000709 PARAMETER Experiment Name: At_15mM_NH4NO3_L-to-H_P Parameter: Timepoint (hr) Value: 4
  misc_feature: MA Experiment 20000709 PARAMETER Experiment Name: At_15mM_NH4NO3_L-to-H_P Parameter: Tissue Value: Aerial
  misc_feature: MA Experiment 20000709 PARAMETER Experiment Name: At_15mM_NH4NO3_L-to-H_P Parameter: Treatment Value: 15mM NH4NO3 vs. 30mM Mannitol
  misc_feature: MA Experiment ID: 20001247 Result: Up-regulated in Transcription
  misc_feature: MA Experiment 20001247 PARAMETER Experiment Name: At_Far-red-induction_P Parameter: Age (day) Value: 7
  misc_feature: MA Experiment 20001247 PARAMETER Experiment Name: At_Far-red-induction_P Parameter: Light Value: Far-red vs. White
  misc_feature: MA Experiment 20001247 PARAMETER Experiment Name: At_Far-red-induction_P Parameter: Organism Value: A. thaliana
  misc_feature: MA Experiment 20001247 PARAMETER Experiment Name: At_Far-red-induction_P Parameter: Plant Line Value: Columbia
  misc_feature: MA Experiment 20001247 PARAMETER Experiment Name: At_Far-red-induction_P Parameter: Timepoint (hr) Value: 1
  misc_feature: MA Experiment 20001247 PARAMETER Experiment Name: At_Far-red-induction_P Parameter: Tissue Value: Whole Plant
  misc_feature: MA Experiment ID: 20001906 Result: Up-regulated in Transcription
  misc_feature: MA Experiment 20001906 PARAMETER Experiment Name: At_Drought_Reproduction_P Parameter: Age (day) Value: 35
  misc_feature: MA Experiment 20001906 PARAMETER Experiment Name: At_Drought_Reproduction_P Parameter: Organism Value: A. thaliana
  misc_feature: MA Experiment 20001906 PARAMETER Experiment Name: At_Drought_Reproduction_P Parameter: Plant Line Value: WS
  misc_feature: MA Experiment 20001906 PARAMETER Experiment Name: At_Drought_Reproduction_P Parameter: Timepoint (day) Value: 5
  misc_feature: MA Experiment 20001906 PARAMETER Experiment Name: At_Drought_Reproduction_P Parameter: Tissue Value: Siliques
  misc_feature: MA Experiment 20001906 PARAMETER Experiment Name: At_Drought_Reproduction_P Parameter: Treatment Value: Drought vs. No Drought
aaaccaattcatacacaaacactctagtctcctctctttttctctgccttctctcttttatttattccctccttccctctggtcctccatcagatacaacaacagagactccaagatggccggaggaggaggagagctcacggcggctttgttgaaaaagacggcggagaacggcggagaagagaaggatgagttagggttgaagcaaaaggtttggattgaatcaaagaagctatggattgtggcggcgccagcgatcttcacgagattctcaacgttcggagtttcaataataagtcaatctttcatcggccatcttggtcctatagagttggctgcttactctatcaccttcaccgttctcctccggtttagtaatggtatcttgttaggtatggccagtgcattggaaacactatgtggtcaagcctacggagctaaacaaaatcatatgctcgggatctacctccaaaggtcatggatcgtccttacaggttgtaccatttgcctcacgcccgtctatatcttctctggccctatcctcttagccttaggtcaagaggaacgcattgtccgtgtggctcggatcatagccctatgggtcataggcatcaacttctcttttgtgccttccttcacttgccaaatgttcctccaagctcagagcaagaacaagatcattgcctacgtggctgctgtctccttaggggtccatgtcttcttgtcgtggctacttatggttcatttcaattttgggatcactggtgctatgacctctacgctagttgcgttctggttgcctaatattgcccaactcttgttcgtcacgtgcggtgggtgtaaggacacatggagaggattctctatgatggccttcaaagatttatggcccgtcttcaaactttctatgtcttccggtggaatgctttgcttggaactatggtacaactcaatcttggtactgctcactggaaatttgaaaaacgcagaagtggctcttgatgcactagcaatctgcctcaacataaatggactggagatgatgatagcacttgggtttttggcagctgcaagcgtaagagtgtccaacgagctcggtagtggaaaccccaaaggagccaagtttgcaacactaaccgcggttttcacatcactctctttaggaatagttctattcttcgtcttcttgtttctgagaggaagagtttcctacattttcactacaagtgaagctgtcgcagccgaagttgccgatctttctccgcttttagccttttccatcctcatgaatagtgttcaacccgttctctctggagttgccgtcggagctggatggcaaggatatgttacttacgttaaccttgcttgctattaccttgtcggaattcctattggtattatccttggttatgtcgttggtttgcaagtgaaaggcgtatggatcggaatgctctttggaatattcgttcagacttgtgtgcttaccgtcatgactctgagaacagattgggatcaacaggtgtcaacgtcgttgagacgtttaaatcggtgggttgtaccagaatctagagacgtaaaccaagtatcatcagaggaataaattggattctagattgtctttagcaccgtcacattttattcttaaaagctaaaatgtaacttttaggctatgttccaagattgtgaagacaagaatatgacaaatttgggtc

SEQ ID NO: 96245 - protein, 532 aa, Arabidopsis thaliana
  peptide (1)..(532): Ceres Seq. ID no. 12732561
  misc_feature (39)..(532): Homolog of NCBI NO: 15223402 NR Description: unknown protein; protein id: At1g33110.1, by cDNA: gi_17065359 [Arabidopsis thaliana] Unknown protein [Arabidopsis thaliana]
  misc_feature (39)..(532): Homolog of NCBI NO: 15223391 NR Description: hypothetical protein; protein id: At1g33090.1
  misc_feature (39)..(532): Homolog of NCBI NO: 15223394 NR Description: unknown protein; protein id: At1g33100.1
  misc_feature (39)..(532): Homolog of NCBI NO: 22329916 NR Description: hypothetical protein; protein id: At1g33080.1, by cDNA: gi_19423993 [Arabidopsis thaliana] unknown protein [Arabidopsis thaliana]
  misc_feature (39)..(477): Homolog of NCBI NO: 6910584 NR Description: CDS [Arabidopsis thaliana]
  misc_feature (459)..(532): Homolog of NCBI NO: 6910584 NR Description: CDS [Arabidopsis thaliana]
  misc_feature (161)..(511): Homolog of NCBI NO: 25518156 NR Description: T9L6.1 protein - Arabidopsis thaliana
  misc_feature (39)..(128): Homolog of NCBI NO: 25518156 NR Description: T9L6.1 protein - Arabidopsis thaliana
  misc_feature (39)..(362): Homolog of NCBI NO: 6910588 NR Description: CDS [Arabidopsis thaliana]
  misc_feature (367)..(477): Homolog of NCBI NO: 6910588 NR Description: CDS [Arabidopsis thaliana]
NQFIHKHSSLLSFSLPSLFYLFPPSLWSSIRYNNRDSKMAGGGGELTAALLKKTAENGGEEKDELGLKQKVWIESKKLWIVAAPAIFTRFSTFGVSIISQSFIGHLGPIELAAYSITFTVLLRFSNGILLGMASALETLCGQAYGAKQNHMLGIYLQRSWIVLTGCTICLTPVYIFSGPILLALGQEERIVRVARIIALWVIGINFSFVPSFTCQMFLQAQSKNKIIAYVAAVSLGVHVFLSWLLMVHFNFGITGAMTSTLVAFWLPNIAQLLFVTCGGCKDTWRGFSMMAFKDLWPVFKLSMSSGGMLCLELWYNSILVLLTGNLKNAEVALDALAICLNINGLEMMIALGFLAAASVRVSNELGSGNPKGAKFATLTAVFTSLSLGIVLFFVFLFLRGRVSYIFTTSEAVAAEVADLSPLLAFSILMNSVQPVLSGVAVGAGWQGYVTYVNLACYYLVGIPIGIILGYVVGLQVKGVWIGMLFGIFVQTCVLTVMTLRTDWDQQVSTSLRRLNRWVVPESRDVNQVSSEE

SEQ ID NO: 96246 - protein, 494 aa, Arabidopsis thaliana
  peptide (1)..(494): Ceres Seq. ID no. 12732562
  misc_feature (1)..(494): Homolog of NCBI NO: 15223402 NR Description: unknown protein; protein id: At1g33110.1, by cDNA: gi_17065359 [Arabidopsis thaliana] Unknown protein [Arabidopsis thaliana]
  misc_feature (1)..(494): Homolog of NCBI NO: 15223391 NR Description: hypothetical protein; protein id: At1g33090.1
  misc_feature (1)..(494): Homolog of NCBI NO: 15223394 NR Description: unknown protein; protein id: At1g33100.1
  misc_feature (1)..(494): Homolog of NCBI NO: 22329916 NR Description: hypothetical protein; protein id: At1g33080.1, by cDNA: gi_19423993 [Arabidopsis thaliana] unknown protein [Arabidopsis thaliana]
  misc_feature (1)..(439): Homolog of NCBI NO: 6910584 NR Description: CDS [Arabidopsis thaliana]
  misc_feature (421)..(494): Homolog of NCBI NO: 6910584 NR Description: CDS [Arabidopsis thaliana]
  misc_feature (123)..(473): Homolog of NCBI NO: 25518156 NR Description: T9L6.1 protein - Arabidopsis thaliana
  misc_feature (1)..(90): Homolog of NCBI NO: 25518156 NR Description: T9L6.1 protein - Arabidopsis thaliana
  misc_feature (1)..(324): Homolog of NCBI NO: 6910588 NR Description: CDS [Arabidopsis thaliana]
  misc_feature (329)..(439): Homolog of NCBI NO: 6910588 NR Description: CDS [Arabidopsis thaliana]
MAGGGGELTAALLKKTAENGGEEKDELGLKQKVWIESKKLWIVAAPAIFTRFSTFGVSIISQSFIGHLGPIELAAYSITFTVLLRFSNGILLGMASALETLCGQAYGAKQNHMLGIYLQRSWIVLTGCTICLTPVYIFSGPILLALGQEERIVRVARIIALWVIGINFSFVPSFTCQMFLQAQSKNKIIAYVAAVSLGVHVFLSWLLMVHFNFGITGAMTSTLVAFWLPNIAQLLFVTCGGCKDTWRGFSMMAFKDLWPVFKLSMSSGGMLCLELWYNSILVLLTGNLKNAEVALDALAICLNINGLEMMIALGFLAAASVRVSNELGSGNPKGAKFATLTAVFTSLSLGIVLFFVFLFLRGRVSYIFTTSEAVAAEVADLSPLLAFSILMNSVQPVLSGVAVGAGWQGYVTYVNLACYYLVGIPIGIILGYVVGLQVKGVWIGMLFGIFVQTCVLTVMTLRTDWDQQVSTSLRRLNRWVVPESRDVNQVSSEE

SEQ ID NO: 96247 - protein, 401 aa, Arabidopsis thaliana
  peptide (1)..(401): Ceres Seq. ID no. 12732563
  misc_feature (1)..(401): Homolog of NCBI NO: 15223402 NR Description: unknown protein; protein id: At1g33110.1, by cDNA: gi_17065359 [Arabidopsis thaliana] Unknown protein [Arabidopsis thaliana]
  misc_feature (1)..(401): Homolog of NCBI NO: 15223391 NR Description: hypothetical protein; protein id: At1g33090.1
  misc_feature (1)..(401): Homolog of NCBI NO: 15223394 NR Description: unknown protein; protein id: At1g33100.1
  misc_feature (1)..(401): Homolog of NCBI NO: 22329916 NR Description: hypothetical protein; protein id: At1g33080.1, by cDNA: gi_19423993 [Arabidopsis thaliana] unknown protein [Arabidopsis thaliana]
  misc_feature (1)..(346): Homolog of NCBI NO: 6910584 NR Description: CDS [Arabidopsis thaliana]
  misc_feature (328)..(401): Homolog of NCBI NO: 6910584 NR Description: CDS [Arabidopsis thaliana]
  misc_feature (30)..(380): Homolog of NCBI NO: 25518156 NR Description: T9L6.1 protein - Arabidopsis thaliana
  misc_feature (1)..(231): Homolog of NCBI NO: 6910588 NR Description: CDS [Arabidopsis thaliana]
  misc_feature (236)..(346): Homolog of NCBI NO: 6910588 NR Description: CDS [Arabidopsis thaliana]
  misc_feature (375)..(401): Homolog of NCBI NO: 6910588 NR Description: CDS [Arabidopsis thaliana]
MASALETLCGQAYGAKQNHMLGIYLQRSWIVLTGCTICLTPVYIFSGPILLALGQEERIVRVARIIALWVIGINFSFVPSFTCQMFLQAQSKNKIIAYVAAVSLGVHVFLSWLLMVHFNFGITGAMTSTLVAFWLPNIAQLLFVTCGGCKDTWRGFSMMAFKDLWPVFKLSMSSGGMLCLELWYNSILVLLTGNLKNAEVALDALAICLNINGLEMMIALGFLAAASVRVSNELGSGNPKGAKFATLTAVFTSLSLGIVLFFVFLFLRGRVSYIFTTSEAVAAEVADLSPLLAFSILMNSVQPVLSGVAVGAGWQGYVTYVNLACYYLVGIPIGIILGYVVGLQVKGVWIGMLFGIFVQTCVLTVMTLRTDWDQQVSTSLRRLNRWVVPESRDVNQVSSEE

SEQ ID NO: 96248 - DNA, 1050 bp, Arabidopsis thaliana
  misc_feature (1)..(1050): Ceres Seq. ID no. 12732571
  misc_feature: MA Experiment ID: 20000436 Result: Up-regulated in Transcription
  misc_feature: MA Experiment 20000436 PARAMETER Experiment Name: At_Drought_P Parameter: Age (day) Value: 7
  misc_feature: MA Experiment 20000436 PARAMETER Experiment Name: At_Drought_P Parameter: Organism Value: A. thaliana
  misc_feature: MA Experiment 20000436 PARAMETER Experiment Name: At_Drought_P Parameter: Plant Line Value: WS
  misc_feature: MA Experiment 20000436 PARAMETER Experiment Name: At_Drought_P Parameter: Timepoint (hr) Value: 12
  misc_feature: MA Experiment 20000436 PARAMETER Experiment Name: At_Drought_P Parameter: Tissue Value: Whole Plant
  misc_feature: MA Experiment 20000436 PARAMETER Experiment Name: At_Drought_P Parameter: Treatment Value: Drought vs. No Drought
  misc_feature: MA Experiment ID: 20000437 Result: Up-regulated in Transcription
  misc_feature: MA Experiment 20000437 PARAMETER Experiment Name: At_Drought_P Parameter: Age (day) Value: 8
  misc_feature: MA Experiment 20000437 PARAMETER Experiment Name: At_Drought_P Parameter: Organism Value: A. thaliana
  misc_feature: MA Experiment 20000437 PARAMETER Experiment Name: At_Drought_P Parameter: Plant Line Value: WS
  misc_feature: MA Experiment 20000437 PARAMETER Experiment Name: At_Drought_P Parameter: Timepoint (hr) Value: 24
  misc_feature: MA Experiment 20000437 PARAMETER Experiment Name: At_Drought_P Parameter: Tissue Value: Whole Plant
  misc_feature: MA Experiment 20000437 PARAMETER Experiment Name: At_Drought_P Parameter: Treatment Value: Drought vs. No Drought
  misc_feature: MA Experiment ID: 20000439 Result: Up-regulated in Transcription
  misc_feature: MA Experiment 20000439 PARAMETER Experiment Name: At_Roots__P Parameter: Age (day) Value: 14 vs. 21
  misc_feature: MA Experiment 20000439 PARAMETER Experiment Name: At_Roots__P Parameter: Organism Value: A. thaliana
  misc_feature: MA Experiment 20000439 PARAMETER Experiment Name: At_Roots__P Parameter: Tissue Value: Roots vs. Whole Plant
  misc_feature: MA Experiment ID: 20000527 Result: Down-regulated in Transcription
  misc_feature: MA Experiment 20000527 PARAMETER Experiment Name: At_10percent_PEG_P Parameter: Age (day) Value: 20
  misc_feature: MA Experiment 20000527 PARAMETER Experiment Name: At_10percent_PEG_P Parameter: Organism Value: A. thaliana
  misc_feature: MA Experiment 20000527 PARAMETER Experiment Name: At_10percent_PEG_P Parameter: Plant Line Value: WS
  misc_feature: MA Experiment 20000527 PARAMETER Experiment Name: At_10percent_PEG_P Parameter: Timepoint (day) Value: 20
  misc_feature: MA Experiment 20000527 PARAMETER Experiment Name: At_10percent_PEG_P Parameter: Tissue Value: Whole Plant
  misc_feature: MA Experiment 20000527 PARAMETER Experiment Name: At_10percent_PEG_P Parameter: Treatment Value: 10percent PEG vs. No Treatment
  misc_feature: MA Experiment ID: 20001248 Result: Down-regulated in Transcription
  misc_feature: MA Experiment 20001248 PARAMETER Experiment Name: At_Far-red-induction_P Parameter: Age (day) Value: 7
  misc_feature: MA Experiment 20001248 PARAMETER Experiment Name: At_Far-red-induction_P Parameter: Light Value: Far-red vs. White
  misc_feature: MA Experiment 20001248 PARAMETER Experiment Name: At_Far-red-induction_P Parameter: Organism Value: A. thaliana
  misc_feature: MA Experiment 20001248 PARAMETER Experiment Name: At_Far-red-induction_P Parameter: Plant Line Value: Columbia
  misc_feature: MA Experiment 20001248 PARAMETER Experiment Name: At_Far-red-induction_P Parameter: Timepoint (hr) Value: 4
  misc_feature: MA Experiment 20001248 PARAMETER Experiment Name: At_Far-red-induction_P Parameter: Tissue Value: Whole Plant
atgtcttgtttcttaagctgtgtccgtttcgaaacaaccaccgacaacaacaaacccacgagtacagaatctggttctgtctccggtgttacctgttatacctgggatgatgttgagtctctcacttccaatttctctagacttattggtactggtggctatagtagtatctacttagctcgtgtgtctggttctatcaacgcagctctcaaggttcatgtcagtagtcatcgtctttatcaagtgtttaggtctgagcttgagattttgcttcgtcttcaacatcctcacattgttaagcttcttggttactttgacgattcagaagaaagtggagcactattactagagtaccttcctcaaggtaaccttcaagagaagcttaaccggaacagcaaacaagtgttaccatggagaaacagaaccgctattgcgtttcaggttgcgcaagcaattgaacatattcatgagaaatgtagtcctcagattgtgcacggtgacatcaaatcttccaacatacttcttgacaaacatttcaactccaagctttgtgatttcggatcagctaaagttggtttctcgtctatggttcagccttctaagacgacgtcaactatgtcaccacgatccaagcaagtgatgatgattggttctccagggtacacagatcctcattacttgagaactggtattgcttcgaagaagatggatatgtatgggtttggagtggtggttcttgagttggtttcgggtaaagaagcggttagttctgagagaggtgagatgttggtgcattcaacagcttcgttgatacatgagattcttgattcgaatggagatattggagaagagaaagtgagacagttcttggatccaaggttgtccagggatggtagtattgatttggaagaggttaagacaatgctacgtgtggctgctttctgtcttcgtagccctccatcgctgagaccctctgcttctcaagtagttcaaactcttaacaagaagataccgtctctatctttcctcggttgtggtaaaaaagagtga

SEQ ID NO: 96249 - protein, 349 aa, Arabidopsis thaliana
  peptide (1)..(349): Ceres Seq. ID no. 12732572
  misc_feature (43)..(333): Pfam Name: Protein kinase domain Pfam Description: Protein kinase domain
  misc_feature (1)..(349): Homolog of NCBI NO: 30692836 NR Description: protein kinase family [Arabidopsis thaliana]
  misc_feature (1)..(347): Homolog of NCBI NO: 25403176 NR Description: probable protein kinase [imported] - Arabidopsis >gi|12322574|gb|AAG51288.1|AC027035_11 protein kinase, putative
  misc_feature (1)..(347): Homolog of NCBI NO: 15235071 NR Description: putative protein kinase; protein id: At4g10390.1, by cDNA: gi_20260591 [Arabidopsis thaliana]
  misc_feature (25)..(335): Homolog of NCBI NO: 37536060 NR Description: putative receptor protein kinase [Oryza sativa
  misc_feature (35)..(273): Homolog of NCBI NO: 38344983 NR Description: OSJNBa0011L07.13 [Oryza sativa (japonica
  misc_feature (24)..(294): Homolog of NCBI NO: 27476081 NR Description: Hypothetical protein [Oryza sativa (japonica
  misc_feature (1)..(281): Homolog of NCBI NO: 25405508 NR Description: probable protein kinase [imported] - Arabidopsis >gi|9802791|gb|AAF99860.1|AC015448_10 Putative protein kinase
  misc_feature (21)..(334): Homolog of NCBI NO: 15240947 NR Description: putative protein; protein id: At5g38560.1, by cDNA: gi_15983496, supported by cDNA: gi_18700152 [Arabidopsis >gi|10176824|dbj|BAB10146.1| contains similarity to protein
  misc_feature (6)..(333): Homolog of NCBI NO: 37651058 NR Description: Nod-factor receptor 1a [Lotus corniculatus var.
  misc_feature (6)..(333): Homolog of NCBI NO: 37651060 NR Description: Nod-factor receptor 1b [Lotus corniculatus var.
MSCFLSCVRFETTTDNNKPTSTESGSVSGVTCYTWDDVESLTSNFSRLIGTGGYSSIYLARVSGSINAALKVHVSSHRLYQVFRSELEILLRLQHPHIVKLLGYFDDSEESGALLLEYLPQGNLQEKLNRNSKQVLPWRNRTAIAFQVAQAIEHIHEKCSPQIVHGDIKSSNILLDKHFNSKLCDFGSAKVGFSSMVQPSKTTSTMSPRSKQVMMIGSPGYTDPHYLRTGIASKKMDMYGFGVVVLELVSGKEAVSSERGEMLVHSTASLIHEILDSNGDIGEEKVRQFLDPRLSRDGSIDLEEVKTMLRVAAFCLRSPPSLRPSASQVVQTLNKKIPSLSFLGCGKKE

SEQ ID NO: 96250 - DNA, 984 bp, Arabidopsis thaliana
  misc_feature (1)..(984): Ceres Seq. ID no. 12732577
  misc_feature: MA Experiment ID: 20000182 Result: Up-regulated in Transcription
  misc_feature: MA Experiment 20000182 PARAMETER Experiment Name: At_2mM_SA_P Parameter: Age (day) Value: 14
  misc_feature: MA Experiment 20000182 PARAMETER Experiment Name: At_2mM_SA_P Parameter: Organism Value: A. thaliana
  misc_feature: MA Experiment 20000182 PARAMETER Experiment Name: At_2mM_SA_P Parameter: Plant Line Value: WS
  misc_feature: MA Experiment 20000182 PARAMETER Experiment Name: At_2mM_SA_P Parameter: Timepoint (hr) Value: 6
  misc_feature: MA Experiment 20000182 PARAMETER Experiment Name: At_2mM_SA_P Parameter: Tissue Value: Aerial
  misc_feature: MA Experiment 20000182 PARAMETER Experiment Name: At_2mM_SA_P Parameter: Treatment Value: 2mM SA vs. No Treatment
  misc_feature: MA Experiment ID: 20000264 Result: Down-regulated in Transcription
  misc_feature: MA Experiment 20000264 PARAMETER Experiment Name: At_Open_Flower_P Parameter: Age (day) Value: 21
  misc_feature: MA Experiment 20000264 PARAMETER Experiment Name: At_Open_Flower_P Parameter: Plant Line Value: WS
  misc_feature: MA Experiment 20000264 PARAMETER Experiment Name: At_Open_Flower_P Parameter: Tissue Value: Open Flower vs. Whole Plant
  misc_feature: MA Experiment ID: 20000495 Result: Up-regulated in Transcription
  misc_feature: MA Experiment 20000495 PARAMETER Experiment Name: At_Guard_Cells_P Parameter: Harvest Date Value: 8/2/2002
  misc_feature: MA Experiment 20000495 PARAMETER Experiment Name: At_Guard_Cells_P Parameter: Organism Value: A. thaliana
  misc_feature: MA Experiment 20000495 PARAMETER Experiment Name: At_Guard_Cells_P Parameter: Tissue Value: Guard Cells vs. Leaves
  misc_feature: MA Experiment ID: 20000794 Result: Down-regulated in Transcription
  misc_feature: MA Experiment 20000794 PARAMETER Experiment Name: At_Petals_P Parameter: Age (day) Value: 23-25 days
  misc_feature: MA Experiment 20000794 PARAMETER Experiment Name: At_Petals_P Parameter: Plant Line Value: WS
  misc_feature: MA Experiment 20000794 PARAMETER Experiment Name: At_Petals_P Parameter: Tissue Value: Petals vs. Whole plant
  misc_feature: MA Experiment ID: 20001248 Result: Up-regulated in Transcription
  misc_feature: MA Experiment 20001248 PARAMETER Experiment Name: At_Far-red-induction_P Parameter: Age (day) Value: 7
  misc_feature: MA Experiment 20001248 PARAMETER Experiment Name: At_Far-red-induction_P Parameter: Light Value: Far-red vs. White
  misc_feature: MA Experiment 20001248 PARAMETER Experiment Name: At_Far-red-induction_P Parameter: Organism Value: A. thaliana
  misc_feature: MA Experiment 20001248 PARAMETER Experiment Name: At_Far-red-induction_P Parameter: Plant Line Value: Columbia
  misc_feature: MA Experiment 20001248 PARAMETER Experiment Name: At_Far-red-induction_P Parameter: Timepoint (hr) Value: 4
  misc_feature: MA Experiment 20001248 PARAMETER Experiment Name: At_Far-red-induction_P Parameter: Tissue Value: Whole Plant
  misc_feature: MA Experiment ID: 20001450 Result: Up-regulated in Transcription
  misc_feature: MA Experiment 20001450 PARAMETER Experiment Name: At_Far-red-induction_P Parameter: Age (day) Value: 7
  misc_feature: MA Experiment 20001450 PARAMETER Experiment Name: At_Far-red-induction_P Parameter: Light Value: Far-red vs. White
  misc_feature: MA Experiment 20001450 PARAMETER Experiment Name: At_Far-red-induction_P Parameter: Organism Value: A. thaliana
  misc_feature: MA Experiment 20001450 PARAMETER Experiment Name: At_Far-red-induction_P Parameter: Plant Line Value: Columbia
  misc_feature: MA Experiment 20001450 PARAMETER Experiment Name: At_Far-red-induction_P Parameter: Timepoint (hr) Value: 8
  misc_feature: MA Experiment 20001450 PARAMETER Experiment Name: At_Far-red-induction_P Parameter: Tissue Value: Whole Plant
  misc_feature: MA Experiment ID: 20001451 Result: Up-regulated in Transcription
  misc_feature: MA Experiment 20001451 PARAMETER Experiment Name: At_Far-red-induction_P Parameter: Age (day) Value: 7
  misc_feature: MA Experiment 20001451 PARAMETER Experiment Name: At_Far-red-induction_P Parameter: Light Value: Far-red vs. White
  misc_feature: MA Experiment 20001451 PARAMETER Experiment Name: At_Far-red-induction_P Parameter: Organism Value: A. thaliana
  misc_feature: MA Experiment 20001451 PARAMETER Experiment Name: At_Far-red-induction_P Parameter: Plant Line Value: Columbia
  misc_feature: MA Experiment 20001451 PARAMETER Experiment Name: At_Far-red-induction_P Parameter: Timepoint (hr) Value: 24
  misc_feature: MA Experiment 20001451 PARAMETER Experiment Name: At_Far-red-induction_P Parameter: Tissue Value: Whole Plant
  misc_feature: MA Experiment ID: 20001905 Result: Up-regulated in Transcription
  misc_feature: MA Experiment 20001905 PARAMETER Experiment Name: At_Drought_Reproduction_P Parameter: Age (day) Value: 40
  misc_feature: MA Experiment 20001905 PARAMETER Experiment Name: At_Drought_Reproduction_P Parameter: Organism Value: A. thaliana
  misc_feature: MA Experiment 20001905 PARAMETER Experiment Name: At_Drought_Reproduction_P Parameter: Plant Line Value: WS
  misc_feature: MA Experiment 20001905 PARAMETER Experiment Name: At_Drought_Reproduction_P Parameter: Timepoint (day) Value: 10
  misc_feature: MA Experiment 20001905 PARAMETER Experiment Name: At_Drought_Reproduction_P Parameter: Tissue Value: Rosettes
  misc_feature: MA Experiment 20001905 PARAMETER Experiment Name: At_Drought_Reproduction_P Parameter: Treatment Value: Drought vs. No Drought
atgtccgaaccaagtccaatcgctgatccttatgcttatcttaacatcgtaaataatccagatggttcaatcactcgcgacctcagcaacttcccctgcaccgcagctacacctgatccttccccactaaaccccgccgtttcaaaagatcttcccgttaaccaattaaagtcaacgtggctccgtctctaccttccctcctccgccgtcaacgagggtaacgtttcgtctcagaaactccccattgttgtgtattaccatggcggaggattcatcctctgcagcgtcgatatgcaactcttccacgatttctgctccgaggtggctcgtgatctcaacgccatcgtcgtatctccttcgtaccgattagctccagagcatcgattaccggcggcgtatgacgacggagttgaggcgttggattggattaaaacctccgacgatgagtggatcaaatctcacgccgatttctcaaatgtgtttcttatgggaactagcgccggagggaatttggcttacaacgtcggactaagatccgtcgattccgtctccgatctgagtccgttacagatccgtggattgattctacaccatccattcttcggcggagaagagcgaagtgaatctgagattagacttatgaacgatcaggtttgtcctcccatagtcaccgatgtaatgtgggatctgtctcttcccgtcggcgttgaccgagatcatgagtattcgaatccgacggttggagatggatcggagaagttggaaaaaatcggacggttgagatggaaagtgatgatgattggaggagaggatgatccgatgatagatctgcagaaagatgtggcaaagctgatgaagaagaaaggagtagaagtggtggagcattataccggcggccatgttcacggtgctgaaatcagagatccttctaaacgtaaaactctgtttctttccatcaaaaacttcatattctctgttctgtaa

SEQ ID NO: 96251 - protein, 327 aa, Arabidopsis thaliana
  peptide (1)..(327): Ceres Seq. ID no. 12732578
  misc_feature (1)..(327): Homolog of NCBI NO: 15241725 NR Description: putative protein; protein id: At5g62180.1
  misc_feature (1)..(325): Homolog of NCBI NO: 18406834 NR Description: expressed protein; protein id: At2g45600.1, by cDNA: 36855., supported by cDNA: gi_16604486 [Arabidopsis
  misc_feature (1)..(325): Homolog of NCBI NO: 21593183 NR Description: unknown [Arabidopsis thaliana]
  misc_feature (13)..(323): Homolog of NCBI NO: 8574455 NR Description: pepper esterase [Capsicum annuum]
  misc_feature (1)..(323): Homolog of NCBI NO: 15225521 NR Description: unknown protein; protein id: At2g45610.1
  misc_feature (21)..(317): Homolog of NCBI NO: 5487873 NR Description: PrMC3 [Pinus radiata]
  misc_feature (20)..(323): Homolog of NCBI NO: 21618039 NR Description: unknown [Arabidopsis thaliana]
  misc_feature (20)..(323): Homolog of NCBI NO: 15237783 NR Description: putative protein; protein id: At5g23530.1, by cDNA: 9482. [Arabidopsis thaliana] >gi|8809707|dbj|BAA97248.1| similarity to unknown protein~gb|AAF27018.1~gene_id:MQM1.21
  misc_feature (3)..(295): Homolog of NCBI NO: 15240090 NR Description: putative protein; protein id: At5g06570.1 thaliana] >gi|10178113|dbj|BAB11406.1| to unknown protein [Arabidopsis thaliana]
  misc_feature (6)..(310): Homolog of NCBI NO: 21593215 NR Description: unknown [Arabidopsis thaliana]
MSEPSPIADPYAYLNIVNNPDGSITRDLSNFPCTAATPDPSPLNPAVSKDLPVNQLKSTWLRLYLPSSAVNEGNVSSQKLPIVVYYHGGGFILCSVDMQLFHDFCSEVARDLNAIVVSPSYRLAPEHRLPAAYDDGVEALDWIKTSDDEWIKSHADFSNVFLMGTSAGGNLAYNVGLRSVDSVSDLSPLQIRGLILHHPFFGGEERSESEIRLMNDQVCPPIVTDVMWDLSLPVGVDRDHEYSNPTVGDGSEKLEKIGRLRWKVMMIGGEDDPMIDLQKDVAKLMKKKGVEVVEHYTGGHVHGAEIRDPSKRKTLFLSIKNFIFSVL

SEQ ID NO: 96252 - protein, 230 aa, Arabidopsis thaliana
  peptide (1)..(230): Ceres Seq. ID no. 12732579
  misc_feature (1)..(230): Homolog of NCBI NO: 15241725 NR Description: putative protein; protein id: At5g62180.1
  misc_feature (1)..(228): Homolog of NCBI NO: 18406834 NR Description: expressed protein; protein id: At2g45600.1, by cDNA: 36855., supported by cDNA: gi_16604486 [Arabidopsis
  misc_feature (1)..(228): Homolog of NCBI NO: 21593183 NR Description: unknown [Arabidopsis thaliana]
  misc_feature (1)..(226): Homolog of NCBI NO: 8574455 NR Description: pepper esterase [Capsicum annuum]
  misc_feature (1)..(226): Homolog of NCBI NO: 15225521 NR Description: unknown protein; protein id: At2g45610.1
  misc_feature (1)..(220): Homolog of NCBI NO: 5487873 NR Description: PrMC3 [Pinus radiata]
  misc_feature (1)..(226): Homolog of NCBI NO: 21618039 NR Description: unknown [Arabidopsis thaliana]
  misc_feature (1)..(226): Homolog of NCBI NO: 15237783 NR Description: putative protein; protein id: At5g23530.1, by cDNA: 9482. [Arabidopsis thaliana] >gi|8809707|dbj|BAA97248.1| similarity to unknown protein~gb|AAF27018.1~gene_id:MQM1.21
  misc_feature (1)..(198): Homolog of NCBI NO: 15240090 NR Description: putative protein; protein id: At5g06570.1 thaliana] >gi|10178113|dbj|BAB11406.1| to unknown protein [Arabidopsis thaliana]
  misc_feature (1)..(213): Homolog of NCBI NO: 21593215 NR Description: unknown [Arabidopsis thaliana]
MQLFHDFCSEVARDLNAIVVSPSYRLAPEHRLPAAYDDGVEALDWIKTSDDEWIKSHADFSNVFLMGTSAGGNLAYNVGLRSVDSVSDLSPLQIRGLILHHPFFGGEERSESEIRLMNDQVCPPIVTDVMWDLSLPVGVDRDHEYSNPTVGDGSEKLEKIGRLRWKVMMIGGEDDPMIDLQKDVAKLMKKKGVEVVEHYTGGHVHGAEIRDPSKRKTLFLSIKNFIFSVL

SEQ ID NO: 96253 - protein, 165 aa, Arabidopsis thaliana
  peptide (1)..(165): Ceres Seq. ID no. 12732580
  misc_feature (1)..(165): Homolog of NCBI NO: 15241725 NR Description: putative protein; protein id: At5g62180.1
  misc_feature (1)..(163): Homolog of NCBI NO: 18406834 NR Description: expressed protein; protein id: At2g45600.1, by cDNA: 36855., supported by cDNA: gi_16604486 [Arabidopsis
  misc_feature (1)..(163): Homolog of NCBI NO: 21593183 NR Description: unknown [Arabidopsis thaliana]
  misc_feature (1)..(161): Homolog of NCBI NO: 8574455 NR Description: pepper esterase [Capsicum annuum]
  misc_feature (1)..(161): Homolog of NCBI NO: 15225521 NR Description: unknown protein; protein id: At2g45610.1
  misc_feature (1)..(155): Homolog of NCBI NO: 5487873 NR Description: PrMC3 [Pinus radiata]
  misc_feature (1)..(161): Homolog of NCBI NO: 21618039 NR Description: unknown [Arabidopsis thaliana]
  misc_feature (1)..(161): Homolog of NCBI NO: 15237783 NR Description: putative protein; protein id: At5g23530.1, by cDNA: 9482. [Arabidopsis thaliana] >gi|8809707|dbj|BAA97248.1| similarity to unknown protein~gb|AAF27018.1~gene_id:MQM1.21
  misc_feature (1)..(133): Homolog of NCBI NO: 15240090 NR Description: putative protein; protein id: At5g06570.1 thaliana] >gi|10178113|dbj|BAB11406.1| to unknown protein [Arabidopsis thaliana]
  misc_feature (1)..(148): Homolog of NCBI NO: 21593215 NR Description: unknown [Arabidopsis thaliana]
MGTSAGGNLAYNVGLRSVDSVSDLSPLQIRGLILHHPFFGGEERSESEIRLMNDQVCPPIVTDVMWDLSLPVGVDRDHEYSNPTVGDGSEKLEKIGRLRWKVMMIGGEDDPMIDLQKDVAKLMKKKGVEVVEHYTGGHVHGAEIRDPSKRKTLFLSIKNFIFSVL

SEQ ID NO: 96254 - DNA, 573 bp, Arabidopsis thaliana
  misc_feature (1)..(573): Ceres Seq. ID no. 12732581
  misc_feature: MA Experiment ID: 20000437 Result: Up-regulated in Transcription
  misc_feature: MA Experiment 20000437 PARAMETER Experiment Name: At_Drought_P Parameter: Age (day) Value: 8
  misc_feature: MA Experiment 20000437 PARAMETER Experiment Name: At_Drought_P Parameter: Organism Value: A. thaliana
  misc_feature: MA Experiment 20000437 PARAMETER Experiment Name: At_Drought_P Parameter: Plant Line Value: WS
  misc_feature: MA Experiment 20000437 PARAMETER Experiment Name: At_Drought_P Parameter: Timepoint (hr) Value: 24
  misc_feature: MA Experiment 20000437 PARAMETER Experiment Name: At_Drought_P Parameter: Tissue Value: Whole Plant
  misc_feature: MA Experiment 20000437 PARAMETER Experiment Name: At_Drought_P Parameter: Treatment Value: Drought vs. No Drought
  misc_feature: MA Experiment ID: 20001556 Result: Up-regulated in Transcription
  misc_feature: MA Experiment 20001556 PARAMETER Experiment Name: At_Drought_Soil_Dry_P Parameter: Age (day) Value: 26
  misc_feature: MA Experiment 20001556 PARAMETER Experiment Name: At_Drought_Soil_Dry_P Parameter: Organism Value: A. thaliana
  misc_feature: MA Experiment 20001556 PARAMETER Experiment Name: At_Drought_Soil_Dry_P Parameter: Plant Line Value: WS
  misc_feature: MA Experiment 20001556 PARAMETER Experiment Name: At_Drought_Soil_Dry_P Parameter: Post Timepoint (hr) Value: None
  misc_feature: MA Experiment 20001556 PARAMETER Experiment Name: At_Drought_Soil_Dry_P Parameter: Post-Treatment Value: None
  misc_feature: MA Experiment 20001556 PARAMETER Experiment Name: At_Drought_Soil_Dry_P Parameter: Timepoint (day) Value: 12
  misc_feature: MA Experiment 20001556 PARAMETER Experiment Name: At_Drought_Soil_Dry_P Parameter: Treatment Value: Drought vs. No Drought
atggcgtccgtacgactcttcttcactttaatctccttcgtcttcattatatccacctctgtttacgaatcaaaagtattggatcctcctcacgtcgctgaatcattcaacgttagcctcatccagaaattggggaatacttgtgcttacacagtgatcatctcgacgagctgttcgtcgactaggtacacgcgcgatcagatcagcgtcgctttcggcgatggctatggtaaccagatatacgcaccaaggcttgatgatccatctacaaaaacgtttgagcaatgttcatcagatacatttcagataaacggaccatgtacataccagatatgctatgtatatctctacaggtctggtccagatggttggatcccaaacactgtaaagatatatagccatggctctaaagcggtcaccttcccatataacacatatgttcctgagagtgtatggtatggtttcaattactgcaacagcgcctcagattctaatgtccttgccattggtctcagaaggagcgtgatcatactcctaggttttgttgtcgccggtaccacattgctcttgtaa

SEQ ID NO: 96255 - protein, 190 aa, Arabidopsis thaliana
  peptide (1)..(190): Ceres Seq. ID no. 12732582
  misc_feature (31)..(158): Pfam Name: Embryo-specific protein 3, (ATS3) Pfam Description: Embryo-specific protein 3, (ATS3)
  misc_feature (1)..(190): Homolog of NCBI NO: 8809633 NR Description: contains similarity to embryo-specific protein
  misc_feature (1)..(190): Homolog of NCBI NO: 15241727 NR Description: putative protein; protein id: At5g62200.1
  misc_feature (3)..(173): Homolog of NCBI NO: 15227355 NR Description: unknown protein; protein id: At2g41470.1
  misc_feature (47)..(160): Homolog of NCBI NO: 15241758 NR Description: embryo-specific protein - like; protein id: supported by cDNA: 28168. [Arabidopsis thaliana]
  misc_feature (47)..(160): Homolog of NCBI NO: 26450767 NR Description: embryo-specific protein like [Arabidopsis
  misc_feature (32)..(160): Homolog of NCBI NO: 3335171 NR Description: embryo-specific protein 3 [Arabidopsis thaliana]
  misc_feature (32)..(160): Homolog of NCBI NO: 13877521 NR Description: embryo-specific protein 3; ATS3 [Arabidopsis
  misc_feature (32)..(160): Homolog of NCBI NO: 15240721 NR Description: embryo-specific protein 3 (ATS3); protein id: supported by cDNA: gi_13877520, supported by cDNA: gi_17978804
  misc_feature (47)..(158): Homolog of NCBI NO: 34910236 NR Description: OSJNBa0089K24.2 [Oryza sativa (japonica
MASVRLFFTLISFVFIISTSVYESKVLDPPHVAESFNVSLIQKLGNTCAYTVIISTSCSSTRYTRDQISVAFGDGYGNQIYAPRLDDPSTKTFEQCSSDTFQINGPCTYQICYVYLYRSGPDGWIPNTVKIYSHGSKAVTFPYNTYVPESVWYGFNYCNSASDSNVLAIGLRRSVIILLGFVVAGTTLLL

SEQ ID NO: 96256 - DNA, 890 bp, Arabidopsis thaliana
  misc_feature (1)..(890): Ceres Seq. ID no. 12732590
atgggtggtcgtaaaccatgttgtgatgaggttggattaagaaagggtccatggacagtggaagaagatgggaaactagttgatttcttaagggcacgtggcaactgcggtggtggtggaggaggatggtgctggagagacgtgccaaaactggcggggctaaggaggtgtggcaaaagttgccgtctccggtggactaattatctccggccagatctcaagagaggtctttttactgaagaagaaatccaactagtcattgatcttcatgctcgccttggcaatagatggtcgaagattgcagtggagttaccaggaagaacagacaacgatatcaaaaattattggaacactcatataaagaggaagcttataagaatgggtattgatccaaacacacatcgtcgatttgaccaacaaaaagtcaacgaggaggaaacgatattggtcaacgatccaaagcctctgtctgagaccgaggtatctgttgctttgaagaatgacacgtcagcagtgttatcaggaaatctaaaccaattggctgacgtggacggtgatgatcagccgtggagctttctaatggaaaatgacgaaggaggaggtggcgacgccgccggagagcttacgatgctattgtccggtgacattacgtcatcatgttcttcttcgtcatctttgtggatgaagtatggagaattcggatacgaagatttagaacttggatgtttcgatgtttagagattcaagtatgtttaattaggccgtaggttgattaatcataaggttcattgacttcattctagaattgtgtagttggaccagtataaagaatcaaagttataaaacattgtaatttgatttccaaattaatctaatgaataaatgtgctt

SEQ ID NO: 96257 - protein, 245 aa, Arabidopsis thaliana
  peptide (1)..(245): Ceres Seq. ID no. 12732591
  misc_feature (15)..(69): Pfam Name: Myb-like DNA-binding domain Pfam Description: Myb-like DNA-binding domain
  misc_feature (1)..(245): Homolog of NCBI NO: 15241796 NR Description: myb family transcription factor; protein id: supported by cDNA: gi_15375283 [Arabidopsis thaliana] putative transcription factor [Arabidopsis thaliana]
  misc_feature (3)..(244): Homolog of NCBI NO: 6651292 NR Description: myb-related transcription factor [Pimpinella
  misc_feature (3)..(244): Homolog of NCBI NO: 15219601 NR Description: myb family transcription factor(MYB20); protein At1g66230.1 [Arabidopsis thaliana] >gi|25294090|pir||C96687
  misc_feature (3)..(198): Homolog of NCBI NO: 18415984 NR Description: myb family transcription factor; protein id: supported by cDNA: 154343., supported by cDNA: gi_15375276 thaliana] >gi|15375277|gb|AAD53098.2|AF175993_1 putative
  misc_feature (3)..(244): Homolog of NCBI NO: 11358532 NR Description: myb-related transcription factor MYB20 [imported] Arabidopsis thaliana >gi|3941430|gb|AAC83591.1| putative
  misc_feature (3)..(158): Homolog of NCBI NO: 7446177 NR Description: myb-related transcription factor - tomato
  misc_feature (3)..(205): Homolog of NCBI NO: 23343577 NR Description: Myb13 protein [Oryza sativa]
  misc_feature (3)..(135): Homolog of NCBI NO: 23343575 NR Description: Myb51 protein [Oryza sativa]
  misc_feature (3)..(152): Homolog of NCBI NO: 34147926 NR Description: R2R3-MYB transcription factor [Pinus taeda]
  misc_feature (3)..(145): Homolog of NCBI NO: 15237380 NR Description: myb family transcription factor; protein id: supported by cDNA: gi_5823312 [Arabidopsis thaliana] putative transcription factor [Arabidopsis thaliana]
MGGRKPCCDEVGLRKGPWTVEEDGKLVDFLRARGNCGGGGGGWCWRDVPKLAGLRRCGKSCRLRWTNYLRPDLKRGLFTEEEIQLVIDLHARLGNRWSKIAVELPGRTDNDIKNYWNTHIKRKLIRMGIDPNTHRRFDQQKVNEEETILVNDPKPLSETEVSVALKNDTSAVLSGNLNQLADVDGDDQPWSFLMENDEGGGGDAAGELTMLLSGDITSSCSSSSSLWMKYGEFGYEDLELGCFDV

SEQ ID NO: 96258 - DNA, 546 bp, Arabidopsis thaliana
  misc_feature (1)..(546): Ceres Seq. ID no. 12732596
  misc_feature: MA Experiment ID: 20000169 Result: Down-regulated in Transcription
  misc_feature: MA Experiment 20000169 PARAMETER Experiment Name: At_100uM_ABA_P Parameter: Age (day) Value: 14
  misc_feature: MA Experiment 20000169 PARAMETER Experiment Name: At_100uM_ABA_P Parameter: Organism Value: A. thaliana
  misc_feature: MA Experiment 20000169 PARAMETER Experiment Name: At_100uM_ABA_P Parameter: Plant Line Value: WS
  misc_feature: MA Experiment 20000169 PARAMETER Experiment Name: At_100uM_ABA_P Parameter: Timepoint (hr) Value: 6
  misc_feature: MA Experiment 20000169 PARAMETER Experiment Name: At_100uM_ABA_P Parameter: Tissue Value: Aerial
  misc_feature: MA Experiment 20000169 PARAMETER Experiment Name: At_100uM_ABA_P Parameter: Treatment Value: 100uM ABA vs. No Treatment
  misc_feature: MA Experiment ID: 20000173 Result: Down-regulated in Transcription
  misc_feature: MA Experiment 20000173 PARAMETER Experiment Name: At_42deg_Heat_P Parameter: Age (day) Value: 14
  misc_feature: MA Experiment 20000173 PARAMETER Experiment Name: At_42deg_Heat_P Parameter: Organism Value: A. thaliana
  misc_feature: MA Experiment 20000173 PARAMETER Experiment Name: At_42deg_Heat_P Parameter: Plant Line Value: WS
  misc_feature: MA Experiment 20000173 PARAMETER Experiment Name: At_42deg_Heat_P Parameter: Temperature (deg C) Value: 42 vs. 22
  misc_feature: MA Experiment 20000173 PARAMETER Experiment Name: At_42deg_Heat_P Parameter: Timepoint (hr) Value: 6
  misc_feature: MA Experiment 20000173 PARAMETER Experiment Name: At_42deg_Heat_P Parameter: Tissue Value: Aerial
  misc_feature: MA Experiment ID: 20000182 Result: Down-regulated in Transcription
  misc_feature: MA Experiment 20000182 PARAMETER Experiment Name: At_2mM_SA_P Parameter: Age (day) Value: 14
  misc_feature: MA Experiment 20000182 PARAMETER Experiment Name: At_2mM_SA_P Parameter: Organism Value: A. thaliana
  misc_feature: MA Experiment 20000182 PARAMETER Experiment Name: At_2mM_SA_P Parameter: Plant Line Value: WS
  misc_feature: MA Experiment 20000182 PARAMETER Experiment Name: At_2mM_SA_P Parameter: Timepoint (hr) Value: 6
  misc_feature: MA Experiment 20000182 PARAMETER Experiment Name: At_2mM_SA_P Parameter: Tissue Value: Aerial
  misc_feature: MA Experiment 20000182 PARAMETER Experiment Name: At_2mM_SA_P Parameter: Treatment Value: 2mM SA vs. No Treatment
  misc_feature: MA Experiment ID: 20000184 Result: Down-regulated in Transcription
  misc_feature: MA Experiment 20000184 PARAMETER Experiment Name: At_Shoots__P Parameter: Age (day) Value: 7
  misc_feature: MA Experiment 20000184 PARAMETER Experiment Name: At_Shoots__P Parameter: Tissue Value: Shoots vs. Whole Plant
  misc_feature: MA Experiment ID: 20000185 Result: Down-regulated in Transcription
  misc_feature: MA Experiment 20000185 PARAMETER Experiment Name: At_Roots__P Parameter: Age (day) Value: 7 vs. 21
  misc_feature: MA Experiment 20000185 PARAMETER Experiment Name: At_Roots__P Parameter: Organism Value: A. thaliana
  misc_feature: MA Experiment 20000185 PARAMETER Experiment Name: At_Roots__P Parameter: Tissue Value: Roots vs. Whole Plant
  misc_feature: MA Experiment ID: 20000211 Result: Up-regulated in Transcription
  misc_feature: MA Experiment 20000211 PARAMETER Experiment Name: At_0.001percent_MeJA__P Parameter: Age (day) Value: 14
  misc_feature: MA Experiment 20000211 PARAMETER Experiment Name: At_0.001percent_MeJA__P Parameter: Organism Value: A. thaliana
  misc_feature: MA Experiment 20000211 PARAMETER Experiment Name: At_0.001percent_MeJA__P Parameter: Plant Line Value: WS
  misc_feature: MA Experiment 20000211 PARAMETER Experiment Name: At_0.001percent_MeJA__P Parameter: Timepoint (hr) Value: 1
  misc_feature: MA Experiment 20000211 PARAMETER Experiment Name: At_0.001percent_MeJA__P Parameter: Tissue Value: Aerial
  misc_feature: MA Experiment 20000211 PARAMETER Experiment Name: At_0.001percent_MeJA__P Parameter: Treatment Value: 0.001percent MeJA vs. No Treatment
  misc_feature: MA Experiment ID: 20000213 Result: Up-regulated in Transcription
  misc_feature: MA Experiment 20000213 PARAMETER Experiment Name: At_4deg_Cold_P Parameter: Timepoint (hr) Value: 2
  misc_feature: MA Experiment ID: 20000214 Result: Up-regulated in Transcription
  misc_feature: MA Experiment 20000214 PARAMETER Experiment Name: At_4deg_Cold_P Parameter: Timepoint (hr) Value: 6
  misc_feature: MA Experiment ID: 20000234 Result: Up-regulated in Transcription
  misc_feature: MA Experiment 20000234 PARAMETER Experiment Name: At_Siliques_P Parameter: Age (day) Value: 21
  misc_feature: MA Experiment 20000234 PARAMETER Experiment Name: At_Siliques_P Parameter: Organism Value: A. thaliana
  misc_feature: MA Experiment 20000234 PARAMETER Experiment Name: At_Siliques_P Parameter: Plant Line Value: WS
  misc_feature: MA Experiment 20000234 PARAMETER Experiment Name: At_Siliques_P Parameter: Tissue Value: Less Than 5mm Siliques vs. Whole Plant
  misc_feature: MA Experiment ID: 20000264 Result: Up-regulated in Transcription
  misc_feature: MA Experiment 20000264 PARAMETER Experiment Name: At_Open_Flower_P Parameter: Age (day) Value: 21
  misc_feature: MA Experiment 20000264 PARAMETER Experiment Name: At_Open_Flower_P Parameter: Plant Line Value: WS
  misc_feature: MA Experiment 20000264 PARAMETER Experiment Name: At_Open_Flower_P Parameter: Tissue Value: Open Flower vs. Whole Plant
  misc_feature: MA Experiment ID: 20000268 Result: Down-regulated in Transcription
  misc_feature: MA Experiment 20000268 PARAMETER Experiment Name: At_100mM_NaCl__P Parameter: Age (day) Value: 14
  misc_feature: MA Experiment 20000268 PARAMETER Experiment Name: At_100mM_NaCl__P Parameter: Organism Value: A. thaliana
  misc_feature: MA Experiment 20000268 PARAMETER Experiment Name: At_100mM_NaCl__P Parameter: Plant Line Value: WS
  misc_feature: MA Experiment 20000268 PARAMETER Experiment Name: At_100mM_NaCl__P Parameter: Timepoint (hr) Value: 6
  misc_feature: MA Experiment 20000268 PARAMETER Experiment Name: At_100mM_NaCl__P Parameter: Tissue Value: Whole Plant
  misc_feature: MA Experiment 20000268 PARAMETER Experiment Name: At_100mM_NaCl__P Parameter: Treatment Value: 100mM NaCl vs. No Treatment
  misc_feature: MA Experiment ID: 20000286 Result: Up-regulated in Transcription
  misc_feature: MA Experiment 20000286 PARAMETER Experiment Name: At_Open_Flower_P Parameter: Age (day) Value: 21
  misc_feature: MA Experiment 20000286 PARAMETER Experiment Name: At_Open_Flower_P Parameter: Plant Line Value: WS
  misc_feature: MA Experiment 20000286 PARAMETER Experiment Name: At_Open_Flower_P Parameter: Tissue Value: Half Open vs. Whole Plant
  misc_feature: MA Experiment ID: 20000436 Result: Down-regulated in Transcription
  misc_feature: MA Experiment 20000436 PARAMETER Experiment Name: At_Drought_P Parameter: Age (day) Value: 7
  misc_feature: MA Experiment 20000436 PARAMETER Experiment Name: At_Drought_P Parameter: Organism Value: A. thaliana
  misc_feature: MA Experiment 20000436 PARAMETER Experiment Name: At_Drought_P Parameter: Plant Line Value: WS
  misc_feature: MA Experiment 20000436 PARAMETER Experiment Name: At_Drought_P Parameter: Timepoint (hr) Value: 12
  misc_feature: MA Experiment 20000436 PARAMETER Experiment Name: At_Drought_P Parameter: Tissue Value: Whole Plant
  misc_feature: MA Experiment 20000436 PARAMETER Experiment Name: At_Drought_P Parameter: Treatment Value: Drought vs. No Drought
  misc_feature: MA Experiment ID: 20000438 Result: Down-regulated in Transcription
  misc_feature: MA Experiment 20000438 PARAMETER Experiment Name: At_Shoots__P Parameter: Age (day) Value: 14
  misc_feature: MA Experiment 20000438 PARAMETER Experiment Name: At_Shoots__P Parameter: Tissue Value: Shoots vs. Whole Plant
  misc_feature: MA Experiment ID: 20000439 Result: Down-regulated in Transcription
  misc_feature: MA Experiment 20000439 PARAMETER Experiment Name: At_Roots__P Parameter: Age (day) Value: 14 vs. 21
  misc_feature: MA Experiment 20000439 PARAMETER Experiment Name: At_Roots__P Parameter: Organism Value: A. thaliana
  misc_feature: MA Experiment 20000439 PARAMETER Experiment Name: At_Roots__P Parameter: Tissue Value: Roots vs. Whole Plant
  misc_feature: MA Experiment ID: 20000445 Result: Down-regulated in Transcription
  misc_feature: MA Experiment 20000445 PARAMETER Experiment Name: At_100uM_NAA__P Parameter: Age (day) Value: 14
  misc_feature: MA Experiment 20000445 PARAMETER Experiment Name: At_100uM_NAA__P Parameter: Organism Value: A. thaliana
  misc_feature: MA Experiment 20000445 PARAMETER Experiment Name: At_100uM_NAA__P Parameter: Plant Line Value: WS
  misc_feature: MA Experiment 20000445 PARAMETER Experiment Name: At_100uM_NAA__P Parameter: Timepoint (hr) Value: 6
  misc_feature: MA Experiment 20000445 PARAMETER Experiment Name: At_100uM_NAA__P Parameter: Tissue Value: Aerial
  misc_feature: MA Experiment 20000445 PARAMETER Experiment Name: At_100uM_NAA__P Parameter: Treatment Value: 100uM NAA vs. No Treatment
  misc_feature: MA Experiment ID: 20000460 Result: Down-regulated in Transcription
  misc_feature: MA Experiment 20000460 PARAMETER Experiment Name: At_10percent_PEG_P Parameter: Age (day) Value: 12
  misc_feature: MA Experiment 20000460 PARAMETER Experiment Name: At_10percent_PEG_P Parameter: Organism Value: A. thaliana
  misc_feature: MA Experiment 20000460 PARAMETER Experiment Name: At_10percent_PEG_P Parameter: Plant Line Value: WS
  misc_feature: MA Experiment 20000460 PARAMETER Experiment Name: At_10percent_PEG_P Parameter: Timepoint (day) Value: 12
  misc_feature: MA Experiment 20000460 PARAMETER Experiment Name: At_10percent_PEG_P Parameter: Tissue Value: Whole Plant
  misc_feature: MA Experiment 20000460 PARAMETER Experiment Name: At_10percent_PEG_P Parameter: Treatment Value: 10percent PEG vs. No Treatment
  misc_feature: MA Experiment ID: 20000495 Result: Down-regulated in Transcription
  misc_feature: MA Experiment 20000495 PARAMETER Experiment Name: At_Guard_Cells_P Parameter: Harvest Date Value: 8/2/2002
  misc_feature: MA Experiment 20000495 PARAMETER Experiment Name: At_Guard_Cells_P Parameter: Organism Value: A. thaliana
  misc_feature: MA Experiment 20000495 PARAMETER Experiment Name: At_Guard_Cells_P Parameter: Tissue Value: Guard Cells vs. Leaves
  misc_feature: MA Experiment ID: 20000496 Result: Down-regulated in Transcription
  misc_feature: MA Experiment 20000496 PARAMETER Experiment Name: At_Guard_Cells_P Parameter: Harvest Date Value: 7/19/2002
  misc_feature: MA Experiment 20000496 PARAMETER Experiment Name: At_Guard_Cells_P Parameter: Organism Value: Canola
  misc_feature: MA Experiment 20000496 PARAMETER Experiment Name: At_Guard_Cells_P Parameter: Tissue Value: Guard Cells vs. Leaves
  misc_feature: MA Experiment ID: 20001247 Result: Down-regulated in Transcription
  misc_feature: MA Experiment 20001247 PARAMETER Experiment Name: At_Far-red-induction_P Parameter: Age (day) Value: 7
  misc_feature: MA Experiment 20001247 PARAMETER Experiment Name: At_Far-red-induction_P Parameter: Light Value: Far-red vs. White
  misc_feature: MA Experiment 20001247 PARAMETER Experiment Name: At_Far-red-induction_P Parameter: Organism Value: A. thaliana
  misc_feature: MA Experiment 20001247 PARAMETER Experiment Name: At_Far-red-induction_P Parameter: Plant Line Value: Columbia
  misc_feature: MA Experiment 20001247 PARAMETER Experiment Name: At_Far-red-induction_P Parameter: Timepoint (hr) Value: 1
  misc_feature: MA Experiment 20001247 PARAMETER Experiment Name: At_Far-red-induction_P Parameter: Tissue Value: Whole Plant
  misc_feature: MA Experiment ID: 20001248 Result: Up-regulated in Transcription
  misc_feature: MA Experiment 20001248 PARAMETER Experiment Name: At_Far-red-induction_P Parameter: Age (day) Value: 7
  misc_feature: MA Experiment 20001248 PARAMETER Experiment Name: At_Far-red-induction_P Parameter: Light Value: Far-red vs. White
  misc_feature: MA Experiment 20001248 PARAMETER Experiment Name: At_Far-red-induction_P Parameter: Organism Value: A. thaliana
  misc_feature: MA Experiment 20001248 PARAMETER Experiment Name: At_Far-red-induction_P Parameter: Plant Line Value: Columbia
  misc_feature: MA Experiment 20001248 PARAMETER Experiment Name: At_Far-red-induction_P Parameter: Timepoint (hr) Value: 4
  misc_feature: MA Experiment 20001248 PARAMETER Experiment Name: At_Far-red-induction_P Parameter: Tissue Value: Whole Plant
  misc_feature: MA Experiment ID: 20001450 Result: Down-regulated in Transcription
  misc_feature: MA Experiment 20001450 PARAMETER Experiment Name: At_Far-red-induction_P Parameter: Age (day) Value: 7
  misc_feature: MA Experiment 20001450 PARAMETER Experiment Name: At_Far-red-induction_P Parameter: Light Value: Far-red vs. White
  misc_feature: MA Experiment 20001450 PARAMETER Experiment Name: At_Far-red-induction_P Parameter: Organism Value: A. thaliana
  misc_feature: MA Experiment 20001450 PARAMETER Experiment Name: At_Far-red-induction_P Parameter: Plant Line Value: Columbia
  misc_feature: MA Experiment 20001450 PARAMETER Experiment Name: At_Far-red-induction_P Parameter: Timepoint (hr) Value: 8
  misc_feature: MA Experiment 20001450 PARAMETER Experiment Name: At_Far-red-induction_P Parameter: Tissue Value: Whole Plant
  misc_feature: MA Experiment ID: 20001451 Result: Down-regulated in Transcription
  misc_feature: MA Experiment 20001451 PARAMETER Experiment Name: At_Far-red-induction_P Parameter: Age (day) Value: 7
  misc_feature: MA Experiment 20001451 PARAMETER Experiment Name: At_Far-red-induction_P Parameter: Light Value: Far-red vs. White
  misc_feature: MA Experiment 20001451 PARAMETER Experiment Name: At_Far-red-induction_P Parameter: Organism Value: A. thaliana
  misc_feature: MA Experiment 20001451 PARAMETER Experiment Name: At_Far-red-induction_P Parameter: Plant Line Value: Columbia
  misc_feature: MA Experiment 20001451 PARAMETER Experiment Name: At_Far-red-induction_P Parameter: Timepoint (hr) Value: 24
  misc_feature: MA Experiment 20001451 PARAMETER Experiment Name: At_Far-red-induction_P Parameter: Tissue Value: Whole Plant
  misc_feature: MA Experiment ID: 20001503 Result: Down-regulated in Transcription
  misc_feature: MA Experiment 20001503 PARAMETER Experiment Name: At_Far-red-enriched_P Parameter: Age (day) Value: 7
  misc_feature: MA Experiment 20001503 PARAMETER Experiment Name: At_Far-red-enriched_P Parameter: Light Value: Far-red enriched vs. White
  misc_feature: MA Experiment 20001503 PARAMETER Experiment Name: At_Far-red-enriched_P Parameter: Organism Value: A. thaliana
  misc_feature: MA Experiment 20001503 PARAMETER Experiment Name: At_Far-red-enriched_P Parameter: Plant Line Value: Columbia
  misc_feature: MA Experiment 20001503 PARAMETER Experiment Name: At_Far-red-enriched_P Parameter: Timepoint (day) Value: 3
  misc_feature: MA Experiment 20001503 PARAMETER Experiment Name: At_Far-red-enriched_P Parameter: Tissue Value: Whole Plant
  misc_feature: MA Experiment ID: 20001555 Result: Down-regulated in Transcription
  misc_feature: MA Experiment 20001555 PARAMETER Experiment Name: At_Drought_Soil_Dry_P Parameter: Age (day) Value: 24
  misc_feature: MA Experiment 20001555 PARAMETER Experiment Name: At_Drought_Soil_Dry_P Parameter: Organism Value: A. thaliana
  misc_feature: MA Experiment 20001555 PARAMETER Experiment Name: At_Drought_Soil_Dry_P Parameter: Plant Line Value: WS
  misc_feature: MA Experiment 20001555 PARAMETER Experiment Name: At_Drought_Soil_Dry_P Parameter: Post Timepoint (hr) Value: None
  misc_feature: MA Experiment 20001555 PARAMETER Experiment Name: At_Drought_Soil_Dry_P Parameter: Post-Treatment Value: None
  misc_feature: MA Experiment 20001555 PARAMETER Experiment Name: At_Drought_Soil_Dry_P Parameter: Timepoint (day) Value: 10
  misc_feature: MA Experiment 20001555 PARAMETER Experiment Name: At_Drought_Soil_Dry_P Parameter: Treatment Value: Drought vs. No Drought
  misc_feature: MA Experiment ID: 20001556 Result: Down-regulated in Transcription
  misc_feature: MA Experiment 20001556 PARAMETER Experiment Name: At_Drought_Soil_Dry_P Parameter: Age (day) Value: 26
  misc_feature: MA Experiment 20001556 PARAMETER Experiment Name: At_Drought_Soil_Dry_P Parameter: Organism Value: A. thaliana
  misc_feature: MA Experiment 20001556 PARAMETER Experiment Name: At_Drought_Soil_Dry_P Parameter: Plant Line Value: WS
  misc_feature: MA Experiment 20001556 PARAMETER Experiment Name: At_Drought_Soil_Dry_P Parameter: Post Timepoint (hr) Value: None
  misc_feature: MA Experiment 20001556 PARAMETER Experiment Name: At_Drought_Soil_Dry_P Parameter: Post-Treatment Value: None
  misc_feature: MA Experiment 20001556 PARAMETER Experiment Name: At_Drought_Soil_Dry_P Parameter: Timepoint (day) Value: 12
  misc_feature: MA Experiment 20001556 PARAMETER Experiment Name: At_Drought_Soil_Dry_P Parameter: Treatment Value: Drought vs. No Drought
  misc_feature: MA Experiment ID: 20001557 Result: Up-regulated in Transcription
  misc_feature: MA Experiment 20001557 PARAMETER Experiment Name: At_Drought_Soil_Dry_P Parameter: Age (day) Value: 27
  misc_feature: MA Experiment 20001557 PARAMETER Experiment Name: At_Drought_Soil_Dry_P Parameter: Organism Value: A. thaliana
  misc_feature: MA Experiment 20001557 PARAMETER Experiment Name: At_Drought_Soil_Dry_P Parameter: Plant Line Value: WS
  misc_feature: MA Experiment 20001557 PARAMETER Experiment Name: At_Drought_Soil_Dry_P Parameter: Post Timepoint (hr) Value: 3
  misc_feature: MA Experiment 20001557 PARAMETER Experiment Name: At_Drought_Soil_Dry_P Parameter: Post-Treatment Value: Re-Water vs. No Drought
  misc_feature: MA Experiment 20001557 PARAMETER Experiment Name: At_Drought_Soil_Dry_P Parameter: Timepoint (day) Value: 13
  misc_feature: MA Experiment 20001557 PARAMETER Experiment Name: At_Drought_Soil_Dry_P Parameter: Treatment Value: Drought vs. No Drought
  misc_feature: MA Experiment ID: 20001757 Result: Up-regulated in Transcription
  misc_feature: MA Experiment 20001757 PARAMETER Experiment Name: At_50mM_NH4NO3_L-to-H_P Parameter: Timepoint (hr) Value: 6
  misc_feature: MA Experiment 20001757 PARAMETER Experiment Name: At_50mM_NH4NO3_L-to-H_P Parameter: Tissue Value: Leaf
  misc_feature: MA Experiment 20001757 PARAMETER Experiment Name: At_50mM_NH4NO3_L-to-H_P Parameter: Treatment Value: 50mM NH4NO3 vs 100mM Mannitol
  misc_feature: MA Experiment ID: 20001905 Result: Down-regulated in Transcription
  misc_feature: MA Experiment 20001905 PARAMETER Experiment Name: At_Drought_Reproduction_P Parameter: Age (day) Value: 40
  misc_feature: MA Experiment 20001905 PARAMETER Experiment Name: At_Drought_Reproduction_P Parameter: Organism Value: A. thaliana
  misc_feature: MA Experiment 20001905 PARAMETER Experiment Name: At_Drought_Reproduction_P Parameter: Plant Line Value: WS
  misc_feature: MA Experiment 20001905 PARAMETER Experiment Name: At_Drought_Reproduction_P Parameter: Timepoint (day) Value: 10
  misc_feature: MA Experiment 20001905 PARAMETER Experiment Name: At_Drought_Reproduction_P Parameter: Tissue Value: Rosettes
  misc_feature: MA Experiment 20001905 PARAMETER Experiment Name: At_Drought_Reproduction_P Parameter: Treatment Value: Drought vs. No Drought
  misc_feature: MA Experiment ID: 20001911 Result: Down-regulated in Transcription
  misc_feature: MA Experiment 20001911 PARAMETER Experiment Name: At_Drought_Reproduction_P Parameter: Age (day) Value: 40
  misc_feature: MA Experiment 20001911 PARAMETER Experiment Name: At_Drought_Reproduction_P Parameter: Organism Value: A. thaliana
  misc_feature: MA Experiment 20001911 PARAMETER Experiment Name: At_Drought_Reproduction_P Parameter: Plant Line Value: WS
  misc_feature: MA Experiment 20001911 PARAMETER Experiment Name: At_Drought_Reproduction_P Parameter: Timepoint (day) Value: 10
  misc_feature: MA Experiment 20001911 PARAMETER Experiment Name: At_Drought_Reproduction_P Parameter: Tissue Value: Flowers
  misc_feature: MA Experiment 20001911 PARAMETER Experiment Name: At_Drought_Reproduction_P Parameter: Treatment Value: Drought vs. No Drought
atgctcaaattggttcatacaacaacaacaacaactacaacaacaacaacaaacaccgagttcgtaaaatcatcatgcactttcacaacgtacccaagactctgtttctcttcactctcaactcatgctagtctcatccaaacaagccccaagctcatggctcatgcggctctcaacatcacattagcctcggctaaagtaacttcagcaatgatggtgcgtctctcgaatagtcggctcaagcctaaagaagtctcggccatgagagactgcgtcgaggagttaggtgacacgttggaggagcttaggaaatcgattggtgagatgtgtcagctaagtggctcgaactatgaagtttacataagcgatatacagacttgggtcagtgcggctttgacagatgtgaacacatgtactgacggatttgaaggagaagatatggacgggaaggttaaggttttggttagagggaggattttggttattgctcatttaacaagtaatgctttagctttgattaatcactttgcttctattcatggctaa

SEQ ID NO: 96259 - protein, 181 aa, Arabidopsis thaliana; identical to SEQ ID NO: 86782
  peptide (1)..(181): Ceres Seq. ID no. 12732597
  misc_feature (1)..(181): Homolog of NCBI NO: 30697666 NR Description: pectinesterase family [Arabidopsis thaliana]
  misc_feature (1)..(181): Homolog of NCBI NO: 24417332 NR Description: unknown [Arabidopsis thaliana]
  misc_feature (17)..(181): Homolog of NCBI NO: 8096279 NR Description: DC1.2 homologue [Nicotiana tabacum]
  misc_feature (9)..(180): Homolog of NCBI NO: 7488727 NR Description: 21K protein precursor - alfalfa
  misc_feature (2)..(180): Homolog of NCBI NO: 15241799 NR Description: ripening-related protein - like; protein id: supported by cDNA: 9669., supported by cDNA: gi_14423453,
  misc_feature (2)..(180): Homolog of NCBI NO: 21618088 NR Description: ripening-related protein-like [Arabidopsis
  misc_feature (4)..(178): Homolog of NCBI NO: 7406663 NR Description: putative ripening-related protein [Vitis vinifera]
  misc_feature (20)..(180): Homolog of NCBI NO: 112717 NR Description: 21 KD PROTEIN PRECURSOR (1.2 PROTEIN)
  misc_feature (14)..(177): Homolog of NCBI NO: 15232790 NR Description: putative protein; protein id: At3g47380.1
  misc_feature (7)..(178): Homolog of NCBI NO: 30696750 NR Description: hypothetical protein [Arabidopsis thaliana]

SEQ ID NO: 96260 - protein, 129 aa, Arabidopsis thaliana; identical to SEQ ID NO: 26452
  peptide (1)..(129): Ceres Seq. ID no. 12732598
  misc_feature (1)..(129): Homolog of NCBI NO: 30697666 NR Description: pectinesterase family [Arabidopsis thaliana]
  misc_feature (1)..(129): Homolog of NCBI NO: 24417332 NR Description: unknown [Arabidopsis thaliana]
  misc_feature (1)..(129): Homolog of NCBI NO: 8096279 NR Description: DC1.2 homologue [Nicotiana tabacum]
  misc_feature (1)..(128): Homolog of NCBI NO: 7488727 NR Description: 21K protein precursor - alfalfa
  misc_feature (1)..(128): Homolog of NCBI NO: 15241799 NR Description: ripening-related protein - like; protein id: supported by cDNA: 9669., supported by cDNA: gi_14423453,
  misc_feature (1)..(128): Homolog of NCBI NO: 21618088 NR Description: ripening-related protein-like [Arabidopsis
  misc_feature (1)..(126): Homolog of NCBI NO: 7406663 NR Description: putative ripening-related protein [Vitis vinifera]
  misc_feature (1)..(128): Homolog of NCBI NO: 112717 NR Description: 21 KD PROTEIN PRECURSOR (1.2 PROTEIN)
  misc_feature (1)..(125): Homolog of NCBI NO: 15232790 NR Description: putative protein; protein id: At3g47380.1
  misc_feature (1)..(126): Homolog of NCBI NO: 30696750 NR Description: hypothetical protein [Arabidopsis thaliana]

SEQ ID NO: 96261 - protein, 111 aa, Arabidopsis thaliana
  peptide (1)..(111): Ceres Seq. ID no. 12732599
  misc_feature (1)..(111): Homolog of NCBI NO: 30697666 NR Description: pectinesterase family [Arabidopsis thaliana]
  misc_feature (1)..(111): Homolog of NCBI NO: 24417332 NR Description: unknown [Arabidopsis thaliana]
  misc_feature (1)..(111): Homolog of NCBI NO: 8096279 NR Description: DC1.2 homologue [Nicotiana tabacum]
  misc_feature (1)..(110): Homolog of NCBI NO: 7488727 NR Description: 21K protein precursor - alfalfa
  misc_feature (1)..(110): Homolog of NCBI NO: 15241799 NR Description: ripening-related protein - like; protein id: supported by cDNA: 9669., supported by cDNA: gi_14423453,
  misc_feature (1)..(110): Homolog of NCBI NO: 21618088 NR Description: ripening-related protein-like [Arabidopsis
  misc_feature (1)..(108): Homolog of NCBI NO: 7406663 NR Description: putative ripening-related protein [Vitis vinifera]
  misc_feature (1)..(110): Homolog of NCBI NO: 112717 NR Description: 21 KD PROTEIN PRECURSOR (1.2 PROTEIN)
  misc_feature (1)..(107): Homolog of NCBI NO: 15232790 NR Description: putative protein; protein id: At3g47380.1
  misc_feature (1)..(108): Homolog of NCBI NO: 30696750 NR Description: hypothetical protein [Arabidopsis thaliana]
MMVRLSNSRLKPKEVSAMRDCVEELGDTLEELRKSIGEMCQLSGSNYEVYISDIQTWVSAALTDVNTCTDGFEGEDMDGKVKVLVRGRILVIAHLTSNALALINHFASIHG

SEQ ID NO: 96262 - DNA, 951 bp, Arabidopsis thaliana
  misc_feature (1)..(951): Ceres Seq. ID no. 12732604
  misc_feature: MA Experiment ID: 20000227 Result: Up-regulated in Transcription
  misc_feature: MA Experiment 20000227 PARAMETER Experiment Name: At_Root-Tips-vs-Tops_P Parameter: Tissue Value: Root Tips vs. Root Tops
atgaggagtgacgtggcacgtctcaggtgtggggagacgattccattgcttggaatgggaacttattgtcctcaaaaagatcgagagagcaccatatcagccgtccatcaagctattaagatagggtacagacattttgacacagcaaagatatatggatcagaagaagctcttggaactgcattgggacaagctatctcctatgggactgtccaaagagatgatctttttgtcacttcaaagttatggtctagtgatcaccatgaccctatctctgccctcatacaaactctcaagacaatgggtctagactatcttgacaactacttggtgcattggccaataaagctaaagccgggagttagtgagcctataccaaaggaagatgagtttgagaaagatttgggaattgaagaaacttggcaaggcatggagagatgcttggagatgggtttgtgcagatctattggtgttagcaacttctcttctaagaagatctttgatctccttgatttcgcttctgtctctccatcggtgaatcaggtggaaatgcatccattgtggagacaaagaaagctaaggaaagtgtgtgaagagaacaatatccatgtaagtggatactccccacttggtgggccagggaattgttggggatcaacggctgtgattgaacatcctatcatcaaatccattgctctcaagcataatgccactcctgctcaggtggctctaagatggggaatgtcaaaaggagcaagtgtgatcgtcaagagttttaatggagcaagaatgatagagaacaagagagccttagagattaaattggatgatcaagacttgtcactcattgaccatttggaggaatggaagatcatgagaggagacttccttgttaatcaaaccacaagcccttacaaatccatccaacaactttgggataatgagatttaa

SEQ ID NO: 96263 - protein, 316 aa, Arabidopsis thaliana
  peptide (1)..(316): Ceres Seq. ID no. 12732605
  misc_feature (1)..(316): Homolog of NCBI NO: 15241832 NR Description: aldo/keto reductase family; protein id:
  misc_feature (7)..(316): Homolog of NCBI NO: 30687247 NR Description: aldo/keto reductase family [Arabidopsis thaliana]
  misc_feature (4)..(316): Homolog of NCBI NO: 40781599 NR Description: reductase 1 [Hydrangea macrophylla]
  misc_feature (5)..(316): Homolog of NCBI NO: 6478216 NR Description: putative NADPH-dependent oxidoreductase [Papaver
  misc_feature (11)..(316): Homolog of NCBI NO: 28393400 NR Description: putative aldo/keto reductase [Arabidopsis
  misc_feature (8)..(316): Homolog of NCBI NO: 2792155 NR Description: chalcone reductase [Sesbania rostrata]
  misc_feature (8)..(316): Homolog of NCBI NO: 30687261 NR Description: aldo/keto reductase family [Arabidopsis thaliana]
  misc_feature (6)..(316): Homolog of NCBI NO: 37530540 NR Description: putative NADPH-dependent oxidoreductase [Oryza
  misc_feature (12)..(316): Homolog of NCBI NO: 37530522 NR Description: putative NADPH-dependent oxidoreductase [Oryza
  misc_feature (11)..(315): Homolog of NCBI NO: 40781598 NR Description: reductase 2 [Hydrangea macrophylla]
MRSDVARLRCGETIPLLGMGTYCPQKDRESTISAVHQAIKIGYRHFDTAKIYGSEEALGTALGQAISYGTVQRDDLFVTSKLWSSDHHDPISALIQTLKTMGLDYLDNYLVHWPIKLKPGVSEPIPKEDEFEKDLGIEETWQGMERCLEMGLCRSIGVSNFSSKKIFDLLDFASVSPSVNQVEMHPLWRQRKLRKVCEENNIHVSGYSPLGGPGNCWGSTAVIEHPIIKSIALKHNATPAQVALRWGMSKGASVIVKSFNGARMIENKRALEIKLDDQDLSLIDHLEEWKIMRGDFLVNQTTSPYKSIQQLWDNEI

SEQ ID NO: 96264 - protein, 298 aa, Arabidopsis thaliana
  peptide (1)..(298): Ceres Seq. ID no. 12732606
  misc_feature (1)..(298): Homolog of NCBI NO: 15241832 NR Description: aldo/keto reductase family; protein id:
  misc_feature (1)..(298): Homolog of NCBI NO: 30687247 NR Description: aldo/keto reductase family [Arabidopsis thaliana]
  misc_feature (1)..(298): Homolog of NCBI NO: 40781599 NR Description: reductase 1 [Hydrangea macrophylla]
  misc_feature (1)..(298): Homolog of NCBI NO: 6478216 NR Description: putative NADPH-dependent oxidoreductase [Papaver
  misc_feature (1)..(298): Homolog of NCBI NO: 28393400 NR Description: putative aldo/keto reductase [Arabidopsis
  misc_feature (1)..(298): Homolog of NCBI NO: 2792155 NR Description: chalcone reductase [Sesbania rostrata]
  misc_feature (1)..(298): Homolog of NCBI NO: 30687261 NR Description: aldo/keto reductase family [Arabidopsis thaliana]
  misc_feature (1)..(298): Homolog of NCBI NO: 37530540 NR Description: putative NADPH-dependent oxidoreductase [Oryza
  misc_feature (1)..(298): Homolog of NCBI NO: 37530522 NR Description: putative NADPH-dependent oxidoreductase [Oryza
  misc_feature (1)..(297): Homolog of NCBI NO: 40781598 NR Description: reductase 2 [Hydrangea macrophylla]
MGTYCPQKDRESTISAVHQAIKIGYRHFDTAKIYGSEEALGTALGQAISYGTVQRDDLFVTSKLWSSDHHDPISALIQTLKTMGLDYLDNYLVHWPIKLKPGVSEPIPKEDEFEKDLGIEETWQGMERCLEMGLCRSIGVSNFSSKKIFDLLDFASVSPSVNQVEMHPLWRQRKLRKVCEENNIHVSGYSPLGGPGNCWGSTAVIEHPIIKSIALKHNATPAQVALRWGMSKGASVIVKSFNGARMIENKRALEIKLDDQDLSLIDHLEEWKIMRGDFLVNQTTSPYKSIQQLWDNEI

SEQ ID NO: 96265 - protein, 216 aa, Arabidopsis thaliana
  peptide (1)..(216): Ceres Seq. ID no. 12732607
  misc_feature (1)..(216): Homolog of NCBI NO: 15241832 NR Description: aldo/keto reductase family; protein id:
  misc_feature (1)..(216): Homolog of NCBI NO: 30687247 NR Description: aldo/keto reductase family [Arabidopsis thaliana]
  misc_feature (1)..(216): Homolog of NCBI NO: 40781599 NR Description: reductase 1 [Hydrangea macrophylla]
  misc_feature (1)..(216): Homolog of NCBI NO: 6478216 NR Description: putative NADPH-dependent oxidoreductase [Papaver
  misc_feature (1)..(216): Homolog of NCBI NO: 28393400 NR Description: putative aldo/keto reductase [Arabidopsis
  misc_feature (1)..(216): Homolog of NCBI NO: 2792155 NR Description: chalcone reductase [Sesbania rostrata]
  misc_feature (1)..(216): Homolog of NCBI NO: 30687261 NR Description: aldo/keto reductase family [Arabidopsis thaliana]
  misc_feature (1)..(216): Homolog of NCBI NO: 37530540 NR Description: putative NADPH-dependent oxidoreductase [Oryza
  misc_feature (1)..(216): Homolog of NCBI NO: 37530522 NR Description: putative NADPH-dependent oxidoreductase [Oryza
  misc_feature (1)..(215): Homolog of NCBI NO: 40781598 NR Description: reductase 2 [Hydrangea macrophylla]
MGLDYLDNYLVHWPIKLKPGVSEPIPKEDEFEKDLGIEETWQGMERCLEMGLCRSIGVSNFSSKKIFDLLDFASVSPSVNQVEMHPLWRQRKLRKVCEENNIHVSGYSPLGGPGNCWGSTAVIEHPIIKSIALKHNATPAQVALRWGMSKGASVIVKSFNGARMIENKRALEIKLDDQDLSLIDHLEEWKIMRGDFLVNQTTSPYKSIQQLWDNEI

SEQ ID NO: 96266 - DNA, 1851 bp, Arabidopsis thaliana
  misc_feature (1)..(1851): Ceres Seq. ID no. 12732627
  misc_feature: MA Experiment ID: 20000171 Result: Down-regulated in Transcription
  misc_feature: MA Experiment 20000171 PARAMETER Experiment Name: At_42deg_Heat_P Parameter: Age (day) Value: 14
  misc_feature: MA Experiment 20000171 PARAMETER Experiment Name: At_42deg_Heat_P Parameter: Organism Value: A. thaliana
  misc_feature: MA Experiment 20000171 PARAMETER Experiment Name: At_42deg_Heat_P Parameter: Plant Line Value: WS
  misc_feature: MA Experiment 20000171 PARAMETER Experiment Name: At_42deg_Heat_P Parameter: Temperature (deg C) Value: 42 vs. 22
  misc_feature: MA Experiment 20000171 PARAMETER Experiment Name: At_42deg_Heat_P Parameter: Timepoint (hr) Value: 1
  misc_feature: MA Experiment 20000171 PARAMETER Experiment Name: At_42deg_Heat_P Parameter: Tissue Value: Aerial
  misc_feature: MA Experiment ID: 20000173 Result: Down-regulated in Transcription
  misc_feature: MA Experiment 20000173 PARAMETER Experiment Name: At_42deg_Heat_P Parameter: Age (day) Value: 14
  misc_feature: MA Experiment 20000173 PARAMETER Experiment Name: At_42deg_Heat_P Parameter: Organism Value: A. thaliana
  misc_feature: MA Experiment 20000173 PARAMETER Experiment Name: At_42deg_Heat_P Parameter: Plant Line Value: WS
  misc_feature: MA Experiment 20000173 PARAMETER Experiment Name: At_42deg_Heat_P Parameter: Temperature (deg C) Value: 42 vs. 22
  misc_feature: MA Experiment 20000173 PARAMETER Experiment Name: At_42deg_Heat_P Parameter: Timepoint (hr) Value: 6
  misc_feature: MA Experiment 20000173 PARAMETER Experiment Name: At_42deg_Heat_P Parameter: Tissue Value: Aerial
  misc_feature: MA Experiment ID: 20000184 Result: Down-regulated in Transcription
  misc_feature: MA Experiment 20000184 PARAMETER Experiment Name: At_Shoots__P Parameter: Age (day) Value: 7
  misc_feature: MA Experiment 20000184 PARAMETER Experiment Name: At_Shoots__P Parameter: Tissue Value: Shoots vs. Whole Plant
  misc_feature: MA Experiment ID: 20000211 Result: Up-regulated in Transcription
  misc_feature: MA Experiment 20000211 PARAMETER Experiment Name: At_0.001percent_MeJA__P Parameter: Age (day) Value: 14
  misc_feature: MA Experiment 20000211 PARAMETER Experiment Name: At_0.001percent_MeJA__P Parameter: Organism Value: A. thaliana
  misc_feature: MA Experiment 20000211 PARAMETER Experiment Name: At_0.001percent_MeJA__P Parameter: Plant Line Value: WS
  misc_feature: MA Experiment 20000211 PARAMETER Experiment Name: At_0.001percent_MeJA__P Parameter: Timepoint (hr) Value: 1
  misc_feature: MA Experiment 20000211 PARAMETER Experiment Name: At_0.001percent_MeJA__P Parameter: Tissue Value: Aerial
  misc_feature: MA Experiment 20000211 PARAMETER Experiment Name: At_0.001percent_MeJA__P Parameter: Treatment Value: 0.001percent MeJA vs. No Treatment
  misc_feature: MA Experiment ID: 20000234 Result: Down-regulated in Transcription
  misc_feature: MA Experiment 20000234 PARAMETER Experiment Name: At_Siliques_P Parameter: Age (day) Value: 21
  misc_feature: MA Experiment 20000234 PARAMETER Experiment Name: At_Siliques_P Parameter: Organism Value: A. thaliana
  misc_feature: MA Experiment 20000234 PARAMETER Experiment Name: At_Siliques_P Parameter: Plant Line Value: WS
  misc_feature: MA Experiment 20000234 PARAMETER Experiment Name: At_Siliques_P Parameter: Tissue Value: Less Than 5mm Siliques vs. Whole Plant
  misc_feature: MA Experiment ID: 20000235 Result: Down-regulated in Transcription
  misc_feature: MA Experiment 20000235 PARAMETER Experiment Name: At_Siliques_P Parameter: Age (day) Value: 21
  misc_feature: MA Experiment 20000235 PARAMETER Experiment Name: At_Siliques_P Parameter: Organism Value: A. thaliana
  misc_feature: MA Experiment 20000235 PARAMETER Experiment Name: At_Siliques_P Parameter: Plant Line Value: WS
  misc_feature: MA Experiment 20000235 PARAMETER Experiment Name: At_Siliques_P Parameter: Tissue Value: 5-10mm Siliques vs. Whole Plant
  misc_feature: MA Experiment ID: 20000264 Result: Up-regulated in Transcription
  misc_feature: MA Experiment 20000264 PARAMETER Experiment Name: At_Open_Flower_P Parameter: Age (day) Value: 21
  misc_feature: MA Experiment 20000264 PARAMETER Experiment Name: At_Open_Flower_P Parameter: Plant Line Value: WS
  misc_feature: MA Experiment 20000264 PARAMETER Experiment Name: At_Open_Flower_P Parameter: Tissue Value: Open Flower vs. Whole Plant
  misc_feature: MA Experiment ID: 20000438 Result: Down-regulated in Transcription
  misc_feature: MA Experiment 20000438 PARAMETER Experiment Name: At_Shoots__P Parameter: Age (day) Value: 14
  misc_feature: MA Experiment 20000438 PARAMETER Experiment Name: At_Shoots__P Parameter: Tissue Value: Shoots vs. Whole Plant
  misc_feature: MA Experiment ID: 20000794 Result: Up-regulated in Transcription
  misc_feature: MA Experiment 20000794 PARAMETER Experiment Name: At_Petals_P Parameter: Age (day) Value: 23-25 days
  misc_feature: MA Experiment 20000794 PARAMETER Experiment Name: At_Petals_P Parameter: Plant Line Value: WS
  misc_feature: MA Experiment 20000794 PARAMETER Experiment Name: At_Petals_P Parameter: Tissue Value: Petals vs. Whole plant
  misc_feature: MA Experiment ID: 20001457 Result: Down-regulated in Transcription
  misc_feature: MA Experiment 20001457 PARAMETER Experiment Name: At_50mM_NH4NO3_L-to-H_P Parameter: Age (day) Value: Undefined
  misc_feature: MA Experiment 20001457 PARAMETER Experiment Name: At_50mM_NH4NO3_L-to-H_P Parameter: Organism Value: Undefined
  misc_feature: MA Experiment 20001457 PARAMETER Experiment Name: At_50mM_NH4NO3_L-to-H_P Parameter: Plant Line Value: Undefined
  misc_feature: MA Experiment 20001457 PARAMETER Experiment Name: At_50mM_NH4NO3_L-to-H_P Parameter: Timepoint (hr) Value: 0.5
  misc_feature: MA Experiment 20001457 PARAMETER Experiment Name: At_50mM_NH4NO3_L-to-H_P Parameter: Tissue Value: Siliques
  misc_feature: MA Experiment 20001457 PARAMETER Experiment Name: At_50mM_NH4NO3_L-to-H_P Parameter: Treatment Value: 50mM NH4NO3 vs. 100mM Manitol
  misc_feature: MA Experiment ID: 20001556 Result: Down-regulated in Transcription
  misc_feature: MA Experiment 20001556 PARAMETER Experiment Name: At_Drought_Soil_Dry_P Parameter: Age (day) Value: 26
  misc_feature: MA Experiment 20001556 PARAMETER Experiment Name: At_Drought_Soil_Dry_P Parameter: Organism Value: A. thaliana
  misc_feature: MA Experiment 20001556 PARAMETER Experiment Name: At_Drought_Soil_Dry_P Parameter: Plant Line Value: WS
  misc_feature: MA Experiment 20001556 PARAMETER Experiment Name: At_Drought_Soil_Dry_P Parameter: Post Timepoint (hr) Value: None
  misc_feature: MA Experiment 20001556 PARAMETER Experiment Name: At_Drought_Soil_Dry_P Parameter: Post-Treatment Value: None
  misc_feature: MA Experiment 20001556 PARAMETER Experiment Name: At_Drought_Soil_Dry_P Parameter: Timepoint (day) Value: 12
  misc_feature: MA Experiment 20001556 PARAMETER Experiment Name: At_Drought_Soil_Dry_P Parameter: Treatment Value: Drought vs. No Drought
  misc_feature: MA Experiment ID: 20001560 Result: Down-regulated in Transcription
  misc_feature: MA Experiment 20001560 PARAMETER Experiment Name: At_Drought_Soil_Dry_P Parameter: Age (day) Value: 28
  misc_feature: MA Experiment 20001560 PARAMETER Experiment Name: At_Drought_Soil_Dry_P Parameter: Organism Value: A. thaliana
  misc_feature: MA Experiment 20001560 PARAMETER Experiment Name: At_Drought_Soil_Dry_P Parameter: Plant Line Value: WS
  misc_feature: MA Experiment 20001560 PARAMETER Experiment Name: At_Drought_Soil_Dry_P Parameter: Post Timepoint (hr) Value: None
  misc_feature: MA Experiment 20001560 PARAMETER Experiment Name: At_Drought_Soil_Dry_P Parameter: Post-Treatment Value: None
  misc_feature: MA Experiment 20001560 PARAMETER Experiment Name: At_Drought_Soil_Dry_P Parameter: Timepoint (day) Value: 14
  misc_feature: MA Experiment 20001560 PARAMETER Experiment Name: At_Drought_Soil_Dry_P Parameter: Treatment Value: Drought vs. No Drought
atggagagaaagcctcttgaacttgagtcgacggataaccaccagaatccttcctccgccgtatacggtggctctgttacggcggttgactctgttgaagaagatgttcagaatcagaagaaagtcgtttatagaggctggaaagtcatgccctttattattggaaatgagacatttgagaagcttgggatcattggaacactatcaaaccttctggtttatttaactgcagtcttcaacctgaagagtattacagctgcaaccatcattaacgcctttagtggcacaattaatttcggaactttcgttgctgcttttctctgtgacacttacttcggtcgatacaagactctaagtgtcgcggtcatcgcatgttttcttggatcatttgtgatactattgactgcagcagtgccacaactgcatccagctgcatgtggaacagcggcggatagcatatgtaacgggccaagtggaggccagatagcgtttctactgatgggtctcgggttccttgtagtgggagcgggcggtattagaccgtgtaacttagcttttggggctgatcagtttaacccgaaaagcgaatcagggaaaagagggattgacagtttctttaattggtatttctttaccttcactttcgcgcagatcctgtcgctgactctagtcgtctacgttcagtctaatgtcagttggacgatcggtctaaccatccctgccgttctaatgtttttggcctgcttgattttctttgcgggcgataagttgtatgtgaagatcaaagcctcgggtagtccattggccggtatagctcaagttatagcggttgcgatcaagaaacgcggattaaagcccgcgaaacagccttggcttaacctttacaattactacccaccaaaatacgcaaactccaagctcaaatacacagaccaattcagatttcttgataaagccgctatcttgactcctgaagacaagttgcagccagatggtaagcctgctgatccttggaagctctgtacaatgcaacaagttgaagaagtgaagtgcatcgtgagagtgcttcctatatggtttgcatcatcaatttactacttaaccataactcaacaaatgacttatcccgtcttccaagcccttcagagcgaccgtcgcttaggctcaggaggttttgtgattcccgcagccacctacgtggttttcttgatgacgggaatgacagttttcatcgtagtctacgaccgtgtacttgtgccaaccatgagaagaattactggtctagacaccgggataacgctcttgcagagaattggaactggcattttcttcgctaccgcgagtttagtagtcgcgggatttgtcgaggaacgaaggagaacattcgctctgactaaaccaacactcggtatggcgccaagaaagggagaaatctcgtcgatgtcagctatgtggctgattccgcagctctcactggcgggtgtagcagaggcatttgcagccattggacaaatggagttttactacaagcagtttcccgagaacatgaggagtttcgctggatccatcttttacgttggaggaggagtttcgagttaccttggtagcttcttgattgcaacagttcacaggacaacacagaactcgtcagggggtaactggttagctgaggatttgaacaaaggaagattggatctcttctatttcatgatcgctggaatcctggcagttaattttgcttatttcttggtgatgtcaagatggtataggtacaaaggaagtgatgacgaagtgacaacatatgaaaccaatgaaaatatcatcaaacagcaagacaagaacgttgcctga

SEQ ID NO: 96267 - protein, 616 aa, Arabidopsis thaliana
  peptide (1)..(616): Ceres Seq. ID no. 12732628
  misc_feature (115)..(528): Pfam Name: POT family Pfam Description: POT family
  misc_feature (1)..(614): Homolog of NCBI NO: 7488141 NR Description: probable peptide transport protein T17F15.170 - thaliana >gi|4678332|emb|CAB41143.1| putative peptide transporter
  misc_feature (1)..(614): Homolog of NCBI NO: 18408546 NR Description: putative peptide transporter; protein id: supported by cDNA: gi_13877878, supported by cDNA: gi_16226700 thaliana] >gi|13877879|gb|AAK44017.1|AF370202_1 putative peptide
  misc_feature (1)..(614): Homolog of NCBI NO: 16226701 NR Description: AT3g47960/T17F15_170 [Arabidopsis thaliana]
  misc_feature (29)..(592): Homolog of NCBI NO: 15221883 NR Description: peptide transporter, putative; protein id: supported by cDNA: gi_17979086 [Arabidopsis thaliana]
MERKPLELESTDNHQNPSSAVYGGSVTAVDSVEEDVQNQKKVVYRGWKVMPFIIGNETFEKLGIIGTLSNLLVYLTAVFNLKSITAATIINAFSGTINFGTFVAAFLCDTYFGRYKTLSVAVIACFLGSFVILLTAAVPQLHPAACGTAADSICNGPSGGQIAFLLMGLGFLVVGAGGIRPCNLAFGADQFNPKSESGKRGIDSFFNWYFFTFTFAQILSLTLVVYVQSNVSWTIGLTIPAVLMFLACLIFFAGDKLYVKIKASGSPLAGIAQVIAVAIKKRGLKPAKQPWLNLYNYYPPKYANSKLKYTDQFRFLDKAAILTPEDKLQPDGKPADPWKLCTMQQVEEVKCIVRVLPIWFASSIYYLTITQQMTYPVFQALQSDRRLGSGGFVIPAATYVVFLMTGMTVFIVVYDRVLVPTMRRITGLDTGITLLQRIGTGIFFATASLVVAGFVEERRRTFALTKPTLGMAPRKGEISSMSAMWLIPQLSLAGVAEAFAAIGQMEFYYKQFPENMRSFAGSIFYVGGGVSSYLGSFLIATVHRTTQNSSGGNWLAEDLNKGRLDLFYFMIAGILAVNFAYFLVMSRWYRYKGSDDEVTTYETNENIIKQQDKNVA

SEQ ID NO: 96268 - protein, 567 aa, Arabidopsis thaliana
  peptide (1)..(567): Ceres Seq. ID no. 12732629
  misc_feature (66)..(479): Pfam Name: POT family Pfam Description: POT family
  misc_feature (1)..(565): Homolog of NCBI NO: 7488141 NR Description: probable peptide transport protein T17F15.170 - thaliana >gi|4678332|emb|CAB41143.1| putative peptide transporter
  misc_feature (1)..(565): Homolog of NCBI NO: 18408546 NR Description: putative peptide transporter; protein id: supported by cDNA: gi_13877878, supported by cDNA: gi_16226700 thaliana] >gi|13877879|gb|AAK44017.1|AF370202_1 putative peptide
  misc_feature (1)..(565): Homolog of NCBI NO: 16226701 NR Description: AT3g47960/T17F15_170 [Arabidopsis thaliana]
  misc_feature (1)..(543): Homolog of NCBI NO: 15221883 NR Description: peptide transporter, putative; protein id: supported by cDNA: gi_17979086 [Arabidopsis thaliana]
MPFIIGNETFEKLGIIGTLSNLLVYLTAVFNLKSITAATIINAFSGTINFGTFVAAFLCDTYFGRYKTLSVAVIACFLGSFVILLTAAVPQLHPAACGTAADSICNGPSGGQIAFLLMGLGFLVVGAGGIRPCNLAFGADQFNPKSESGKRGIDSFFNWYFFTFTFAQILSLTLVVYVQSNVSWTIGLTIPAVLMFLACLIFFAGDKLYVKIKASGSPLAGIAQVIAVAIKKRGLKPAKQPWLNLYNYYPPKYANSKLKYTDQFRFLDKAAILTPEDKLQPDGKPADPWKLCTMQQVEEVKCIVRVLPIWFASSIYYLTITQQMTYPVFQALQSDRRLGSGGFVIPAATYVVFLMTGMTVFIVVYDRVLVPTMRRITGLDTGITLLQRIGTGIFFATASLVVAGFVEERRRTFALTKPTLGMAPRKGEISSMSAMWLIPQLSLAGVAEAFAAIGQMEFYYKQFPENMRSFAGSIFYVGGGVSSYLGSFLIATVHRTTQNSSGGNWLAEDLNKGRLDLFYFMIAGILAVNFAYFLVMSRWYRYKGSDDEVTTYETNENIIKQQDKNVA

SEQ ID NO: 96269 - protein, 450 aa, Arabidopsis thaliana
  peptide (1)..(450): Ceres Seq. ID no. 12732630
  misc_feature (1)..(362): Pfam Name: POT family Pfam Description: POT family
  misc_feature (1)..(448): Homolog of NCBI NO: 7488141 NR Description: probable peptide transport protein T17F15.170 - thaliana >gi|4678332|emb|CAB41143.1| putative peptide transporter
  misc_feature (1)..(448): Homolog of NCBI NO: 18408546 NR Description: putative peptide transporter; protein id: supported by cDNA: gi_13877878, supported by cDNA: gi_16226700 thaliana] >gi|13877879|gb|AAK44017.1|AF370202_1 putative peptide
  misc_feature (1)..(448): Homolog of NCBI NO: 16226701 NR Description: AT3g47960/T17F15_170 [Arabidopsis thaliana]
  misc_feature (1)..(426): Homolog of NCBI NO: 15221883 NR Description: peptide transporter, putative; protein id: supported by cDNA: gi_17979086 [Arabidopsis thaliana]
MGLGFLVVGAGGIRPCNLAFGADQFNPKSESGKRGIDSFFNWYFFTFTFAQILSLTLVVYVQSNVSWTIGLTIPAVLMFLACLIFFAGDKLYVKIKASGSPLAGIAQVIAVAIKKRGLKPAKQPWLNLYNYYPPKYANSKLKYTDQFRFLDKAAILTPEDKLQPDGKPADPWKLCTMQQVEEVKCIVRVLPIWFASSIYYLTITQQMTYPVFQALQSDRRLGSGGFVIPAATYVVFLMTGMTVFIVVYDRVLVPTMRRITGLDTGITLLQRIGTGIFFATASLVVAGFVEERRRTFALTKPTLGMAPRKGEISSMSAMWLIPQLSLAGVAEAFAAIGQMEFYYKQFPENMRSFAGSIFYVGGGVSSYLGSFLIATVHRTTQNSSGGNWLAEDLNKGRLDLFYFMIAGILAVNFAYFLVMSRWYRYKGSDDEVTTYETNENIIKQQDKNVA

SEQ ID NO: 96270 - DNA, 947 bp, Arabidopsis thaliana
  misc_feature (1)..(947): Ceres Seq. ID no. 12732671
  misc_feature: MA Experiment ID: 20000179 Result: Down-regulated in Transcription
  misc_feature: MA Experiment 20000179 PARAMETER Experiment Name: At_Germinating_Seeds_P Parameter: Age (hr) Value: 6 vs. 0
  misc_feature: MA Experiment 20000179 PARAMETER Experiment Name: At_Germinating_Seeds_P Parameter: Tissue Value: Germinating Seeds
  misc_feature: MA Experiment ID: 20000180 Result: Down-regulated in Transcription
  misc_feature: MA Experiment 20000180 PARAMETER Experiment Name: At_Germinating_Seeds_P Parameter: Age (hr) Value: 24 vs. 0
  misc_feature: MA Experiment 20000180 PARAMETER Experiment Name: At_Germinating_Seeds_P Parameter: Tissue Value: Germinating Seeds
  misc_feature: MA Experiment ID: 20000185 Result: Up-regulated in Transcription
  misc_feature: MA Experiment 20000185 PARAMETER Experiment Name: At_Roots__P Parameter: Age (day) Value: 7 vs. 21
  misc_feature: MA Experiment 20000185 PARAMETER Experiment Name: At_Roots__P Parameter: Organism Value: A. thaliana
  misc_feature: MA Experiment 20000185 PARAMETER Experiment Name: At_Roots__P Parameter: Tissue Value: Roots vs. Whole Plant
  misc_feature: MA Experiment ID: 20000437 Result: Down-regulated in Transcription
  misc_feature: MA Experiment 20000437 PARAMETER Experiment Name: At_Drought_P Parameter: Age (day) Value: 8
  misc_feature: MA Experiment 20000437 PARAMETER Experiment Name: At_Drought_P Parameter: Organism Value: A. thaliana
  misc_feature: MA Experiment 20000437 PARAMETER Experiment Name: At_Drought_P Parameter: Plant Line Value: WS
  misc_feature: MA Experiment 20000437 PARAMETER Experiment Name: At_Drought_P Parameter: Timepoint (hr) Value: 24
  misc_feature: MA Experiment 20000437 PARAMETER Experiment Name: At_Drought_P Parameter: Tissue Value: Whole Plant
  misc_feature: MA Experiment 20000437 PARAMETER Experiment Name: At_Drought_P Parameter: Treatment Value: Drought vs. No Drought
  misc_feature: MA Experiment ID: 20000451 Result: Up-regulated in Transcription
  misc_feature: MA Experiment 20000451 PARAMETER Experiment Name: At_CS6879_Shoots-Roots_P Parameter: Age (day) Value: 14
  misc_feature: MA Experiment 20000451 PARAMETER Experiment Name: At_CS6879_Shoots-Roots_P Parameter: Organism Value: A. thaliana
  misc_feature: MA Experiment 20000451 PARAMETER Experiment Name: At_CS6879_Shoots-Roots_P Parameter: Plant Line Value: CS6879 vs. WS
  misc_feature: MA Experiment 20000451 PARAMETER Experiment Name: At_CS6879_Shoots-Roots_P Parameter: Tissue Value: Roots
  misc_feature: MA Experiment ID: 20001248 Result: Down-regulated in Transcription
  misc_feature: MA Experiment 20001248 PARAMETER Experiment Name: At_Far-red-induction_P Parameter: Age (day) Value: 7
  misc_feature: MA Experiment 20001248 PARAMETER Experiment Name: At_Far-red-induction_P Parameter: Light Value: Far-red vs. White
  misc_feature: MA Experiment 20001248 PARAMETER Experiment Name: At_Far-red-induction_P Parameter: Organism Value: A. thaliana
  misc_feature: MA Experiment 20001248 PARAMETER Experiment Name: At_Far-red-induction_P Parameter: Plant Line Value: Columbia
  misc_feature: MA Experiment 20001248 PARAMETER Experiment Name: At_Far-red-induction_P Parameter: Timepoint (hr) Value: 4
  misc_feature: MA Experiment 20001248 PARAMETER Experiment Name: At_Far-red-induction_P Parameter: Tissue Value: Whole Plant
  misc_feature: MA Experiment ID: 20001554 Result: Down-regulated in Transcription
  misc_feature: MA Experiment 20001554 PARAMETER Experiment Name: At_Drought_Soil_Dry_P Parameter: Age (day) Value: 21
  misc_feature: MA Experiment 20001554 PARAMETER Experiment Name: At_Drought_Soil_Dry_P Parameter: Organism Value: A. thaliana
  misc_feature: MA Experiment 20001554 PARAMETER Experiment Name: At_Drought_Soil_Dry_P Parameter: Plant Line Value: WS
  misc_feature: MA Experiment 20001554 PARAMETER Experiment Name: At_Drought_Soil_Dry_P Parameter: Post Timepoint (hr) Value: None
  misc_feature: MA Experiment 20001554 PARAMETER Experiment Name: At_Drought_Soil_Dry_P Parameter: Post-Treatment Value: None
  misc_feature: MA Experiment 20001554 PARAMETER Experiment Name: At_Drought_Soil_Dry_P Parameter: Timepoint (day) Value: 7
  misc_feature: MA Experiment 20001554 PARAMETER Experiment Name: At_Drought_Soil_Dry_P Parameter: Treatment Value: Drought vs. No Drought
  misc_feature: MA Experiment ID: 20001555 Result: Down-regulated in Transcription
  misc_feature: MA Experiment 20001555 PARAMETER Experiment Name: At_Drought_Soil_Dry_P Parameter: Age (day) Value: 24
  misc_feature: MA Experiment 20001555 PARAMETER Experiment Name: At_Drought_Soil_Dry_P Parameter: Organism Value: A. thaliana
  misc_feature: MA Experiment 20001555 PARAMETER Experiment Name: At_Drought_Soil_Dry_P Parameter: Plant Line Value: WS
  misc_feature: MA Experiment 20001555 PARAMETER Experiment Name: At_Drought_Soil_Dry_P Parameter: Post Timepoint (hr) Value: None
  misc_feature: MA Experiment 20001555 PARAMETER Experiment Name: At_Drought_Soil_Dry_P Parameter: Post-Treatment Value: None
  misc_feature: MA Experiment 20001555 PARAMETER Experiment Name: At_Drought_Soil_Dry_P Parameter: Timepoint (day) Value: 10
  misc_feature: MA Experiment 20001555 PARAMETER Experiment Name: At_Drought_Soil_Dry_P Parameter: Treatment Value: Drought vs. No Drought
  misc_feature: MA Experiment ID: 20001556 Result: Down-regulated in Transcription
  misc_feature: MA Experiment 20001556 PARAMETER Experiment Name: At_Drought_Soil_Dry_P Parameter: Age (day) Value: 26
  misc_feature: MA Experiment 20001556 PARAMETER Experiment Name: At_Drought_Soil_Dry_P Parameter: Organism Value: A. thaliana
  misc_feature: MA Experiment 20001556 PARAMETER Experiment Name: At_Drought_Soil_Dry_P Parameter: Plant Line Value: WS
  misc_feature: MA Experiment 20001556 PARAMETER Experiment Name: At_Drought_Soil_Dry_P Parameter: Post Timepoint (hr) Value: None
  misc_feature: MA Experiment 20001556 PARAMETER Experiment Name: At_Drought_Soil_Dry_P Parameter: Post-Treatment Value: None
  misc_feature: MA Experiment 20001556 PARAMETER Experiment Name: At_Drought_Soil_Dry_P Parameter: Timepoint (day) Value: 12
  misc_feature: MA Experiment 20001556 PARAMETER Experiment Name: At_Drought_Soil_Dry_P Parameter: Treatment Value: Drought vs. No Drought
  misc_feature: MA Experiment ID: 20001904 Result: Down-regulated in Transcription
  misc_feature: MA Experiment 20001904 PARAMETER Experiment Name: At_Drought_Reproduction_P Parameter: Age (day) Value: 37
  misc_feature: MA Experiment 20001904 PARAMETER Experiment Name: At_Drought_Reproduction_P Parameter: Organism Value: A. thaliana
  misc_feature: MA Experiment 20001904 PARAMETER Experiment Name: At_Drought_Reproduction_P Parameter: Plant Line Value: WS
  misc_feature: MA Experiment 20001904 PARAMETER Experiment Name: At_Drought_Reproduction_P Parameter: Timepoint (day) Value: 7
  misc_feature: MA Experiment 20001904 PARAMETER Experiment Name: At_Drought_Reproduction_P Parameter: Tissue Value: Rosettes
  misc_feature: MA Experiment 20001904 PARAMETER Experiment Name: At_Drought_Reproduction_P Parameter: Treatment Value: Drought vs. No Drought
aaaacaaactgtaaagtttattaagaaataataatgaagacattagttgtgaaatgtttccttctattggctcttgtatgtagctgcagagcagcagattcaatatggcaactctgcaacacaaattcaaacatctcagcaagcagccaagtctccaagaacatcgattctcttctcgcgacgcttgtctcaaagactccttcaaaaggtttcaagaccacaacttcttcaagttacaacaacaaagagaaagtgtatggacttgctcaatgtagaggagatatcagcaataccgattgctccacgtgtatccaagacgcggccaagaaaatccgtgaagtgtgtcagaaccaatccgactcaaggatcttgtacgatttctgcttcttacgttatagccaagagaatttcatagggaagcttgacacgggggctggtcttatatacttcaacgtcgctaacgtaaccgaaatcgaccccaaaaagttcgataatgagctcggggcactctttgacaaaattaggtctgaggctgttttacctaagaataaaggtttaggtaaaggtaagacaaaattgacaccttttgtgacactaaacggtttggtccaatgcacgagagacttaagcgaattggattgcgctcaatgctttgcaactgcggtcgggagcttcatgacaacttgccacaacaagaaaggttgtcgtgttttgtatagtagttgctatgtccggtacgagttttatccgttttacttccctcttgatccggctaaaaccggtcctagtgttggtagaatttcttccgttcatctctctccgtaatcgcatagtctaataaaagagtaagtttgtttctaaagagtatatgtatatgtgtgcaaaataaggctctttgcttatgtttctttctttaagatgcaagacaattaagtaaccaagttatt

SEQ ID NO: 96271 - protein, 263 aa, Arabidopsis thaliana
  peptide (1)..(263): Ceres Seq. ID no. 12732672
  misc_feature (188)..(242): Pfam Name: Domain of unknown function DUF26 Pfam Description: Domain of unknown function DUF26
  misc_feature (1)..(263): Homolog of NCBI NO: 15239000 NR Description: 33 kDa secretory protein-like; protein id: supported by cDNA: gi_15292980, supported by cDNA: gi_20259256 thaliana] >gi|8777384|dbj|BAA96974.1| 33 kDa secretory putative
  misc_feature (1)..(113): Homolog of NCBI NO: 23321185 NR Description: 33 kDa secretory protein-like protein [Brassica
  misc_feature (1)..(245): Homolog of NCBI NO: 3643271 NR Description: 33 kDa secretory protein [Oryza sativa]
  misc_feature (1)..(247): Homolog of NCBI NO: 23450951 NR Description: 33-kDa secretory protein [Oryza sativa]
  misc_feature (5)..(245): Homolog of NCBI NO: 38636830 NR Description: putative 33 kDa secretory protein [Oryza sativa
  misc_feature (1)..(252): Homolog of NCBI NO: 38636827 NR Description: putative 33-kDa secretory protein [Oryza sativa
  misc_feature (24)..(240): Homolog of NCBI NO: 18403247 NR Description: receptor kinase common family, putative; protein At3g22060.1, supported by cDNA: gi_14334417 [Arabidopsis >gi|9279765|dbj|BAB01391.1| contains similarity to receptor
  misc_feature (6)..(263): Homolog of NCBI NO: 4530126 NR Description: receptor-like protein kinase homolog RK20-1
  misc_feature (9)..(241): Homolog of NCBI NO: 15234659 NR Description: receptor protein kinase - like protein; protein At4g05200.1 [Arabidopsis thaliana] >gi|25387047|pir||D85065
  misc_feature (24)..(253): Homolog of NCBI NO: 7488195 NR Description: probable serine/threonine-specific protein kinase
MKTLVVKCFLLLALVCSCRAADSIWQLCNTNSNISASSQVSKNIDSLLATLVSKTPSKGFKTTTSSSYNNKEKVYGLAQCRGDISNTDCSTCIQDAAKKIREVCQNQSDSRILYDFCFLRYSQENFIGKLDTGAGLIYFNVANVTEIDPKKFDNELGALFDKIRSEAVLPKNKGLGKGKTKLTPFVTLNGLVQCTRDLSELDCAQCFATAVGSFMTTCHNKKGCRVLYSSCYVRYEFYPFYFPLDPAKTGPSVGRISSVHLSP

SEQ ID NO: 96272 - DNA, 780 bp, Arabidopsis thaliana
  misc_feature (1)..(780): Ceres Seq. ID no. 12732689
  misc_feature: MA Experiment ID: 20000264 Result: Up-regulated in Transcription
  misc_feature: MA Experiment 20000264 PARAMETER Experiment Name: At_Open_Flower_P Parameter: Age (day) Value: 21
  misc_feature: MA Experiment 20000264 PARAMETER Experiment Name: At_Open_Flower_P Parameter: Plant Line Value: WS
  misc_feature: MA Experiment 20000264 PARAMETER Experiment Name: At_Open_Flower_P Parameter: Tissue Value: Open Flower vs. Whole Plant
  misc_feature: MA Experiment ID: 20000265 Result: Up-regulated in Transcription
  misc_feature: MA Experiment 20000265 PARAMETER Experiment Name: At_Open_Flower_P Parameter: Age (day) Value: 21
  misc_feature: MA Experiment 20000265 PARAMETER Experiment Name: At_Open_Flower_P Parameter: Plant Line Value: WS
  misc_feature: MA Experiment 20000265 PARAMETER Experiment Name: At_Open_Flower_P Parameter: Tissue Value: Closed Flower vs. Whole Plant
  misc_feature: MA Experiment ID: 20000794 Result: Up-regulated in Transcription
  misc_feature: MA Experiment 20000794 PARAMETER Experiment Name: At_Petals_P Parameter: Age (day) Value: 23-25 days
  misc_feature: MA Experiment 20000794 PARAMETER Experiment Name: At_Petals_P Parameter: Plant Line Value: WS
  misc_feature: MA Experiment 20000794 PARAMETER Experiment Name: At_Petals_P Parameter: Tissue Value: Petals vs. Whole plant
atggctgccaatttctggaattcatctcactataaacagcttttggatccagaagaagtcgacgtagttcatgatctcgataaagaacgtggaatctcaattgatgattttaagctcatcaagttccatatgtctaatcatattatgaaattggctcagcacattaaagtgaggcaaagggttgtagctactgcaattacgtatatgagacgggtttatatcagaaagagtatggtagagtttgagcctcgacttgttgctcttacgtgcttgtacctggcatctaaagctgaagaaagcatagtgcaggccaggaatcttgttttttacatcaaaagattgtgtaatatcttcttcttctatcctgatgagtacaacaaatatgaactaaaggatatattaggaatggagatgaaggtgttagaagcactagattattatctggttgtgtttcacccttaccggtcattatcggagtttttgcaagatgctgcattaaacgatgtaaatatgaaccagattacatggggaattgttaatgatacttataagatggacctcattcttgtacaccctccctaccgcatagcgctagcatgcatatacatagcaagtgtccacagagagaaagatatcactgcatggtttgaagatcttcatgaggacatgaacttggtaaagaatattgccatggagatactggacttctatgagaactacagaacaatcacagaggaaaaagtgaattctgccttcagcaaattggctttgaagctgtag

SEQ ID NO: 96273 - protein, 259 aa, Arabidopsis thaliana
  peptide (1)..(259): Ceres Seq. ID no. 12732690
  misc_feature (9)..(149): Pfam Name: Cyclin, N-terminal domain Pfam Description: Cyclin, N-terminal domain
  misc_feature (1)..(259): Homolog of NCBI NO: 15239665 NR Description: cyclin C-like protein; protein id: At5g48640.1
  misc_feature (1)..(256): Homolog of NCBI NO: 15239664 NR Description: cyclin C-like protein; protein id: At5g48630.1,
  misc_feature (1)..(258): Homolog of NCBI NO: 3334144 NR Description: G1/S-SPECIFIC CYCLIN C-TYPE
  misc_feature (1)..(258): Homolog of NCBI NO: 28828497 NR Description: similar to Mus musculus (Mouse). 16 days neonate
  misc_feature (1)..(255): Homolog of NCBI NO: 34867083 NR Description: cyclin C [Rattus norvegicus]
  misc_feature (1)..(255): Homolog of NCBI NO: 38382739 NR Description: Unknown (protein for IMAGE:6391891) [Mus musculus]
  misc_feature (1)..(255): Homolog of NCBI NO: 1705767 NR Description: Cyclin C >gi|1118026|gb|AAB18947.1| cyclin C
  misc_feature (1)..(255): Homolog of NCBI NO: 11042056 NR Description: dJ199J3.4 (cyclin C) [Homo sapiens]
  misc_feature (1)..(255): Homolog of NCBI NO: 4885119 NR Description: cyclin C [Homo sapiens]
  misc_feature (1)..(255): Homolog of NCBI NO: 34783612 NR Description: Unknown (protein for IMAGE:6165083) [Homo sapiens]
MAANFWNSSHYKQLLDPEEVDVVHDLDKERGISIDDFKLIKFHMSNHIMKLAQHIKVRQRVVATAITYMRRVYIRKSMVEFEPRLVALTCLYLASKAEESIVQARNLVFYIKRLCNIFFFYPDEYNKYELKDILGMEMKVLEALDYYLVVFHPYRSLSEFLQDAALNDVNMNQITWGIVNDTYKMDLILVHPPYRIALACIYIASVHREKDITAWFEDLHEDMNLVKNIAMEILDFYENYRTITEEKVNSAFSKLALKL

SEQ ID NO: 96274 - protein, 216 aa, Arabidopsis thaliana
  peptide (1)..(216): Ceres Seq. ID no. 12732691
  misc_feature (1)..(106): Pfam Name: Cyclin, N-terminal domain Pfam Description: Cyclin, N-terminal domain
  misc_feature (1)..(216): Homolog of NCBI NO: 15239665 NR Description: cyclin C-like protein; protein id: At5g48640.1
  misc_feature (1)..(213): Homolog of NCBI NO: 15239664 NR Description: cyclin C-like protein; protein id: At5g48630.1,
  misc_feature (1)..(215): Homolog of NCBI NO: 3334144 NR Description: G1/S-SPECIFIC CYCLIN C-TYPE
  misc_feature (1)..(215): Homolog of NCBI NO: 28828497 NR Description: similar to Mus musculus (Mouse). 16 days neonate
  misc_feature (1)..(212): Homolog of NCBI NO: 34867083 NR Description: cyclin C [Rattus norvegicus]
  misc_feature (1)..(212): Homolog of NCBI NO: 38382739 NR Description: Unknown (protein for IMAGE:6391891) [Mus musculus]
  misc_feature (1)..(212): Homolog of NCBI NO: 1705767 NR Description: Cyclin C >gi|1118026|gb|AAB18947.1| cyclin C
  misc_feature (1)..(212): Homolog of NCBI NO: 4885119 NR Description: cyclin C [Homo sapiens]
  misc_feature (1)..(212): Homolog of NCBI NO: 11042056 NR Description: dJ199J3.4 (cyclin C) [Homo sapiens]
  misc_feature (1)..(212): Homolog of NCBI NO: 34783612 NR Description: Unknown (protein for IMAGE:6165083) [Homo sapiens]
MSNHIMKLAQHIKVRQRVVATAITYMRRVYIRKSMVEFEPRLVALTCLYLASKAEESIVQARNLVFYIKRLCNIFFFYPDEYNKYELKDILGMEMKVLEALDYYLVVFHPYRSLSEFLQDAALNDVNMNQITWGIVNDTYKMDLILVHPPYRIALACIYIASVHREKDITAWFEDLHEDMNLVKNIAMEILDFYENYRTITEEKVNSAFSKLALKL

SEQ ID NO: 96275 - protein, 211 aa, Arabidopsis thaliana
  peptide (1)..(211): Ceres Seq. ID no. 12732692
  misc_feature (1)..(101): Pfam Name: Cyclin, N-terminal domain Pfam Description: Cyclin, N-terminal domain
  misc_feature (1)..(211): Homolog of NCBI NO: 15239665 NR Description: cyclin C-like protein; protein id: At5g48640.1
  misc_feature (1)..(208): Homolog of NCBI NO: 15239664 NR Description: cyclin C-like protein; protein id: At5g48630.1,
  misc_feature (1)..(210): Homolog of NCBI NO: 3334144 NR Description: G1/S-SPECIFIC CYCLIN C-TYPE
  misc_feature (1)..(210): Homolog of NCBI NO: 28828497 NR Description: similar to Mus musculus (Mouse). 16 days neonate
  misc_feature (1)..(207): Homolog of NCBI NO: 34867083 NR Description: cyclin C [Rattus norvegicus]
  misc_feature (1)..(207): Homolog of NCBI NO: 38382739 NR Description: Unknown (protein for IMAGE:6391891) [Mus musculus]
  misc_feature (1)..(207): Homolog of NCBI NO: 1705767 NR Description: Cyclin C >gi|1118026|gb|AAB18947.1| cyclin C
  misc_feature (1)..(207): Homolog of NCBI NO: 4885119 NR Description: cyclin C [Homo sapiens]
  misc_feature (1)..(207): Homolog of NCBI NO: 11042056 NR Description: dJ199J3.4 (cyclin C) [Homo sapiens]
  misc_feature (1)..(207): Homolog of NCBI NO: 34783612 NR Description: Unknown (protein for IMAGE:6165083) [Homo sapiens]
MKLAQHIKVRQRVVATAITYMRRVYIRKSMVEFEPRLVALTCLYLASKAEESIVQARNLVFYIKRLCNIFFFYPDEYNKYELKDILGMEMKVLEALDYYLVVFHPYRSLSEFLQDAALNDVNMNQITWGIVNDTYKMDLILVHPPYRIALACIYIASVHREKDITAWFEDLHEDMNLVKNIAMEILDFYENYRTITEEKVNSAFSKLALKL

SEQ ID NO: 96276 - DNA, 660 bp, Arabidopsis thaliana
  misc_feature (1)..(660): Ceres Seq. ID no. 12732697
  misc_feature: MA Experiment ID: 20000315 Result: Down-regulated in Transcription
  misc_feature: MA Experiment 20000315 PARAMETER Experiment Name: At_14day_Shoots-Roots_Sub_P Parameter: Age (day) Value: 14
  misc_feature: MA Experiment 20000315 PARAMETER Experiment Name: At_14day_Shoots-Roots_Sub_P Parameter: Organism Value: A. thaliana
  misc_feature: MA Experiment 20000315 PARAMETER Experiment Name: At_14day_Shoots-Roots_Sub_P Parameter: Plant Line Value: WS
  misc_feature: MA Experiment 20000315 PARAMETER Experiment Name: At_14day_Shoots-Roots_Sub_P Parameter: Tissue Value: Shoots vs. Whole Plant
  misc_feature: MA Experiment ID: 20000328 Result: Down-regulated in Transcription
  misc_feature: MA Experiment 20000328 PARAMETER Experiment Name: At_42deg_Heat_Sub_P Parameter: Age (day) Value: 14
  misc_feature: MA Experiment 20000328 PARAMETER Experiment Name: At_42deg_Heat_Sub_P Parameter: Organism Value: A. thaliana
  misc_feature: MA Experiment 20000328 PARAMETER Experiment Name: At_42deg_Heat_Sub_P Parameter: Plant Line Value: WS
  misc_feature: MA Experiment 20000328 PARAMETER Experiment Name: At_42deg_Heat_Sub_P Parameter: Temperature (deg C) Value: 42 vs. 22
  misc_feature: MA Experiment 20000328 PARAMETER Experiment Name: At_42deg_Heat_Sub_P Parameter: Timepoint (hr) Value: 6
  misc_feature: MA Experiment 20000328 PARAMETER Experiment Name: At_42deg_Heat_Sub_P Parameter: Tissue Value: Aerial
  misc_feature: MA Experiment ID: 20000355 Result: Up-regulated in Transcription
  misc_feature: MA Experiment 20000355 PARAMETER Experiment Name: At_Siliques_Sub_P Parameter: Age (day) Value: 21
  misc_feature: MA Experiment 20000355 PARAMETER Experiment Name: At_Siliques_Sub_P Parameter: Organism Value: A. thaliana
  misc_feature: MA Experiment 20000355 PARAMETER Experiment Name: At_Siliques_Sub_P Parameter: Plant Line Value: WS
  misc_feature: MA Experiment 20000355 PARAMETER Experiment Name: At_Siliques_Sub_P Parameter: Tissue Value: Less Than 5mm Siliques vs. Whole Plant
atgattcagttactgtttctagttctatttgtggaaggtgcgattgcattcttactgttgataaagattggtcctttgagagagcttgtgattaaaagtcttgaccagatgaagatgggtaaaggtcctgccactgtgaaaacaatcgctggaactatgtctgttattctcttttctaatcttatgagcattgtcaagatccagaataaaggtgcaaagcttgggacaatgtctcctatggatcaggttctttggagaacacacttgcttgaagcttctttattgggagtcgtactttttctcggctttataattgacagaatgcatcactacctcagaaagctaatcaatttgagaagcaacgtcggatcatcgaaagaagaacttgaacagctccagaaagaaagaaccgaactgaaggagaaagaggagaaagcatccaaggaaatcaagcagttgcaagtaaaattgtcatctattacagagagactaaagaaagcagagactgagtcaaaagagaaagagaagaaactcgaaactgctgaaacacatgttacggcgttacagaaacagtctgcagagctgcttctagagtatgatagattgctagaagataaccaacatctccaaagccaaatcttggggaaaaccaagagctga

SEQ ID NO: 96277 - protein, 219 aa, Arabidopsis thaliana
  peptide (1)..(219): Ceres Seq. ID no. 12732698
  misc_feature (4)..(200): Pfam Name: B-cell receptor-associated protein 31-like Pfam Description: B-cell receptor-associated protein 31-like
  misc_feature (1)..(219): Homolog of NCBI NO: 15239667 NR Description: putative protein; protein id: At5g48660.1 thaliana] >gi|10177356|dbj|BAB10699.1| contains similarity to
  misc_feature (1)..(218): Homolog of NCBI NO: 15231412 NR Description: unknown protein; protein id: At3g07190.1 thaliana] >gi|6642646|gb|AAF20227.1|AC012395_14 unknown protein
  misc_feature (1)..(213): Homolog of NCBI NO: 34897474 NR Description: unknown protein [Oryza sativa (japonica
  misc_feature (1)..(213): Homolog of NCBI NO: 9759015 NR Description: gene_id:K16E1.4~unknown protein [Arabidopsis
  misc_feature (1)..(213): Homolog of NCBI NO: 18422225 NR Description: expressed protein; protein id: At5g42570.1, by cDNA: 1558., supported by cDNA: gi_15450825 [Arabidopsis >gi|15450826|gb|AAK96684.1| Unknown protein [Arabidopsis
  misc_feature (1)..(213): Homolog of NCBI NO: 21553655 NR Description: unknown [Arabidopsis thaliana]
  misc_feature (1)..(213): Homolog of NCBI NO: 22655198 NR Description: unknown protein [Arabidopsis thaliana]
  misc_feature (1)..(159): Homolog of NCBI NO: 30682503 NR Description: expressed protein [Arabidopsis thaliana]
  misc_feature (1)..(122): Homolog of NCBI NO: 18402620 NR Description: expressed protein; protein id: At3g20450.1, by cDNA: 97350. [Arabidopsis thaliana]
  misc_feature (49)..(215): Homolog of NCBI NO: 12841984 NR Description: unnamed protein product [Mus musculus]
MIQLLFLVLFVEGAIAFLLLIKIGPLRELVIKSLDQMKMGKGPATVKTIAGTMSVILFSNLMSIVKIQNKGAKLGTMSPMDQVLWRTHLLEASLLGVVLFLGFIIDRMHHYLRKLINLRSNVGSSKEELEQLQKERTELKEKEEKASKEIKQLQVKLSSITERLKKAETESKEKEKKLETAETHVTALQKQSAELLLEYDRLLEDNQHLQSQILGKTKS

SEQ ID NO: 96278 - protein, 183 aa, Arabidopsis thaliana
  peptide (1)..(183): Ceres Seq. ID no. 12732699
  misc_feature (1)..(164): Pfam Name: B-cell receptor-associated protein 31-like Pfam Description: B-cell receptor-associated protein 31-like
  misc_feature (1)..(183): Homolog of NCBI NO: 15239667 NR Description: putative protein; protein id: At5g48660.1 thaliana] >gi|10177356|dbj|BAB10699.1| contains similarity to
  misc_feature (1)..(182): Homolog of NCBI NO: 15231412 NR Description: unknown protein; protein id: At3g07190.1 thaliana] >gi|6642646|gb|AAF20227.1|AC012395_14 unknown protein
  misc_feature (1)..(177): Homolog of NCBI NO: 34897474 NR Description: unknown protein [Oryza sativa (japonica
  misc_feature (1)..(177): Homolog of NCBI NO: 9759015 NR Description: gene_id:K16E1.4~unknown protein [Arabidopsis
  misc_feature (1)..(177): Homolog of NCBI NO: 18422225 NR Description: expressed protein; protein id: At5g42570.1, by cDNA: 1558., supported by cDNA: gi_15450825 [Arabidopsis >gi|15450826|gb|AAK96684.1| Unknown protein [Arabidopsis
  misc_feature (1)..(177): Homolog of NCBI NO: 21553655 NR Description: unknown [Arabidopsis thaliana]
  misc_feature (1)..(177): Homolog of NCBI NO: 22655198 NR Description: unknown protein [Arabidopsis thaliana]
  misc_feature (1)..(123): Homolog of NCBI NO: 30682503 NR Description: expressed protein [Arabidopsis thaliana]
  misc_feature (1)..(86): Homolog of NCBI NO: 18402620 NR Description: expressed protein; protein id: At3g20450.1, by cDNA: 97350. [Arabidopsis thaliana]
  misc_feature (13)..(179): Homolog of NCBI NO: 12841984 NR Description: unnamed protein product [Mus musculus]
MKMGKGPATVKTIAGTMSVILFSNLMSIVKIQNKGAKLGTMSPMDQVLWRTHLLEASLLGVVLFLGFIIDRMHHYLRKLINLRSNVGSSKEELEQLQKERTELKEKEEKASKEIKQLQVKLSSITERLKKAETESKEKEKKLETAETHVTALQKQSAELLLEYDRLLEDNQHLQSQILGKTKS

SEQ ID NO: 96279 - protein, 181 aa, Arabidopsis thaliana
  peptide (1)..(181): Ceres Seq. ID no. 12732700
  misc_feature (1)..(162): Pfam Name: B-cell receptor-associated protein 31-like Pfam Description: B-cell receptor-associated protein 31-like
  misc_feature (1)..(181): Homolog of NCBI NO: 15239667 NR Description: putative protein; protein id: At5g48660.1 thaliana] >gi|10177356|dbj|BAB10699.1| contains similarity to
  misc_feature (1)..(180): Homolog of NCBI NO: 15231412 NR Description: unknown protein; protein id: At3g07190.1 thaliana] >gi|6642646|gb|AAF20227.1|AC012395_14 unknown protein
  misc_feature (1)..(175): Homolog of NCBI NO: 34897474 NR Description: unknown protein [Oryza sativa (japonica
  misc_feature (1)..(175): Homolog of NCBI NO: 9759015 NR Description: gene_id:K16E1.4~unknown protein [Arabidopsis
  misc_feature (1)..(175): Homolog of NCBI NO: 18422225 NR Description: expressed protein; protein id: At5g42570.1, by cDNA: 1558., supported by cDNA: gi_15450825 [Arabidopsis >gi|15450826|gb|AAK96684.1| Unknown protein [Arabidopsis
  misc_feature (1)..(175): Homolog of NCBI NO: 21553655 NR Description: unknown [Arabidopsis thaliana]
  misc_feature (1)..(175): Homolog of NCBI NO: 22655198 NR Description: unknown protein [Arabidopsis thaliana]
  misc_feature (1)..(121): Homolog of NCBI NO: 30682503 NR Description: expressed protein [Arabidopsis thaliana]
  misc_feature (1)..(84): Homolog of NCBI NO: 18402620 NR Description: expressed protein; protein id: At3g20450.1, by cDNA: 97350. [Arabidopsis thaliana]
  misc_feature (11)..(177): Homolog of NCBI NO: 12841984 NR Description: unnamed protein product [Mus musculus]
MGKGPATVKTIAGTMSVILFSNLMSIVKIQNKGAKLGTMSPMDQVLWRTHLLEASLLGVVLFLGFIIDRMHHYLRKLINLRSNVGSSKEELEQLQKERTELKEKEEKASKEIKQLQVKLSSITERLKKAETESKEKEKKLETAETHVTALQKQSAELLLEYDRLLEDNQHLQSQILGKTKS

SEQ ID NO: 96280 - DNA, 966 bp, Arabidopsis thaliana
  misc_feature (1)..(966): Ceres Seq. ID no. 12732701
  misc_feature: MA Experiment ID: 20000315 Result: Down-regulated in Transcription
  misc_feature: MA Experiment 20000315 PARAMETER Experiment Name: At_14day_Shoots-Roots_Sub_P Parameter: Age (day) Value: 14
  misc_feature: MA Experiment 20000315 PARAMETER Experiment Name: At_14day_Shoots-Roots_Sub_P Parameter: Organism Value: A. thaliana
  misc_feature: MA Experiment 20000315 PARAMETER Experiment Name: At_14day_Shoots-Roots_Sub_P Parameter: Plant Line Value: WS
  misc_feature: MA Experiment 20000315 PARAMETER Experiment Name: At_14day_Shoots-Roots_Sub_P Parameter: Tissue Value: Shoots vs. Whole Plant
atgacaagaaagaaagtgaaacttgcttacatttccaacgattcttcaagaaaagcgactttcaaaaaaagaaagaagggtttgatgaagaaggtacacgaactctcgactctttgtggcatcactgcatgtgcgatcatctacagcccgtatgataccaaccctgaagtgtggccatcaaattccggtgtgcaaagggtggtttcagaatttaggacactcccagagatggatcaacacaaaaagatggtagatcaagagggttttctcaaacaaagaatcgcgaaagcgacagaaactttgaggagacaaagaaaggatagtagggagctagagatgactgaagtcatgttccaatgtttgattggaaacatggagatgtttcatttgaatattgtggatcttaatgatttgggttatatgattgagcaatatcttaaagatgttaatcgcaggattgagattttacgaaattctggtacggagattggtgaatcttcttctgttgcggtagctgcttctgaagggaatataccaatgccgaatttggtcgctacaacagctcccaccactacaatttatgaggtgggttcttcttcctcatttgcggctgtcgcgaattttgttaatcctattgatcttcaacaatttcgtcatccggcggctcaacatgttggacttaatgagcaacctcaaaatctaaatctgaatttaaatcagaactataatcaaaatcaagaatggtttatggaaatgatgaaccatcctgagcaaatgaggtatcagacagagcaaatgggatatcaattcatggatgataaccaccacaaccacatccatcaccagccacaggagcaccaacatcagatccatgacgaatcttccaacgctcttgatgccgccaactcaagcagcatcatccctgttactagttcaagtattaccaataaaacatggttccattag

SEQ ID NO: 96281 - protein, 321 aa, Arabidopsis thaliana
  peptide (1)..(321): Ceres Seq. ID no. 12732702
  misc_feature (1)..(321): Homolog of NCBI NO: 15239669 NR Description: MADS-box protein; protein id: At5g48670.1
  misc_feature (1)..(200): Homolog of NCBI NO: 32402456 NR Description: MADS-box protein AGL35 [Arabidopsis thaliana]
  misc_feature (29)..(127): Homolog of NCBI NO: 15241055 NR Description: putative protein; protein id: At5g27810.1
  misc_feature (1)..(261): Homolog of NCBI NO: 32402466 NR Description: MADS-box protein AGL45-I [Arabidopsis thaliana]
  misc_feature (8)..(200): Homolog of NCBI NO: 30690335 NR Description: MADS-box protein [Arabidopsis thaliana]
  misc_feature (1)..(314): Homolog of NCBI NO: 30690321 NR Description: expressed protein [Arabidopsis thaliana]
  misc_feature (1)..(203): Homolog of NCBI NO: 32402468 NR Description: MADS-box protein AGL45-II [Arabidopsis thaliana]
  misc_feature (1)..(182): Homolog of NCBI NO: 15230060 NR Description: MADS-box protein; protein id: At3g05860.1
  misc_feature (3)..(252): Homolog of NCBI NO: 15218644 NR Description: MADS-box protein; protein id: At1g65330.1
  misc_feature (3)..(257): Homolog of NCBI NO: 32402454 NR Description: MADS-box protein AGL38 [Arabidopsis thaliana]
MTRKKVKLAYISNDSSRKATFKKRKKGLMKKVHELSTLCGITACAIIYSPYDTNPEVWPSNSGVQRVVSEFRTLPEMDQHKKMVDQEGFLKQRIAKATETLRRQRKDSRELEMTEVMFQCLIGNMEMFHLNIVDLNDLGYMIEQYLKDVNRRIEILRNSGTEIGESSSVAVAASEGNIPMPNLVATTAPTTTIYEVGSSSSFAAVANFVNPIDLQQFRHPAAQHVGLNEQPQNLNLNLNQNYNQNQEWFMEMMNHPEQMRYQTEQMGYQFMDDNHHNHIHHQPQEHQHQIHDESSNALDAANSSSIIPVTSSSITNKTWFH

SEQ ID NO: 96282 - protein, 293 aa, Arabidopsis thaliana
  peptide (1)..(293): Ceres Seq. ID no. 12732703
  misc_feature (1)..(293): Homolog of NCBI NO: 15239669 NR Description: MADS-box protein; protein id: At5g48670.1
  misc_feature (1)..(172): Homolog of NCBI NO: 32402456 NR Description: MADS-box protein AGL35 [Arabidopsis thaliana]
  misc_feature (1)..(99): Homolog of NCBI NO: 15241055 NR Description: putative protein; protein id: At5g27810.1
  misc_feature (1)..(233): Homolog of NCBI NO: 32402466 NR Description: MADS-box protein AGL45-I [Arabidopsis thaliana]
  misc_feature (1)..(172): Homolog of NCBI NO: 30690335 NR Description: MADS-box protein [Arabidopsis thaliana]
  misc_feature (1)..(286): Homolog of NCBI NO: 30690321 NR Description: expressed protein [Arabidopsis thaliana]
  misc_feature (1)..(175): Homolog of NCBI NO: 32402468 NR Description: MADS-box protein AGL45-II [Arabidopsis thaliana]
  misc_feature (1)..(154): Homolog of NCBI NO: 15230060 NR Description: MADS-box protein; protein id: At3g05860.1
  misc_feature (1)..(224): Homolog of NCBI NO: 15218644 NR Description: MADS-box protein; protein id: At1g65330.1
  misc_feature (1)..(229): Homolog of NCBI NO: 32402454 NR Description: MADS-box protein AGL38 [Arabidopsis thaliana]
MKKVHELSTLCGITACAIIYSPYDTNPEVWPSNSGVQRVVSEFRTLPEMDQHKKMVDQEGFLKQRIAKATETLRRQRKDSRELEMTEVMFQCLIGNMEMFHLNIVDLNDLGYMIEQYLKDVNRRIEILRNSGTEIGESSSVAVAASEGNIPMPNLVATTAPTTTIYEVGSSSSFAAVANFVNPIDLQQFRHPAAQHVGLNEQPQNLNLNLNQNYNQNQEWFMEMMNHPEQMRYQTEQMGYQFMDDNHHNHIHHQPQEHQHQIHDESSNALDAANSSSIIPVTSSSITNKTWFH

SEQ ID NO: 96283 - protein, 245 aa, Arabidopsis thaliana
  peptide (1)..(245): Ceres Seq. ID no. 12732704
  misc_feature (1)..(245): Homolog of NCBI NO: 15239669 NR Description: MADS-box protein; protein id: At5g48670.1
  misc_feature (1)..(124): Homolog of NCBI NO: 32402456 NR Description: MADS-box protein AGL35 [Arabidopsis thaliana]
  misc_feature (1)..(51): Homolog of NCBI NO: 15241055 NR Description: putative protein; protein id: At5g27810.1
  misc_feature (1)..(185): Homolog of NCBI NO: 32402466 NR Description: MADS-box protein AGL45-I [Arabidopsis thaliana]
  misc_feature (1)..(124): Homolog of NCBI NO: 30690335 NR Description: MADS-box protein [Arabidopsis thaliana]
  misc_feature (1)..(238): Homolog of NCBI NO: 30690321 NR Description: expressed protein [Arabidopsis thaliana]
  misc_feature (1)..(127): Homolog of NCBI NO: 32402468 NR Description: MADS-box protein AGL45-II [Arabidopsis thaliana]
  misc_feature (1)..(106): Homolog of NCBI NO: 15230060 NR Description: MADS-box protein; protein id: At3g05860.1
  misc_feature (1)..(176): Homolog of NCBI NO: 15218644 NR Description: MADS-box protein; protein id: At1g65330.1
  misc_feature (1)..(181): Homolog of NCBI NO: 32402454 NR Description: MADS-box protein AGL38 [Arabidopsis thaliana]
MDQHKKMVDQEGFLKQRIAKATETLRRQRKDSRELEMTEVMFQCLIGNMEMFHLNIVDLNDLGYMIEQYLKDVNRRIEILRNSGTEIGESSSVAVAASEGNIPMPNLVATTAPTTTIYEVGSSSSFAAVANFVNPIDLQQFRHPAAQHVGLNEQPQNLNLNLNQNYNQNQEWFMEMMNHPEQMRYQTEQMGYQFMDDNHHNHIHHQPQEHQHQIHDESSNALDAANSSSIIPVTSSSITNKTWFH

SEQ ID NO: 96284 - DNA, 1245 bp, Arabidopsis thaliana
  misc_feature (1)..(1245): Ceres Seq. ID no. 12732717
  misc_feature: MA Experiment ID: 108434 Result: Up-regulated in Transcription
  misc_feature: MA Experiment 108434 PARAMETER Experiment Name: At_Root_Tips_cDNA_P Parameter: Tissue Value: Root Tips
  misc_feature: MA Experiment ID: 108461 Result: Up-regulated in Transcription
  misc_feature: MA Experiment 108461 PARAMETER Experiment Name: At_Germinating_Seeds_cDNA_P Parameter: Age (day) Value: 1 vs. 0
  misc_feature: MA Experiment 108461 PARAMETER Experiment Name: At_Germinating_Seeds_cDNA_P Parameter: Tissue Value: Germinating Seeds
  misc_feature: MA Experiment ID: 108462 Result: Up-regulated in Transcription
  misc_feature: MA Experiment 108462 PARAMETER Experiment Name: At_Germinating_Seeds_cDNA_P Parameter: Age (day) Value: 2 vs. 0
  misc_feature: MA Experiment 108462 PARAMETER Experiment Name: At_Germinating_Seeds_cDNA_P Parameter: Tissue Value: Germinating Seeds
  misc_feature: MA Experiment ID: 108473 Result: Down-regulated in Transcription
  misc_feature: MA Experiment 108473 PARAMETER Experiment Name: At_Drought_Flowers_cDNA_P Parameter: Timepoint (hr) Value: 7 d
  misc_feature: MA Experiment 108473 PARAMETER Experiment Name: At_Drought_Flowers_cDNA_P Parameter: Tissue Value: Flower
  misc_feature: MA Experiment 108473 PARAMETER Experiment Name: At_Drought_Flowers_cDNA_P Parameter: Treatment Value: Drought vs. No Drought
  misc_feature: MA Experiment ID: 108489 Result: Down-regulated in Transcription
  misc_feature: MA Experiment ID: 108561 Result: Down-regulated in Transcription
  misc_feature: MA Experiment 108561 PARAMETER Experiment Name: At_100uM_ABA_cDNA_P Parameter: Timepoint (hr) Value: 6
  misc_feature: MA Experiment 108561 PARAMETER Experiment Name: At_100uM_ABA_cDNA_P Parameter: Tissue Value: Aerial
  misc_feature: MA Experiment 108561 PARAMETER Experiment Name: At_100uM_ABA_cDNA_P Parameter: Treatment Value: 100uM ABA vs. No Treatment
  misc_feature: MA Experiment ID: 108569 Result: Up-regulated in Transcription
  misc_feature: MA Experiment 108569 PARAMETER Experiment Name: At_0.001%_MeJA__cDNA_P Parameter: Timepoint (hr) Value: 6
  misc_feature: MA Experiment 108569 PARAMETER Experiment Name: At_0.001%_MeJA__cDNA_P Parameter: Tissue Value: Aerial
  misc_feature: MA Experiment 108569 PARAMETER Experiment Name: At_0.001%_MeJA__cDNA_P Parameter: Treatment Value: 0.001% MeJA vs. No Treatment
  misc_feature: MA Experiment ID: 108573 Result: Down-regulated in Transcription
  misc_feature: MA Experiment 108573 PARAMETER Experiment Name: At_Drought_cDNA_P Parameter: Timepoint (hr) Value: 6
  misc_feature: MA Experiment 108573 PARAMETER Experiment Name: At_Drought_cDNA_P Parameter: Tissue Value: Aerial
  misc_feature: MA Experiment 108573 PARAMETER Experiment Name: At_Drought_cDNA_P Parameter: Treatment Value: Drought vs. No Drought
  misc_feature: MA Experiment ID: 108574 Result: Up-regulated in Transcription
  misc_feature: MA Experiment 108574 PARAMETER Experiment Name: At_Wounding__cDNA_P Parameter: Timepoint (hr) Value: 1
  misc_feature: MA Experiment 108574 PARAMETER Experiment Name: At_Wounding__cDNA_P Parameter: Tissue Value: Aerial
  misc_feature: MA Experiment 108574 PARAMETER Experiment Name: At_Wounding__cDNA_P Parameter: Treatment Value: Wounding vs. No Wounding
  misc_feature: MA Experiment ID: 108576 Result: Down-regulated in Transcription
  misc_feature: MA Experiment 108576 PARAMETER Experiment Name: At_42deg_Heat_cDNA_P Parameter: Temperature (deg C) Value: 42 vs. 22
  misc_feature: MA Experiment 108576 PARAMETER Experiment Name: At_42deg_Heat_cDNA_P Parameter: Timepoint (hr) Value: 1
  misc_feature: MA Experiment 108576 PARAMETER Experiment Name: At_42deg_Heat_cDNA_P Parameter: Tissue Value: Aerial
  misc_feature: MA Experiment ID: 108579 Result: Up-regulated in Transcription
  misc_feature: MA Experiment 108579 PARAMETER Experiment Name: At_4deg_Cold_cDNA_P Parameter: Temperature (deg C) Value: 4 vs. 22
  misc_feature: MA Experiment 108579 PARAMETER Experiment Name: At_4deg_Cold_cDNA_P Parameter: Timepoint (hr) Value: 6
  misc_feature: MA Experiment 108579 PARAMETER Experiment Name: At_4deg_Cold_cDNA_P Parameter: Tissue Value: Aerial
  misc_feature: MA Experiment ID: 108585 Result: Down-regulated in Transcription
  misc_feature: MA Experiment 108585 PARAMETER Experiment Name: At_5mM_NaNP_cDNA_P Parameter: Timepoint (hr) Value: 6
  misc_feature: MA Experiment 108585 PARAMETER Experiment Name: At_5mM_NaNP_cDNA_P Parameter: Tissue Value: Aerial
  misc_feature: MA Experiment 108585 PARAMETER Experiment Name: At_5mM_NaNP_cDNA_P Parameter: Treatment Value: null
  misc_feature: MA Experiment ID: 20000111 Result: Down-regulated in Transcription
  misc_feature: MA Experiment 20000111 PARAMETER Experiment Name: At_42deg_Heat_cDNA_P Parameter: Temperature (deg C) Value: 42 vs. 22
  misc_feature: MA Experiment 20000111 PARAMETER Experiment Name: At_42deg_Heat_cDNA_P Parameter: Timepoint (hr) Value: 6
  misc_feature: MA Experiment 20000111 PARAMETER Experiment Name: At_42deg_Heat_cDNA_P Parameter: Tissue Value: Aerial
  misc_feature: MA Experiment ID: 20000113 Result: Down-regulated in Transcription
  misc_feature: MA Experiment 20000113 PARAMETER Experiment Name: At_42deg_Heat_cDNA_P Parameter: Temperature (deg C) Value: 42 vs. 22
  misc_feature: MA Experiment 20000113 PARAMETER Experiment Name: At_42deg_Heat_cDNA_P Parameter: Timepoint (hr) Value: 8
  misc_feature: MA Experiment 20000113 PARAMETER Experiment Name: At_42deg_Heat_cDNA_P Parameter: Tissue Value: Aerial
atggctgcttttggagatgacattgtgattgtagcggcatatcgtaccgccatttgcaaagcgagacgtggaggtttcaaagacactcttcctgatgatcttcttgcttctgttcttaaggctgtagtggaaagaacatctttggatccaagtgaagttggtgatatcgttgttggtaccgtgatagcgcctggttctcagagagcaatggagtgtagagttgcagcttattttgctggttttcctgactccgtgccagttagaactgtcaatagacaatgctcatcaggactacaagcagttgctgatgttgctgcttccattagagctggttattacgacattggtattggtgctggagtggaatcaatgtcaactgatcatattcctggaggcggctttcatggctctaatccaagagcacaggatttcccaaaagcccgtgattgtttgcttccaatgggaattacttctgaaaacgttgcagaaaggttcggtgtcacaagagaagagcaagatatggctgcggtggagtctcacaaacgcgctgcagctgcaatcgcgtctggtaaactcaaggatgaaatcattcctgttgctactaagattgtggaccctgagactaaagcagagaaggcaatcgtcgtatctgttgatgacggtgtacgtccaaactcaaacatggcagatttggcaaagctgaagactgtctttaaacagaacggttccaccacagctggcaatgctagtcagatcagtgatggtgctggagcagtactgctaatgaagagaagtttggctatgaagaagggacttcccattcttggagtattcaggagttttgctgttactggtgtggaaccatctgtaatgggtattggtccagctgttgccattcccgctgcaactaagctcgcagggctcaacgtcagcgatattgatctattcgagatcaatgaggcatttgcatctcagtatgtgtactcttgcaagaagttagagctggatatggaaaaggtcaatgttaatggaggagccattgctattggccatcccctgggtgctacaggagctcgatgtgttgcgacattgttgcacgagatgaagcggagaggaaaagattgccgctttggagtaatctcaatgtgcataggcactggaatgggagctgcagctgtttttgagaggggagactctgttgataacttgtccaacgctcgtgtggctaacggggatagtcattag

SEQ ID NO: 96285 - protein, 414 aa, Arabidopsis thaliana; identical to SEQ ID NO: 29323
  peptide (1)..(414): Ceres Seq. ID no. 12732718
  misc_feature (5)..(265): Pfam Name: Thiolase, N-terminal domain Pfam Description: Thiolase, N-terminal domain
  misc_feature (1)..(414): Homolog of NCBI NO: 30695561 NR Description: acetyl-CoA C-acyltransferase 1 (3-ketoacyl-CoA
  misc_feature (1)..(414): Homolog of NCBI NO: 30695564 NR Description: acetyl-CoA C-acyltransferase 1 (3-ketoacyl-CoA
  misc_feature (2)..(411): Homolog of NCBI NO: 393707 NR Description: 3-ketoacyl-CoA thiolase; acetyl-CoA
  misc_feature (2)..(411): Homolog of NCBI NO: 7433647 NR Description: acetyl-CoA C-acyltransferase (EC 2.3.1.16)
  misc_feature (2)..(411): Homolog of NCBI NO: 421810 NR Description: acetyl-CoA C-acyltransferase (EC 2.3.1.16)
  misc_feature (2)..(407): Homolog of NCBI NO: 29367431 NR Description: 3-ketoacyl-CoA thiolase-like protein [Oryza
  misc_feature (4)..(407): Homolog of NCBI NO: 15225798 NR Description: 3-ketoacyl-CoA thiolase; protein id: At2g33150.1, by cDNA: 36488., supported by cDNA: gi_11993852, supported by
  misc_feature (4)..(414): Homolog of NCBI NO: 7433644 NR Description: acetyl-CoA C-acyltransferase (EC 2.3.1.16)
  misc_feature (4)..(407): Homolog of NCBI NO: 15219797 NR Description: putative acetyl-CoA acyltransferase; protein id:
  misc_feature (4)..(407): Homolog of NCBI NO: 21537268 NR Description: putative acetyl-CoA acyltransferase [Arabidopsis

SEQ ID NO: 96286 - protein, 345 aa, Arabidopsis thaliana; identical to SEQ ID NO: 29324
  peptide (1)..(345): Ceres Seq. ID no. 12732719
  misc_feature (1)..(196): Pfam Name: Thiolase, N-terminal domain Pfam Description: Thiolase, N-terminal domain
  misc_feature (1)..(345): Homolog of NCBI NO: 30695561 NR Description: acetyl-CoA C-acyltransferase 1 (3-ketoacyl-CoA
  misc_feature (1)..(345): Homolog of NCBI NO: 30695564 NR Description: acetyl-CoA C-acyltransferase 1 (3-ketoacyl-CoA
  misc_feature (1)..(342): Homolog of NCBI NO: 393707 NR Description: 3-ketoacyl-CoA thiolase; acetyl-CoA
  misc_feature (1)..(342): Homolog of NCBI NO: 7433647 NR Description: acetyl-CoA C-acyltransferase (EC 2.3.1.16)
  misc_feature (1)..(342): Homolog of NCBI NO: 421810 NR Description: acetyl-CoA C-acyltransferase (EC 2.3.1.16)
  misc_feature (1)..(338): Homolog of NCBI NO: 29367431 NR Description: 3-ketoacyl-CoA thiolase-like protein [Oryza
  misc_feature (1)..(338): Homolog of NCBI NO: 15225798 NR Description: 3-ketoacyl-CoA thiolase; protein id: At2g33150.1, by cDNA: 36488., supported by cDNA: gi_11993852, supported by
  misc_feature (1)..(345): Homolog of NCBI NO: 7433644 NR Description: acetyl-CoA C-acyltransferase (EC 2.3.1.16)
  misc_feature (1)..(338): Homolog of NCBI NO: 15219797 NR Description: putative acetyl-CoA acyltransferase; protein id:
  misc_feature (1)..(338): Homolog of NCBI NO: 21537268 NR Description: putative acetyl-CoA acyltransferase [Arabidopsis

SEQ ID NO: 96287 - protein, 291 aa, Arabidopsis thaliana; identical to SEQ ID NO: 29325
  peptide (1)..(291): Ceres Seq. ID no. 12732720
  misc_feature (1)..(142): Pfam Name: Thiolase, N-terminal domain Pfam Description: Thiolase, N-terminal domain
  misc_feature (1)..(291): Homolog of NCBI NO: 30695561 NR Description: acetyl-CoA C-acyltransferase 1 (3-ketoacyl-CoA
  misc_feature (1)..(291): Homolog of NCBI NO: 30695564 NR Description: acetyl-CoA C-acyltransferase 1 (3-ketoacyl-CoA
  misc_feature (1)..(288): Homolog of NCBI NO: 393707 NR Description: 3-ketoacyl-CoA thiolase; acetyl-CoA
  misc_feature (1)..(288): Homolog of NCBI NO: 7433647 NR Description: acetyl-CoA C-acyltransferase (EC 2.3.1.16)
  misc_feature (1)..(288): Homolog of NCBI NO: 421810 NR Description: acetyl-CoA C-acyltransferase (EC 2.3.1.16)
  misc_feature (1)..(284): Homolog of NCBI NO: 29367431 NR Description: 3-ketoacyl-CoA thiolase-like protein [Oryza
  misc_feature (1)..(284): Homolog of NCBI NO: 15225798 NR Description: 3-ketoacyl-CoA thiolase; protein id: At2g33150.1, by cDNA: 36488., supported by cDNA: gi_11993852, supported by
  misc_feature (1)..(291): Homolog of NCBI NO: 7433644 NR Description: acetyl-CoA C-acyltransferase (EC 2.3.1.16)
  misc_feature (1)..(284): Homolog of NCBI NO: 15219797 NR Description: putative acetyl-CoA acyltransferase; protein id:
  misc_feature (1)..(284): Homolog of NCBI NO: 21537268 NR Description: putative acetyl-CoA acyltransferase [Arabidopsis

SEQ ID NO: 96288 - DNA, 2063 bp, Arabidopsis thaliana
  misc_feature (1)..(2063): Ceres Seq. ID no. 12732721
  misc_feature: MA Experiment ID: 20001905 Result: Down-regulated in Transcription
  misc_feature: MA Experiment 20001905 PARAMETER Experiment Name: At_Drought_Reproduction_P Parameter: Age (day) Value: 40
  misc_feature: MA Experiment 20001905 PARAMETER Experiment Name: At_Drought_Reproduction_P Parameter: Organism Value: A. thaliana
  misc_feature: MA Experiment 20001905 PARAMETER Experiment Name: At_Drought_Reproduction_P Parameter: Plant Line Value: WS
  misc_feature: MA Experiment 20001905 PARAMETER Experiment Name: At_Drought_Reproduction_P Parameter: Timepoint (day) Value: 10
  misc_feature: MA Experiment 20001905 PARAMETER Experiment Name: At_Drought_Reproduction_P Parameter: Tissue Value: Rosettes
  misc_feature: MA Experiment 20001905 PARAMETER Experiment Name: At_Drought_Reproduction_P Parameter: Treatment Value: Drought vs. No Drought
  misc_feature: MA Experiment ID: 20001911 Result: Down-regulated in Transcription
  misc_feature: MA Experiment 20001911 PARAMETER Experiment Name: At_Drought_Reproduction_P Parameter: Age (day) Value: 40
  misc_feature: MA Experiment 20001911 PARAMETER Experiment Name: At_Drought_Reproduction_P Parameter: Organism Value: A. thaliana
  misc_feature: MA Experiment 20001911 PARAMETER Experiment Name: At_Drought_Reproduction_P Parameter: Plant Line Value: WS
  misc_feature: MA Experiment 20001911 PARAMETER Experiment Name: At_Drought_Reproduction_P Parameter: Timepoint (day) Value: 10
  misc_feature: MA Experiment 20001911 PARAMETER Experiment Name: At_Drought_Reproduction_P Parameter: Tissue Value: Flowers
  misc_feature: MA Experiment 20001911 PARAMETER Experiment Name: At_Drought_Reproduction_P Parameter: Treatment Value: Drought vs. No Drought
acgtaggaatctttgttgattctcaatgaacccaacacagacacttttctctcccggcggtaactcgccggcgtcttctccggcgagtcatccatcttcactctttcctcaaatcaacaactgtcgaactataagagacctctctcaaatccatgccgttttcattaaatctggtcaaatgcgagacactctcgccgccgcagagattctccgattctgtgctacctccgatctccaccaccgtgaccttgactacgcacataagatctttaatcaaatgcctcaacgaaattgcttctcttggaatactataatcagaggtttcagtgagagtgacgaagacaaagctctgatcgcaatcacattattctacgagatgatgagtgatgagtttgttgaaccgaatcggtttacgtttccctctgttcttaaggcttgtgcgaaaactgggaagattcaagaaggtaagcagattcatggtttggctttgaagtatggatttggtggtgatgaatttgtgatgagtaatcttgttagaatgtatgtgatgtgtggttttatgaaagatgctcgtgtgttgttttataagaacattatagagaaagatatggtggtgatgactgatagaagaaagagagatggtgaaatagttttgtggaatgttatgattgatggttatatgagacttggtgattgtaaagctgcacggatgttgtttgataaaatgcgtcaaagaagcgttgtttcgtggaatacgatgatatcgggttattcgctgaacgggtttttcaaagatgctgttgaggtttttcgtgagatgaagaaaggggatattagaccgaattatgttactttggttagtgttcttcctgctatttcacggcttgggtctttagagttgggagaatggttgcatttgtatgcagaggatagtggaattaggattgatgatgtgcttggctctgctttgattgatatgtattcgaaatgtgggatcattgagaaagcgattcatgtatttgagaggttacctagagagaacgtgattacttggagtgcgatgattaacgggtttgctatacatggccaggcaggtgatgctattgactgtttttgtaaaatgaggcaggctggagttcgacctagtgatgttgcctacattaatcttttgactgcttgtagccatggcgggttggtagaagaaggaaggagatatttcagtcagatggtgagtgtggatggtttagagcctaggattgaacactacgggtgtatggttgatttattgggtcgttcgggtcttcttgatgaggctgaggagtttatacttaatatgcctataaaaccagatgatgtgatatggaaagcacttttgggtgcttgcagaatgcagggaaatgtcgagatgggcaagcgcgttgccaatattctgatggatatggttcctcatgacagtggagcttatgtcgccctctcaaacatgtatgcttctcaaggaaactggtcagaggtttcagagatgaggctgagaatgaaggagaaggatataagaaaagaccctgggtgtagtttgatcgacattgatggcgtgcttcatgagtttgttgtggaagatgattcacacccaaaagccaaagaaatcaactcaatgctcgtagaaatctcagacaaactgagactagctgggtatagaccaatcaccacacaggttttgttaaacttggaggaagaagataaagaaaatgtacttcattaccacagcgagaagatcgctacagcgtttgggttgataagcacgagccctggcaaaccaatacgcattgttaagaacctacgtatctgtgaggattgtcattcgtccatcaaactcatctccaaagtttacaagagaaaaataacggtacgagaccggaaacgttttcaccatttccaagatggctcatgctcgtgtatggattattggtgaaactaaacataaagacggaagactctttccctgtgtatacacaagctctgttgtttctttactgactccacatttataagaattgaatcttttattc

SEQ ID NO: 96289 - protein, 646 aa, Arabidopsis thaliana
  peptide (1)..(646): Ceres Seq. ID no. 12732722
  misc_feature (341)..(375): Pfam Name: PPR repeat Pfam Description: PPR repeat
  misc_feature (211)..(646): Homolog of NCBI NO: 15221306 NR Description: hypothetical protein; protein id: At1g74630.1
  misc_feature (30)..(269): Homolog of NCBI NO: 15221306 NR Description: hypothetical protein; protein id: At1g74630.1
  misc_feature (114)..(646): Homolog of NCBI NO: 15239979 NR Description: selenium-binding protein-like; protein id:
  misc_feature (74)..(646): Homolog of NCBI NO: 15227619 NR Description: hypothetical protein; protein id: At2g29760.1
  misc_feature (54)..(646): Homolog of NCBI NO: 15227144 NR Description: hypothetical protein; protein id: At2g22070.1
  misc_feature (115)..(646): Homolog of NCBI NO: 15240085 NR Description: selenium-binding protein-like; protein id:
  misc_feature (75)..(646): Homolog of NCBI NO: 15223099 NR Description: unknown protein; protein id: At1g08070.1 thaliana] >gi|8778839|gb|AAF79838.1|AC026875_18 T6D22.15
  misc_feature (114)..(646): Homolog of NCBI NO: 15235537 NR Description: putative protein; protein id: At4g37380.1
  misc_feature (130)..(646): Homolog of NCBI NO: 34910298 NR Description: P0013F10.8 [Oryza sativa (japonica
  misc_feature (218)..(646): Homolog of NCBI NO: 15234831 NR Description: putative protein; protein id: At4g30700.1
MNPTQTLFSPGGNSPASSPASHPSSLFPQINNCRTIRDLSQIHAVFIKSGQMRDTLAAAEILRFCATSDLHHRDLDYAHKIFNQMPQRNCFSWNTIIRGFSESDEDKALIAITLFYEMMSDEFVEPNRFTFPSVLKACAKTGKIQEGKQIHGLALKYGFGGDEFVMSNLVRMYVMCGFMKDARVLFYKNIIEKDMVVMTDRRKRDGEIVLWNVMIDGYMRLGDCKAARMLFDKMRQRSVVSWNTMISGYSLNGFFKDAVEVFREMKKGDIRPNYVTLVSVLPAISRLGSLELGEWLHLYAEDSGIRIDDVLGSALIDMYSKCGIIEKAIHVFERLPRENVITWSAMINGFAIHGQAGDAIDCFCKMRQAGVRPSDVAYINLLTACSHGGLVEEGRRYFSQMVSVDGLEPRIEHYGCMVDLLGRSGLLDEAEEFILNMPIKPDDVIWKALLGACRMQGNVEMGKRVANILMDMVPHDSGAYVALSNMYASQGNWSEVSEMRLRMKEKDIRKDPGCSLIDIDGVLHEFVVEDDSHPKAKEINSMLVEISDKLRLAGYRPITTQVLLNLEEEDKENVLHYHSEKIATAFGLISTSPGKPIRIVKNLRICEDCHSSIKLISKVYKRKITVRDRKRFHHFQDGSCSCMDYW

SEQ ID NO: 96290 - protein, 595 aa, Arabidopsis thaliana
  peptide (1)..(595): Ceres Seq. ID no. 12732723
  misc_feature (290)..(324): Pfam Name: PPR repeat Pfam Description: PPR repeat
  misc_feature (160)..(595): Homolog of NCBI NO: 15221306 NR Description: hypothetical protein; protein id: At1g74630.1
  misc_feature (1)..(218): Homolog of NCBI NO: 15221306 NR Description: hypothetical protein; protein id: At1g74630.1
  misc_feature (63)..(595): Homolog of NCBI NO: 15239979 NR Description: selenium-binding protein-like; protein id:
  misc_feature (23)..(595): Homolog of NCBI NO: 15227619 NR Description: hypothetical protein; protein id: At2g29760.1
  misc_feature (3)..(595): Homolog of NCBI NO: 15227144 NR Description: hypothetical protein; protein id: At2g22070.1
  misc_feature (64)..(595): Homolog of NCBI NO: 15240085 NR Description: selenium-binding protein-like; protein id:
  misc_feature (24)..(595): Homolog of NCBI NO: 15223099 NR Description: unknown protein; protein id: At1g08070.1 thaliana] >gi|8778839|gb|AAF79838.1|AC026875_18 T6D22.15
  misc_feature (63)..(595): Homolog of NCBI NO: 15235537 NR Description: putative protein; protein id: At4g37380.1
  misc_feature (79)..(595): Homolog of NCBI NO: 34910298 NR Description: P0013F10.8 [Oryza sativa (japonica
  misc_feature (167)..(595): Homolog of NCBI NO: 15234831 NR Description: putative protein; protein id: At4g30700.1
MRDTLAAAEILRFCATSDLHHRDLDYAHKIFNQMPQRNCFSWNTIIRGFSESDEDKALIAITLFYEMMSDEFVEPNRFTFPSVLKACAKTGKIQEGKQIHGLALKYGFGGDEFVMSNLVRMYVMCGFMKDARVLFYKNIIEKDMVVMTDRRKRDGEIVLWNVMIDGYMRLGDCKAARMLFDKMRQRSVVSWNTMISGYSLNGFFKDAVEVFREMKKGDIRPNYVTLVSVLPAISRLGSLELGEWLHLYAEDSGIRIDDVLGSALIDMYSKCGIIEKAIHVFERLPRENVITWSAMINGFAIHGQAGDAIDCFCKMRQAGVRPSDVAYINLLTACSHGGLVEEGRRYFSQMVSVDGLEPRIEHYGCMVDLLGRSGLLDEAEEFILNMPIKPDDVIWKALLGACRMQGNVEMGKRVANILMDMVPHDSGAYVALSNMYASQGNWSEVSEMRLRMKEKDIRKDPGCSLIDIDGVLHEFVVEDDSHPKAKEINSMLVEISDKLRLAGYRPITTQVLLNLEEEDKENVLHYHSEKIATAFGLISTSPGKPIRIVKNLRICEDCHSSIKLISKVYKRKITVRDRKRFHHFQDGSCSCMDYW

SEQ ID NO: 96291 - protein, 562 aa, Arabidopsis thaliana
  peptide (1)..(562): Ceres Seq. ID no. 12732724
  misc_feature (257)..(291): Pfam Name: PPR repeat Pfam Description: PPR repeat
  misc_feature (127)..(562): Homolog of NCBI NO: 15221306 NR Description: hypothetical protein; protein id: At1g74630.1
  misc_feature (1)..(185): Homolog of NCBI NO: 15221306 NR Description: hypothetical protein; protein id: At1g74630.1
  misc_feature (30)..(562): Homolog of NCBI NO: 15239979 NR Description: selenium-binding protein-like; protein id:
  misc_feature (1)..(562): Homolog of NCBI NO: 15227619 NR Description: hypothetical protein; protein id: At2g29760.1
  misc_feature (1)..(562): Homolog of NCBI NO: 15227144 NR Description: hypothetical protein; protein id: At2g22070.1
  misc_feature (31)..(562): Homolog of NCBI NO: 15240085 NR Description: selenium-binding protein-like; protein id:
  misc_feature (1)..(562): Homolog of NCBI NO: 15223099 NR Description: unknown protein; protein id: At1g08070.1 thaliana] >gi|8778839|gb|AAF79838.1|AC026875_18 T6D22.15
  misc_feature (30)..(562): Homolog of NCBI NO: 15235537 NR Description: putative protein; protein id: At4g37380.1
  misc_feature (46)..(562): Homolog of NCBI NO: 34910298 NR Description: P0013F10.8 [Oryza sativa (japonica
  misc_feature (134)..(562): Homolog of NCBI NO: 15234831 NR Description: putative protein; protein id: At4g30700.1
MPQRNCFSWNTIIRGFSESDEDKALIAITLFYEMMSDEFVEPNRFTFPSVLKACAKTGKIQEGKQIHGLALKYGFGGDEFVMSNLVRMYVMCGFMKDARVLFYKNIIEKDMVVMTDRRKRDGEIVLWNVMIDGYMRLGDCKAARMLFDKMRQRSVVSWNTMISGYSLNGFFKDAVEVFREMKKGDIRPNYVTLVSVLPAISRLGSLELGEWLHLYAEDSGIRIDDVLGSALIDMYSKCGIIEKAIHVFERLPRENVITWSAMINGFAIHGQAGDAIDCFCKMRQAGVRPSDVAYINLLTACSHGGLVEEGRRYFSQMVSVDGLEPRIEHYGCMVDLLGRSGLLDEAEEFILNMPIKPDDVIWKALLGACRMQGNVEMGKRVANILMDMVPHDSGAYVALSNMYASQGNWSEVSEMRLRMKEKDIRKDPGCSLIDIDGVLHEFVVEDDSHPKAKEINSMLVEISDKLRLAGYRPITTQVLLNLEEEDKENVLHYHSEKIATAFGLISTSPGKPIRIVKNLRICEDCHSSIKLISKVYKRKITVRDRKRFHHFQDGSCSCMDYW

SEQ ID NO: 96292 - DNA, 1395 bp, Arabidopsis thaliana
  misc_feature (1)..(1395): Ceres Seq. ID no. 12732751
  misc_feature: MA Experiment ID: 20000265 Result: Up-regulated in Transcription
  misc_feature: MA Experiment 20000265 PARAMETER Experiment Name: At_Open_Flower_P Parameter: Age (day) Value: 21
  misc_feature: MA Experiment 20000265 PARAMETER Experiment Name: At_Open_Flower_P Parameter: Plant Line Value: WS
  misc_feature: MA Experiment 20000265 PARAMETER Experiment Name: At_Open_Flower_P Parameter: Tissue Value: Closed Flower vs. Whole Plant
atgaatcaaacgatacacagagtttcaccaatctccatgagcatctcagagctgacaacacttctcagctcaggtgtttctgtctttgagatctttgccggtttgctagtagtgcatctgatctaccaaagaattagaacaagagtcaaagtctacttacttgatttcacttgttaccgggcacctgactcaaaccgcgtcccaatgtcaactcttatcgaaaccatctacctcgatgacaagcttgatcaagagagtattgacttccaagcccggattcttgagaggtcctggttaagcaaccaaaccagtattcctcgttccctgatggaaatacccctcaagaaatctctctcctcggtcaaaatagaaaccatgaccactatcttcacctctgttgaggatctcctgaggaaaaacaaactaagcccaagaagcatagacatactgataacaaactgtagtttgcattcgccttcaccgtctctaagtgcaatggtgatcaacaaattccatatgagaagcaatatcaagagctttaacctgtctgggatgggttgtgcggctgggattctatcagtcaatttggctaatgatttgctacaggctcaccgaggctcattggctcttattgttagcaccgaagcgctgaacacacattggtacattggcaaagacagatctatgcttcttactaattgtctcttccgaatgggagcagctgcagttttgatgtctagcaatgatcatgacagagacaatgcaaagtatgagctcttgcatgttgttagaaaaaataaagcgaaagatgatcgagcttaccgatgtatctatcaagacatagactctgatgaaaagcaaggggtgtcgataaccaaagatgtaatcagcgttgctggggatatgctgaagatgaatctaacttcactgggacctctggtattaccttacttagagcaattccaatatgtgatacaacacattctttgcaagaaactaaagatctatgagtcgaattcttcttatacaccaaacttcaagacagcgtttgagcatttctgcattcatacaggaggaagagctgtaattcaagcaatggagatgaacctgaaactgacaaaagtagacatcgagccatcaaagatgactcttcataggtttgggaatacttcttcgtcatccatttggtacgctctctcttacttggaagcaaaaaggagaatgaaaaaaggcgatagggtcttgcagattgcatttggaagtgggttcaagtgtaacagtgcggtgtggagatgcatccgaaaagtggagcccaacacagaaaacaaatggctcgactttatcgactcatatcctgtagacgtacctgactctacaaatatcagaccaggctag

SEQ ID NO: 96293 - protein, 464 aa, Arabidopsis thaliana
  peptide (1)..(464): Ceres Seq. ID no. 12732752
  misc_feature (287)..(434): Pfam Name: Chalcone and stilbene synthases, C-terminal domain Pfam Description: Chalcone and stilbene synthases, C-terminal
  misc_feature (1)..(464): Homolog of NCBI NO: 15239786 NR Description: fatty acid elongase; beta-ketoacyl-CoA
  misc_feature (35)..(457): Homolog of NCBI NO: 15221431 NR Description: very-long-chain fatty acid condensing enzyme protein id: At1g68530.1, supported by cDNA: 36276. [Arabidopsis
  misc_feature (35)..(457): Homolog of NCBI NO: 21593111 NR Description: very-long-chain fatty acid condensing enzyme CUT1
  misc_feature (35)..(457): Homolog of NCBI NO: 17979464 NR Description: At1g68530/T26J14_10 [Arabidopsis thaliana]
  misc_feature (33)..(453): Homolog of NCBI NO: 15223964 NR Description: putative ketoacyl-CoA synthase; protein id:
  misc_feature (35)..(457): Homolog of NCBI NO: 15222592 NR Description: fatty acid condensing enzyme CUT1, putative; id: At1g25450.1, supported by cDNA: 99793. [Arabidopsis thaliana]
  misc_feature (35)..(457): Homolog of NCBI NO: 28393607 NR Description: putative fatty acid condensing enzyme CUT1
  misc_feature (35)..(457): Homolog of NCBI NO: 21618184 NR Description: fatty acid condensing enzyme CUT1, putative
  misc_feature (26)..(453): Homolog of NCBI NO: 15223556 NR Description: very-long-chain fatty acid condensing enzyme putative; protein id: At1g19440.1, supported by cDNA: 158882.
  misc_feature (13)..(455): Homolog of NCBI NO: 15236133 NR Description: putative ketoacyl-CoA synthase; protein id:
MNQTIHRVSPISMSISELTTLLSSGVSVFEIFAGLLVVHLIYQRIRTRVKVYLLDFTCYRAPDSNRVPMSTLIETIYLDDKLDQESIDFQARILERSWLSNQTSIPRSLMEIPLKKSLSSVKIETMTTIFTSVEDLLRKNKLSPRSIDILITNCSLHSPSPSLSAMVINKFHMRSNIKSFNLSGMGCAAGILSVNLANDLLQAHRGSLALIVSTEALNTHWYIGKDRSMLLTNCLFRMGAAAVLMSSNDHDRDNAKYELLHVVRKNKAKDDRAYRCIYQDIDSDEKQGVSITKDVISVAGDMLKMNLTSLGPLVLPYLEQFQYVIQHILCKKLKIYESNSSYTPNFKTAFEHFCIHTGGRAVIQAMEMNLKLTKVDIEPSKMTLHRFGNTSSSSIWYALSYLEAKRRMKKGDRVLQIAFGSGFKCNSAVWRCIRKVEPNTENKWLDFIDSYPVDVPDSTNIRPG

SEQ ID NO: 96294 - protein, 452 aa, Arabidopsis thaliana
  peptide (1)..(452): Ceres Seq. ID no. 12732753
  misc_feature (275)..(422): Pfam Name: Chalcone and stilbene synthases, C-terminal domain Pfam Description: Chalcone and stilbene synthases, C-terminal
  misc_feature (1)..(452): Homolog of NCBI NO: 15239786 NR Description: fatty acid elongase; beta-ketoacyl-CoA
  misc_feature (23)..(445): Homolog of NCBI NO: 15221431 NR Description: very-long-chain fatty acid condensing enzyme protein id: At1g68530.1, supported by cDNA: 36276. [Arabidopsis
  misc_feature (23)..(445): Homolog of NCBI NO: 21593111 NR Description: very-long-chain fatty acid condensing enzyme CUT1
  misc_feature (23)..(445): Homolog of NCBI NO: 17979464 NR Description: At1g68530/T26J14_10 [Arabidopsis thaliana]
  misc_feature (21)..(441): Homolog of NCBI NO: 15223964 NR Description: putative ketoacyl-CoA synthase; protein id:
  misc_feature (23)..(445): Homolog of NCBI NO: 15222592 NR Description: fatty acid condensing enzyme CUT1, putative; id: At1g25450.1, supported by cDNA: 99793. [Arabidopsis thaliana]
  misc_feature (23)..(445): Homolog of NCBI NO: 28393607 NR Description: putative fatty acid condensing enzyme CUT1
  misc_feature (23)..(445): Homolog of NCBI NO: 21618184 NR Description: fatty acid condensing enzyme CUT1, putative
  misc_feature (14)..(441): Homolog of NCBI NO: 15223556 NR Description: very-long-chain fatty acid condensing enzyme putative; protein id: At1g19440.1, supported by cDNA: 158882.
  misc_feature (1)..(443): Homolog of NCBI NO: 15236133 NR Description: putative ketoacyl-CoA synthase; protein id:
MSISELTTLLSSGVSVFEIFAGLLVVHLIYQRIRTRVKVYLLDFTCYRAPDSNRVPMSTLIETIYLDDKLDQESIDFQARILERSWLSNQTSIPRSLMEIPLKKSLSSVKIETMTTIFTSVEDLLRKNKLSPRSIDILITNCSLHSPSPSLSAMVINKFHMRSNIKSFNLSGMGCAAGILSVNLANDLLQAHRGSLALIVSTEALNTHWYIGKDRSMLLTNCLFRMGAAAVLMSSNDHDRDNAKYELLHVVRKNKAKDDRAYRCIYQDIDSDEKQGVSITKDVISVAGDMLKMNLTSLGPLVLPYLEQFQYVIQHILCKKLKIYESNSSYTPNFKTAFEHFCIHTGGRAVIQAMEMNLKLTKVDIEPSKMTLHRFGNTSSSSIWYALSYLEAKRRMKKGDRVLQIAFGSGFKCNSAVWRCIRKVEPNTENKWLDFIDSYPVDVPDSTNIRPG

SEQ ID NO: 96295 - protein, 396 aa, Arabidopsis thaliana
  peptide (1)..(396): Ceres Seq. ID no. 12732754
  misc_feature (219)..(366): Pfam Name: Chalcone and stilbene synthases, C-terminal domain Pfam Description: Chalcone and stilbene synthases, C-terminal
  misc_feature (1)..(396): Homolog of NCBI NO: 15239786 NR Description: fatty acid elongase; beta-ketoacyl-CoA
  misc_feature (1)..(389): Homolog of NCBI NO: 15221431 NR Description: very-long-chain fatty acid condensing enzyme protein id: At1g68530.1, supported by cDNA: 36276. [Arabidopsis
  misc_feature (1)..(389): Homolog of NCBI NO: 21593111 NR Description: very-long-chain fatty acid condensing enzyme CUT1
  misc_feature (1)..(389): Homolog of NCBI NO: 17979464 NR Description: At1g68530/T26J14_10 [Arabidopsis thaliana]
  misc_feature (1)..(385): Homolog of NCBI NO: 15223964 NR Description: putative ketoacyl-CoA synthase; protein id:
  misc_feature (1)..(389): Homolog of NCBI NO: 15222592 NR Description: fatty acid condensing enzyme CUT1, putative; id: At1g25450.1, supported by cDNA: 99793. [Arabidopsis thaliana]
  misc_feature (1)..(389): Homolog of NCBI NO: 28393607 NR Description: putative fatty acid condensing enzyme CUT1
  misc_feature (1)..(389): Homolog of NCBI NO: 21618184 NR Description: fatty acid condensing enzyme CUT1, putative
  misc_feature (1)..(385): Homolog of NCBI NO: 15223556 NR Description: very-long-chain fatty acid condensing enzyme putative; protein id: At1g19440.1, supported by cDNA: 158882.
  misc_feature (1)..(387): Homolog of NCBI NO: 15236133 NR Description: putative ketoacyl-CoA synthase; protein id:
MSTLIETIYLDDKLDQESIDFQARILERSWLSNQTSIPRSLMEIPLKKSLSSVKIETMTTIFTSVEDLLRKNKLSPRSIDILITNCSLHSPSPSLSAMVINKFHMRSNIKSFNLSGMGCAAGILSVNLANDLLQAHRGSLALIVSTEALNTHWYIGKDRSMLLTNCLFRMGAAAVLMSSNDHDRDNAKYELLHVVRKNKAKDDRAYRCIYQDIDSDEKQGVSITKDVISVAGDMLKMNLTSLGPLVLPYLEQFQYVIQHILCKKLKIYESNSSYTPNFKTAFEHFCIHTGGRAVIQAMEMNLKLTKVDIEPSKMTLHRFGNTSSSSIWYALSYLEAKRRMKKGDRVLQIAFGSGFKCNSAVWRCIRKVEPNTENKWLDFIDSYPVDVPDSTNIRPG

SEQ ID NO: 96296 - DNA, 1777 bp, Arabidopsis thaliana
  misc_feature (1)..(1777): Ceres Seq. ID no. 12732772
  misc_feature: MA Experiment ID: 20000439 Result: Up-regulated in Transcription
  misc_feature: MA Experiment 20000439 PARAMETER Experiment Name: At_Roots__P Parameter: Age (day) Value: 14 vs. 21
  misc_feature: MA Experiment 20000439 PARAMETER Experiment Name: At_Roots__P Parameter: Organism Value: A. thaliana
  misc_feature: MA Experiment 20000439 PARAMETER Experiment Name: At_Roots__P Parameter: Tissue Value: Roots vs. Whole Plant
  misc_feature: MA Experiment ID: 20000495 Result: Down-regulated in Transcription
  misc_feature: MA Experiment 20000495 PARAMETER Experiment Name: At_Guard_Cells_P Parameter: Harvest Date Value: 8/2/2002
  misc_feature: MA Experiment 20000495 PARAMETER Experiment Name: At_Guard_Cells_P Parameter: Organism Value: A. thaliana
  misc_feature: MA Experiment 20000495 PARAMETER Experiment Name: At_Guard_Cells_P Parameter: Tissue Value: Guard Cells vs. Leaves
  misc_feature: MA Experiment ID: 20000496 Result: Down-regulated in Transcription
  misc_feature: MA Experiment 20000496 PARAMETER Experiment Name: At_Guard_Cells_P Parameter: Harvest Date Value: 7/19/2002
  misc_feature: MA Experiment 20000496 PARAMETER Experiment Name: At_Guard_Cells_P Parameter: Organism Value: Canola
  misc_feature: MA Experiment 20000496 PARAMETER Experiment Name: At_Guard_Cells_P Parameter: Tissue Value: Guard Cells vs. Leaves
  misc_feature: MA Experiment ID: 20001451 Result: Down-regulated in Transcription
  misc_feature: MA Experiment 20001451 PARAMETER Experiment Name: At_Far-red-induction_P Parameter: Age (day) Value: 7
  misc_feature: MA Experiment 20001451 PARAMETER Experiment Name: At_Far-red-induction_P Parameter: Light Value: Far-red vs. White
  misc_feature: MA Experiment 20001451 PARAMETER Experiment Name: At_Far-red-induction_P Parameter: Organism Value: A. thaliana
  misc_feature: MA Experiment 20001451 PARAMETER Experiment Name: At_Far-red-induction_P Parameter: Plant Line Value: Columbia
  misc_feature: MA Experiment 20001451 PARAMETER Experiment Name: At_Far-red-induction_P Parameter: Timepoint (hr) Value: 24
  misc_feature: MA Experiment 20001451 PARAMETER Experiment Name: At_Far-red-induction_P Parameter: Tissue Value: Whole Plant
acttcctcagtttctccaactctgtacttcgtatcatcaagcgaaaccctaaaagaagcaatctttagtctcttctcttctttattttttctggggagaaagaaatttcacttttttttatccgatttctgcttcatctgggttttggatttttgcgatcgattttgagaaattagcaaacaatgtcgggttctggaggagtttcaatcgcacgtacagcgatccgtggtgagaatcggttttataatccacctccgatgcgtaggatgcagcaagaggcccaattgcagcaacagattagggagaagcaacgtcgtgatgatgaagatgaggttttgatggataaggaaaggagaaaggctgctactgttgctccgaggactactaggaaaggtcttggtgtgtcggagagtaagagtcgggttgttgtttcgggttcggaagtatgtgccggttcttctgattcttcttccgggtcgggtcgggttcttagtgatgggtctaacttggatcggttcttggagcatactactcctgttgttcctgctcgtttatttcccatgaggagcaggtgggaacttaaaacccgtgaatcggattgccatacgtattttgttttggaggatctttgggagtcatttgctgaatggagtgcatacggtgctggtgttcctttagagatgcatcctctagaaatgcatgggaatgactccactgtgcagtattatgtgccttacttatccggtattcagttgtatgttgatccgttgaagaagcctagaaatccagttggagataatgaaggaagtagtgaaggaagcagcaacagtaggactttgccggtggacttgagtgtcggtgaactgaatagaattagtctgaaagatcaatctattactggctcgttgtctagtggagaagctgagatcagcaatccgcagggacgattactattcgagtacttggagtatgaacctccatttggcagggaacctctggctaacaaaatctcggatctcgcgtcaagagttcctgagctaatgacataccggagctgtgatcttcttccttcaagttgggtctctgtgtcatggtatccaatatacagaataccggttggtccaacactacaaaatcttgatgcctgctttctaacttttcactctctctcaacagcacctcctcaaagtgctatgggttgtagtgattcacaaccatccacaaagctaccgttgcctacttttggactcgcatcttataagctgaaagtatctgtgtggaaccaaaatagaattcaagagtcccaaaagatgacttctttgctacaagctgcagataaatggctcaagcgtctgcaagttgatcatccagactacagattcttcacctctaacagtccacaaatgaggtgaaaatgaaagatacattcttgaccatggatttggctctggtctgatcaaaagacccattatctgctgctcttacttcacatataaagtctctcttacactgaagaaccaccaaatagtggttagactcttgcgtgtttttcaggcgatttaagagtctctgctgtttcgtttccagaagatgctttgtgaattgtagcctaatcttcctctttcttcttctgaaacttagtcttttgattttccctgaataaggatttgaggagcccatatagtgaaatttgcgaggagtgtttttgtaatgttgagatgcaacactttttgtgatacaatttgattgctgaactgatgaaacacagggttggctt

SEQ ID NO: 96297 - protein, 409 aa, Arabidopsis thaliana
  peptide (1)..(409): Ceres Seq. ID no. 12732773
  misc_feature (107)..(401): Pfam Name: Protein of unknown function (DUF789) Pfam Description: Protein of unknown function (DUF789)
  misc_feature (1)..(409): Homolog of NCBI NO: 22327664 NR Description: putative protein; protein id: At5g49220.1, by cDNA: gi_17381185, supported by cDNA: gi_20465842 [Arabidopsis >gi|17381186|gb|AAL36405.1| unknown protein [Arabidopsis
  misc_feature (53)..(409): Homolog of NCBI NO: 10177151 NR Description: gb|AAF31026.1~gene_id:K21P3.10~similar to unknown
  misc_feature (14)..(405): Homolog of NCBI NO: 15450996 NR Description: Unknown protein [Arabidopsis thaliana]
  misc_feature (1)..(405): Homolog of NCBI NO: 34897254 NR Description: hypothetical protein [Oryza sativa (japonica group)] >gi|28372687|gb|AAO39871.1| hypothetical protein [Oryza
  misc_feature (107)..(401): Homolog of NCBI NO: 18379188 NR Description: predicted by genscan and genefinder; protein id: supported by cDNA: 8949. [Arabidopsis thaliana]
  misc_feature (104)..(401): Homolog of NCBI NO: 22329567 NR Description: hypothetical protein; protein id: At1g15030.1, by cDNA: gi_17979166, supported by cDNA: gi_20259122 [Arabidopsis
  misc_feature (107)..(303): Homolog of NCBI NO: 25373432 NR Description: hypothetical protein At2g01260 [imported] -
  misc_feature (314)..(401): Homolog of NCBI NO: 25373432 NR Description: hypothetical protein At2g01260 [imported] -
  misc_feature (108)..(404): Homolog of NCBI NO: 34394268 NR Description: hypothetical protein [Oryza sativa (japonica
  misc_feature (100)..(404): Homolog of NCBI NO: 37535654 NR Description: unknown protein [Oryza sativa (japonica
MSGSGGVSIARTAIRGENRFYNPPPMRRMQQEAQLQQQIREKQRRDDEDEVLMDKERRKAATVAPRTTRKGLGVSESKSRVVVSGSEVCAGSSDSSSGSGRVLSDGSNLDRFLEHTTPVVPARLFPMRSRWELKTRESDCHTYFVLEDLWESFAEWSAYGAGVPLEMHPLEMHGNDSTVQYYVPYLSGIQLYVDPLKKPRNPVGDNEGSSEGSSNSRTLPVDLSVGELNRISLKDQSITGSLSSGEAEISNPQGRLLFEYLEYEPPFGREPLANKISDLASRVPELMTYRSCDLLPSSWVSVSWYPIYRIPVGPTLQNLDACFLTFHSLSTAPPQSAMGCSDSQPSTKLPLPTFGLASYKLKVSVWNQNRIQESQKMTSLLQAADKWLKRLQVDHPDYRFFTSNSPQMR

SEQ ID NO: 96298 - protein, 384 aa, Arabidopsis thaliana
  peptide (1)..(384): Ceres Seq. ID no. 12732774
  misc_feature (82)..(376): Pfam Name: Protein of unknown function (DUF789) Pfam Description: Protein of unknown function (DUF789)
  misc_feature (1)..(384): Homolog of NCBI NO: 22327664 NR Description: putative protein; protein id: At5g49220.1, by cDNA: gi_17381185, supported by cDNA: gi_20465842 [Arabidopsis >gi|17381186|gb|AAL36405.1| unknown protein [Arabidopsis
  misc_feature (28)..(384): Homolog of NCBI NO: 10177151 NR Description: gb|AAF31026.1~gene_id:K21P3.10~similar to unknown
  misc_feature (1)..(380): Homolog of NCBI NO: 15450996 NR Description: Unknown protein [Arabidopsis thaliana]
  misc_feature (1)..(380): Homolog of NCBI NO: 34897254 NR Description: hypothetical protein [Oryza sativa (japonica group)] >gi|28372687|gb|AAO39871.1| hypothetical protein [Oryza
  misc_feature (82)..(376): Homolog of NCBI NO: 18379188 NR Description: predicted by genscan and genefinder; protein id: supported by cDNA: 8949. [Arabidopsis thaliana]
  misc_feature (79)..(376): Homolog of NCBI NO: 22329567 NR Description: hypothetical protein; protein id: At1g15030.1, by cDNA: gi_17979166, supported by cDNA: gi_20259122 [Arabidopsis
  misc_feature (82)..(278): Homolog of NCBI NO: 25373432 NR Description: hypothetical protein At2g01260 [imported] -
  misc_feature (289)..(376): Homolog of NCBI NO: 25373432 NR Description: hypothetical protein At2g01260 [imported] -
  misc_feature (83)..(379): Homolog of NCBI NO: 34394268 NR Description: hypothetical protein [Oryza sativa (japonica
  misc_feature (75)..(379): Homolog of NCBI NO: 37535654 NR Description: unknown protein [Oryza sativa (japonica
MRRMQQEAQLQQQIREKQRRDDEDEVLMDKERRKAATVAPRTTRKGLGVSESKSRVVVSGSEVCAGSSDSSSGSGRVLSDGSNLDRFLEHTTPVVPARLFPMRSRWELKTRESDCHTYFVLEDLWESFAEWSAYGAGVPLEMHPLEMHGNDSTVQYYVPYLSGIQLYVDPLKKPRNPVGDNEGSSEGSSNSRTLPVDLSVGELNRISLKDQSITGSLSSGEAEISNPQGRLLFEYLEYEPPFGREPLANKISDLASRVPELMTYRSCDLLPSSWVSVSWYPIYRIPVGPTLQNLDACFLTFHSLSTAPPQSAMGCSDSQPSTKLPLPTFGLASYKLKVSVWNQNRIQESQKMTSLLQAADKWLKRLQVDHPDYRFFTSNSPQMR

SEQ ID NO: 96299 - protein, 381 aa, Arabidopsis thaliana
  peptide (1)..(381): Ceres Seq. ID no. 12732775
  misc_feature (79)..(373): Pfam Name: Protein of unknown function (DUF789) Pfam Description: Protein of unknown function (DUF789)
  misc_feature (1)..(381): Homolog of NCBI NO: 22327664 NR Description: putative protein; protein id: At5g49220.1, by cDNA: gi_17381185, supported by cDNA: gi_20465842 [Arabidopsis >gi|17381186|gb|AAL36405.1| unknown protein [Arabidopsis
  misc_feature (25)..(381): Homolog of NCBI NO: 10177151 NR Description: gb|AAF31026.1~gene_id:K21P3.10~similar to unknown
  misc_feature (1)..(377): Homolog of NCBI NO: 15450996 NR Description: Unknown protein [Arabidopsis thaliana]
  misc_feature (1)..(377): Homolog of NCBI NO: 34897254 NR Description: hypothetical protein [Oryza sativa (japonica group)] >gi|28372687|gb|AAO39871.1| hypothetical protein [Oryza
  misc_feature (79)..(373): Homolog of NCBI NO: 18379188 NR Description: predicted by genscan and genefinder; protein id: supported by cDNA: 8949. [Arabidopsis thaliana]
  misc_feature (76)..(373): Homolog of NCBI NO: 22329567 NR Description: hypothetical protein; protein id: At1g15030.1, by cDNA: gi_17979166, supported by cDNA: gi_20259122 [Arabidopsis
  misc_feature (79)..(275): Homolog of NCBI NO: 25373432 NR Description: hypothetical protein At2g01260 [imported] -
  misc_feature (286)..(373): Homolog of NCBI NO: 25373432 NR Description: hypothetical protein At2g01260 [imported] -
  misc_feature (80)..(376): Homolog of NCBI NO: 34394268 NR Description: hypothetical protein [Oryza sativa (japonica
  misc_feature (72)..(376): Homolog of NCBI NO: 37535654 NR Description: unknown protein [Oryza sativa (japonica
MQQEAQLQQQIREKQRRDDEDEVLMDKERRKAATVAPRTTRKGLGVSESKSRVVVSGSEVCAGSSDSSSGSGRVLSDGSNLDRFLEHTTPVVPARLFPMRSRWELKTRESDCHTYFVLEDLWESFAEWSAYGAGVPLEMHPLEMHGNDSTVQYYVPYLSGIQLYVDPLKKPRNPVGDNEGSSEGSSNSRTLPVDLSVGELNRISLKDQSITGSLSSGEAEISNPQGRLLFEYLEYEPPFGREPLANKISDLASRVPELMTYRSCDLLPSSWVSVSWYPIYRIPVGPTLQNLDACFLTFHSLSTAPPQSAMGCSDSQPSTKLPLPTFGLASYKLKVSVWNQNRIQESQKMTSLLQAADKWLKRLQVDHPDYRFFTSNSPQMR

SEQ ID NO: 96300 - DNA, 1374 bp, Arabidopsis thaliana
  misc_feature (1)..(1374): Ceres Seq. ID no. 12732799
  misc_feature: MA Experiment ID: 20000185 Result: Up-regulated in Transcription
  misc_feature: MA Experiment 20000185 PARAMETER Experiment Name: At_Roots__P Parameter: Age (day) Value: 7 vs. 21
  misc_feature: MA Experiment 20000185 PARAMETER Experiment Name: At_Roots__P Parameter: Organism Value: A. thaliana
  misc_feature: MA Experiment 20000185 PARAMETER Experiment Name: At_Roots__P Parameter: Tissue Value: Roots vs. Whole Plant
atggcggatctaaagaatctcttcctcatcacgaaacatccatcaacaacacagatcttcctaacgtctctcttcttcctttctctcttcctcctctcctcttcttctctctcagatttctctccatcactcatcgtctctagcttcacctctcgtcttctcacagcagcaaacttcttctcttctccttcttcttatacttcctctgcttcagatacaactatgtttctctcttctgtttctcccagaagaatcaacgagccaaagattgattcggagaccaaagaactcgcttcttgcgacatttttgatggaacttgggtctttgacgattctgaaccggtttatcttcctggttattgtcctttcgttgaagataaattcaactgcttcaagaatggtcgacctgattcggggtttctccgtcatcgatggcaacctcatggatgctcgattccaagattcgatgggaagaagatgttgaagatgctgagagggaaaagagttgtttttgttggtgattcattgaatagaaacatgtgggagtctctggtttgttcacttaggtcaacattggaagacaaaaacagagtttctaagattattggaaaacagagtaatcttcctaacgaaggcttttacggtttcaggttcaatgactttgaatgctctattgacttcatcaaatcaccattcctcgttcaagaatcagaagttgtagatgtatacgggaagagaagagagacactgagactcgatatgattcaaagatcgatgacgaagatatacaaaaacgcagacattgttatatttaacactggtcactggtggactcaccagaaaacctacgaagggaaaggttattaccaggaaggaaatagggtttacgaaagattagaagtgaaagaagcttatacaaaagctattcatacatgggctgactgggttgattccaatatcaacagtactaaaaccagagtcttcttcgttggttattcctcttcacattttagaaaaggggcgtggaatagcggaggacaatgcgatggagaaacaagaccgatacagaacgaaacgtacacaggagtgtatccatggatgatgaaagttgtagaatctgtgatctcggaaatgaaaacgcctgtgttttacatgaacattacgaagatgacttggtaccgaacagatggtcatccgtcggtttacagacagcccgccgacccccgaggaacttctcctgcagcgggaatgtaccaagattgtagtcattggtgcttacctggagttcctgattcatggaaccagcttctctacgctactctgctagtttcacatggttccttgcctgacaagtcacttggaagtctcttgtaa

SEQ ID NO: 96301 - protein, 457 aa, Arabidopsis thaliana
  peptide (1)..(457): Ceres Seq. ID no. 12732800
  misc_feature (277)..(441): Pfam Name: Arabidopsis proteins of unknown function Pfam Description: Arabidopsis proteins of unknown function
  misc_feature (1)..(457): Homolog of NCBI NO: 15239856 NR Description: putative protein; protein id: At5g49340.1
  misc_feature (58)..(448): Homolog of NCBI NO: 9759298 NR Description: emb|CAB82953.1~gene_id:MPH15.5~strong similarity
  misc_feature (57)..(442): Homolog of NCBI NO: 22330347 NR Description: hypothetical protein; protein id: At1g60790.1, by cDNA: gi_17979148 [Arabidopsis thaliana] unknown protein [Arabidopsis thaliana]
  misc_feature (78)..(451): Homolog of NCBI NO: 15229945 NR Description: hypothetical protein; protein id: At3g12060.1 thaliana] >gi|10998147|dbj|BAB03118.1| to unknown protein [Arabidopsis thaliana]
  misc_feature (125)..(448): Homolog of NCBI NO: 21618305 NR Description: unknown [Arabidopsis thaliana]
  misc_feature (81)..(443): Homolog of NCBI NO: 21592371 NR Description: unknown [Arabidopsis thaliana]
  misc_feature (81)..(443): Homolog of NCBI NO: 15242021 NR Description: putative protein; protein id: At5g20590.1,
  misc_feature (163)..(448): Homolog of NCBI NO: 18415287 NR Description: putative protein; protein id: At5g06700.1,
  misc_feature (32)..(442): Homolog of NCBI NO: 15228743 NR Description: putative protein; protein id: At3g62390.1, by cDNA: 126100. [Arabidopsis thaliana] >gi|11357988|pir||T48031
  misc_feature (40)..(455): Homolog of NCBI NO: 15239660 NR Description: putative protein; protein id: At5g19160.1
MADLKNLFLITKHPSTTQIFLTSLFFLSLFLLSSSSLSDFSPSLIVSSFTSRLLTAANFFSSPSSYTSSASDTTMFLSSVSPRRINEPKIDSETKELASCDIFDGTWVFDDSEPVYLPGYCPFVEDKFNCFKNGRPDSGFLRHRWQPHGCSIPRFDGKKMLKMLRGKRVVFVGDSLNRNMWESLVCSLRSTLEDKNRVSKIIGKQSNLPNEGFYGFRFNDFECSIDFIKSPFLVQESEVVDVYGKRRETLRLDMIQRSMTKIYKNADIVIFNTGHWWTHQKTYEGKGYYQEGNRVYERLEVKEAYTKAIHTWADWVDSNINSTKTRVFFVGYSSSHFRKGAWNSGGQCDGETRPIQNETYTGVYPWMMKVVESVISEMKTPVFYMNITKMTWYRTDGHPSVYRQPADPRGTSPAAGMYQDCSHWCLPGVPDSWNQLLYATLLVSHGSLPDKSLGSLL

SEQ ID NO: 96302 - protein, 383 aa, Arabidopsis thaliana
  peptide (1)..(383): Ceres Seq. ID no. 12732801
  misc_feature (203)..(367): Pfam Name: Arabidopsis proteins of unknown function Pfam Description: Arabidopsis proteins of unknown function
  misc_feature (1)..(383): Homolog of NCBI NO: 15239856 NR Description: putative protein; protein id: At5g49340.1
  misc_feature (1)..(374): Homolog of NCBI NO: 9759298 NR Description: emb|CAB82953.1~gene_id:MPH15.5~strong similarity
  misc_feature (1)..(368): Homolog of NCBI NO: 22330347 NR Description: hypothetical protein; protein id: At1g60790.1, by cDNA: gi_17979148 [Arabidopsis thaliana] unknown protein [Arabidopsis thaliana]
  misc_feature (4)..(377): Homolog of NCBI NO: 15229945 NR Description: hypothetical protein; protein id: At3g12060.1 thaliana] >gi|10998147|dbj|BAB03118.1| to unknown protein [Arabidopsis thaliana]
  misc_feature (51)..(374): Homolog of NCBI NO: 21618305 NR Description: unknown [Arabidopsis thaliana]
  misc_feature (7)..(369): Homolog of NCBI NO: 21592371 NR Description: unknown [Arabidopsis thaliana]
  misc_feature (7)..(369): Homolog of NCBI NO: 15242021 NR Description: putative protein; protein id: At5g20590.1,
  misc_feature (89)..(374): Homolog of NCBI NO: 18415287 NR Description: putative protein; protein id: At5g06700.1,
  misc_feature (1)..(368): Homolog of NCBI NO: 15228743 NR Description: putative protein; protein id: At3g62390.1, by cDNA: 126100. [Arabidopsis thaliana] >gi|11357988|pir||T48031
  misc_feature (1)..(381): Homolog of NCBI NO: 15239660 NR Description: putative protein; protein id: At5g19160.1
MFLSSVSPRRINEPKIDSETKELASCDIFDGTWVFDDSEPVYLPGYCPFVEDKFNCFKNGRPDSGFLRHRWQPHGCSIPRFDGKKMLKMLRGKRVVFVGDSLNRNMWESLVCSLRSTLEDKNRVSKIIGKQSNLPNEGFYGFRFNDFECSIDFIKSPFLVQESEVVDVYGKRRETLRLDMIQRSMTKIYKNADIVIFNTGHWWTHQKTYEGKGYYQEGNRVYERLEVKEAYTKAIHTWADWVDSNINSTKTRVFFVGYSSSHFRKGAWNSGGQCDGETRPIQNETYTGVYPWMMKVVESVISEMKTPVFYMNITKMTWYRTDGHPSVYRQPADPRGTSPAAGMYQDCSHWCLPGVPDSWNQLLYATLLVSHGSLPDKSLGSLL

SEQ ID NO: 96303 - protein, 298 aa, Arabidopsis thaliana
  peptide (1)..(298): Ceres Seq. ID no. 12732802
  misc_feature (118)..(282): Pfam Name: Arabidopsis proteins of unknown function Pfam Description: Arabidopsis proteins of unknown function
  misc_feature (1)..(298): Homolog of NCBI NO: 15239856 NR Description: putative protein; protein id: At5g49340.1
  misc_feature (1)..(289): Homolog of NCBI NO: 9759298 NR Description: emb|CAB82953.1~gene_id:MPH15.5~strong similarity
  misc_feature (1)..(283): Homolog of NCBI NO: 22330347 NR Description: hypothetical protein; protein id: At1g60790.1, by cDNA: gi_17979148 [Arabidopsis thaliana] unknown protein [Arabidopsis thaliana]
  misc_feature (1)..(292): Homolog of NCBI NO: 15229945 NR Description: hypothetical protein; protein id: At3g12060.1 thaliana] >gi|10998147|dbj|BAB03118.1| to unknown protein [Arabidopsis thaliana]
  misc_feature (1)..(289): Homolog of NCBI NO: 21618305 NR Description: unknown [Arabidopsis thaliana]
  misc_feature (1)..(284): Homolog of NCBI NO: 21592371 NR Description: unknown [Arabidopsis thaliana]
  misc_feature (1)..(284): Homolog of NCBI NO: 15242021 NR Description: putative protein; protein id: At5g20590.1,
  misc_feature (4)..(289): Homolog of NCBI NO: 18415287 NR Description: putative protein; protein id: At5g06700.1,
  misc_feature (1)..(283): Homolog of NCBI NO: 15228743 NR Description: putative protein; protein id: At3g62390.1, by cDNA: 126100. [Arabidopsis thaliana] >gi|11357988|pir||T48031
  misc_feature (1)..(296): Homolog of NCBI NO: 15239660 NR Description: putative protein; protein id: At5g19160.1
MLKMLRGKRVVFVGDSLNRNMWESLVCSLRSTLEDKNRVSKIIGKQSNLPNEGFYGFRFNDFECSIDFIKSPFLVQESEVVDVYGKRRETLRLDMIQRSMTKIYKNADIVIFNTGHWWTHQKTYEGKGYYQEGNRVYERLEVKEAYTKAIHTWADWVDSNINSTKTRVFFVGYSSSHFRKGAWNSGGQCDGETRPIQNETYTGVYPWMMKVVESVISEMKTPVFYMNITKMTWYRTDGHPSVYRQPADPRGTSPAAGMYQDCSHWCLPGVPDSWNQLLYATLLVSHGSLPDKSLGSLL

SEQ ID NO: 96304 - DNA, 2905 bp, Arabidopsis thaliana
  misc_feature (1)..(2905): Ceres Seq. ID no. 12732812
  misc_feature: MA Experiment ID: 20000495 Result: Down-regulated in Transcription
  misc_feature: MA Experiment 20000495 PARAMETER Experiment Name: At_Guard_Cells_P Parameter: Harvest Date Value: 8/2/2002
  misc_feature: MA Experiment 20000495 PARAMETER Experiment Name: At_Guard_Cells_P Parameter: Organism Value: A. thaliana
  misc_feature: MA Experiment 20000495 PARAMETER Experiment Name: At_Guard_Cells_P Parameter: Tissue Value: Guard Cells vs. Leaves
aaagataagcaaattagttttccttctttgttgactctctccagattctgtttcttcttccttaatccatctctcaagcttctccaccattttcaccttgattcagcttctccgattcaaactcagatttgatctccgttgatttgatttgactgcgtttttctggcaatggagaagacgactccaccagcggaggagcttctaaagaagatacgagagttagaagaaagccaagagcatctaaaacgagagatgtcgagacttaaagtatcggcggagatgaagcagcgttcgcattcagcatcgccgcaacgtcctgtgaggagaaacagtaacgacggaactccgatgtggagaaaaaccggtgcggcttcgtttcgtcacgcttctccgttgcgtaaggagagccatgcgaaagttgccggcggcggaggcgaggggcaatcggcaggcaagttcaccgataaacagtatttgaatattttgcagtctatggctcaagctgttcatgtcttcgatctaaatggccaaattatcttttggaactcaatggcggagaagctttatggattctcagcttcagaagcactggggaaggatccgattgatattcttgtagatgttcaggatgcttcggttgcacagaatatcactcggcgttgcagtagtggagagagttggactggtgagtttcctgtaaagaacaaagctggagagaggttttcagttgtgactacgatgtctccttcttatgatgatgatggttgtcttattgggatcatatgtatcacaaatgattcggcactctttcaagacccgagaggctctccggctaagacaaggagggggcaagaaggtgaaacgagctttagtcgggtgactagtagtgttgcatctaagcttggtcttgactcgaaagaggcggttgtatcaaaacttggccttgattctcagcagcctatacaagttgctatagcttcaaagatatcagatttggttagtctaattaggttgcatattctgatcttttcgtaaactgtcgtatgactagtgtagtcaacatttcaggcatctaaggtgggcaacaaggtcaagtcgaaaatgcgagcaggtgataataacgctgcaaaccttgagggtggaagtggggacagtcatcaatctgatcagggtttctttgatgctgctttcgctgaccggagggaggatgcagcaacaagtggtgctgatacacctaggggggattttatccaatctccttttggtgtattcttacgtagcgatgagaaagcttctacaaagcccttcagagattccagtgatgaaagtgatggaaactctgttgtacctaaaacactgacctcaaaagctgaagagtggatggtaaagaaaggattatcatggccatggaaagggaatgaaagggaaggtttggaaggaaggcgtagtcattctgtgtggccttgggtgcggaatgaacaacaaaaacaacaggcttatcaaagcaattctaatcacagtgttaagtctgaaagccaggcatgtgaaagtattaaggcttccagtaacgagcctatggggtattggtcttcctctgttaatgtgaacagcacaagcagtagtagcagctgtggaagtaccagcagcagtgttatgaacaaggtcgatatggatagtgactgcttggattatgaaatcttatgggaagatttgacaattggagaacaaatcgggcaaggttcatgtggaactgtctatcacggtctatggtttggatccgatgtggctgtaaaggtgttttccaaacaagaatattcagaagagatcataacatcttttagacaagaggtatcgttgatgaaaagacttagacatcctaacgttttactgtttatgggagccgtgacatcacctcagcgtctctgtatagtgacagagttccttccacgtggaagtctcttccgtttgctgcagaggaacacgtcaaaactggattggaggcgacgtatccatatggcctcggatattgctcgtggcatgaattatcttcaccattgtactccaccgatcattcaccgagatttgaagtcatcaaatctactggttgataaaaactggaccgtgaaggttgctgactttggtctttcgcgtatcaagcatgagacgtacctcactacaaagacaggaaggggaacgcctcaatggatggcaccggaagttctccgaaatgaggctgctgatgaaaagtctgacgtttacagctttggagtaatactatgggagctggtgactgagaagatcccgtgggaaagtctaaatgctatgcaggtgattggagctgtagggttcatgaaccagagactggaagtcccgaaaaatgttgatcctcagtggatttctttaatggaaagctgctggcatagtgaaccgcaggacagaccatcgttccaagaaattatggagaaactaagagagcttcaaagaaagtacactatacagtttcaggcggctcgtgctgcatcaatagaaaactctgccctcaaggaaaaataaaccattaaatggaccgagcggagtctgattatgcgttgagaaagctgagctacataagcaaagcagaaaggtgtttcatgtttgcgttgaagcgcaatgacgagaagcaccaaaaagaagggttttggtatatgcaaacatattctctcgagccattcttttgtatggaattgattctgaaaacgtcatcgattgcgaggcgagctaaagaggttatttatgtaaaaccattatgcctgtgacagacccaattttttaagaatagtctgtacaggtgaaagtatgagatagaatcaagatttggaacactgattctgagtaaatattgccatttttattggaacatgccttg

SEQ ID NO: 96305 - protein, 483 aa, Arabidopsis thaliana
  peptide (1)..(483): Ceres Seq. ID no. 12732813
  misc_feature (204)..(440): Pfam Name: Protein kinase domain Pfam Description: Protein kinase domain
  misc_feature (1)..(483): Homolog of NCBI NO: 22327668 NR Description: protein kinase; protein id: At5g49470.1,
  misc_feature (1)..(483): Homolog of NCBI NO: 12321912 NR Description: protein kinase, putative; 42705-46677
  misc_feature (1)..(483): Homolog of NCBI NO: 15230755 NR Description: protein kinase, putative; protein id: At3g06640.1
  misc_feature (1)..(440): Homolog of NCBI NO: 15230754 NR Description: protein kinase, putative; protein id: At3g06630.1
  misc_feature (1)..(482): Homolog of NCBI NO: 15230753 NR Description: protein kinase, putative; protein id:
  misc_feature (1)..(282): Homolog of NCBI NO: 29367363 NR Description: protein kinase-like protein [Oryza sativa
  misc_feature (186)..(462): Homolog of NCBI NO: 18416060 NR Description: putative serine/threonine kinase; protein id: supported by cDNA: gi_15810436 [Arabidopsis thaliana]
  misc_feature (186)..(462): Homolog of NCBI NO: 30686028 NR Description: serine/threonine kinase -related [Arabidopsis
  misc_feature (1)..(174): Homolog of NCBI NO: 15230753 NR Description: protein kinase, putative; protein id:
  misc_feature (153)..(464): Homolog of NCBI NO: 15219517 NR Description: putative protein kinase; protein id: At1g73660.1, by cDNA: gi_20466321 [Arabidopsis thaliana]
MRAGDNNAANLEGGSGDSHQSDQGFFDAAFADRREDAATSGADTPRGDFIQSPFGVFLRSDEKASTKPFRDSSDESDGNSVVPKTLTSKAEEWMVKKGLSWPWKGNEREGLEGRRSHSVWPWVRNEQQKQQAYQSNSNHSVKSESQACESIKASSNEPMGYWSSSVNVNSTSSSSSCGSTSSSVMNKVDMDSDCLDYEILWEDLTIGEQIGQGSCGTVYHGLWFGSDVAVKVFSKQEYSEEIITSFRQEVSLMKRLRHPNVLLFMGAVTSPQRLCIVTEFLPRGSLFRLLQRNTSKLDWRRRIHMASDIARGMNYLHHCTPPIIHRDLKSSNLLVDKNWTVKVADFGLSRIKHETYLTTKTGRGTPQWMAPEVLRNEAADEKSDVYSFGVILWELVTEKIPWESLNAMQVIGAVGFMNQRLEVPKNVDPQWISLMESCWHSEPQDRPSFQEIMEKLRELQRKYTIQFQAARAASIENSALKEK

SEQ ID NO: 96306 - protein, 390 aa, Arabidopsis thaliana
  peptide (1)..(390): Ceres Seq. ID no. 12732814
  misc_feature (111)..(347): Pfam Name: Protein kinase domain Pfam Description: Protein kinase domain
  misc_feature (1)..(390): Homolog of NCBI NO: 22327668 NR Description: protein kinase; protein id: At5g49470.1,
  misc_feature (1)..(390): Homolog of NCBI NO: 12321912 NR Description: protein kinase, putative; 42705-46677
  misc_feature (1)..(390): Homolog of NCBI NO: 15230755 NR Description: protein kinase, putative; protein id: At3g06640.1
  misc_feature (1)..(347): Homolog of NCBI NO: 15230754 NR Description: protein kinase, putative; protein id: At3g06630.1
  misc_feature (1)..(389): Homolog of NCBI NO: 15230753 NR Description: protein kinase, putative; protein id:
  misc_feature (1)..(189): Homolog of NCBI NO: 29367363 NR Description: protein kinase-like protein [Oryza sativa
  misc_feature (93)..(369): Homolog of NCBI NO: 18416060 NR Description: putative serine/threonine kinase; protein id: supported by cDNA: gi_15810436 [Arabidopsis thaliana]
  misc_feature (93)..(369): Homolog of NCBI NO: 30686028 NR Description: serine/threonine kinase -related [Arabidopsis
  misc_feature (1)..(81): Homolog of NCBI NO: 15230753 NR Description: protein kinase, putative; protein id:
  misc_feature (60)..(371): Homolog of NCBI NO: 15219517 NR Description: putative protein kinase; protein id: At1g73660.1, by cDNA: gi_20466321 [Arabidopsis thaliana]
MVKKGLSWPWKGNEREGLEGRRSHSVWPWVRNEQQKQQAYQSNSNHSVKSESQACESIKASSNEPMGYWSSSVNVNSTSSSSSCGSTSSSVMNKVDMDSDCLDYEILWEDLTIGEQIGQGSCGTVYHGLWFGSDVAVKVFSKQEYSEEIITSFRQEVSLMKRLRHPNVLLFMGAVTSPQRLCIVTEFLPRGSLFRLLQRNTSKLDWRRRIHMASDIARGMNYLHHCTPPIIHRDLKSSNLLVDKNWTVKVADFGLSRIKHETYLTTKTGRGTPQWMAPEVLRNEAADEKSDVYSFGVILWELVTEKIPWESLNAMQVIGAVGFMNQRLEVPKNVDPQWISLMESCWHSEPQDRPSFQEIMEKLRELQRKYTIQFQAARAASIENSALKEK

SEQ ID NO: 96307 - protein, 325 aa, Arabidopsis thaliana
  peptide (1)..(325): Ceres Seq. ID no. 12732815
  misc_feature (46)..(282): Pfam Name: Protein kinase domain Pfam Description: Protein kinase domain
  misc_feature (1)..(325): Homolog of NCBI NO: 22327668 NR Description: protein kinase; protein id: At5g49470.1,
  misc_feature (1)..(325): Homolog of NCBI NO: 12321912 NR Description: protein kinase, putative; 42705-46677
  misc_feature (1)..(325): Homolog of NCBI NO: 15230755 NR Description: protein kinase, putative; protein id: At3g06640.1
  misc_feature (1)..(282): Homolog of NCBI NO: 15230754 NR Description: protein kinase, putative; protein id: At3g06630.1
  misc_feature (1)..(324): Homolog of NCBI NO: 15230753 NR Description: protein kinase, putative; protein id:
  misc_feature (1)..(124): Homolog of NCBI NO: 29367363 NR Description: protein kinase-like protein [Oryza sativa
  misc_feature (28)..(304): Homolog of NCBI NO: 18416060 NR Description: putative serine/threonine kinase; protein id: supported by cDNA: gi_15810436 [Arabidopsis thaliana]
  misc_feature (28)..(304): Homolog of NCBI NO: 30686028 NR Description: serine/threonine kinase -related [Arabidopsis
  misc_feature (1)..(16): Homolog of NCBI NO: 15230753 NR Description: protein kinase, putative; protein id:
  misc_feature (1)..(306): Homolog of NCBI NO: 15219517 NR Description: putative protein kinase; protein id: At1g73660.1, by cDNA: gi_20466321 [Arabidopsis thaliana]
MGYWSSSVNVNSTSSSSSCGSTSSSVMNKVDMDSDCLDYEILWEDLTIGEQIGQGSCGTVYHGLWFGSDVAVKVFSKQEYSEEIITSFRQEVSLMKRLRHPNVLLFMGAVTSPQRLCIVTEFLPRGSLFRLLQRNTSKLDWRRRIHMASDIARGMNYLHHCTPPIIHRDLKSSNLLVDKNWTVKVADFGLSRIKHETYLTTKTGRGTPQWMAPEVLRNEAADEKSDVYSFGVILWELVTEKIPWESLNAMQVIGAVGFMNQRLEVPKNVDPQWISLMESCWHSEPQDRPSFQEIMEKLRELQRKYTIQFQAARAASIENSALKEK

SEQ ID NO: 96308 - DNA, 1494 bp, Arabidopsis thaliana
  misc_feature (1)..(1494): Ceres Seq. ID no. 12732824
  misc_feature: MA Experiment ID: 20000234 Result: Up-regulated in Transcription
  misc_feature: MA Experiment 20000234 PARAMETER Experiment Name: At_Siliques_P Parameter: Age (day) Value: 21
  misc_feature: MA Experiment 20000234 PARAMETER Experiment Name: At_Siliques_P Parameter: Organism Value: A. thaliana
  misc_feature: MA Experiment 20000234 PARAMETER Experiment Name: At_Siliques_P Parameter: Plant Line Value: WS
  misc_feature: MA Experiment 20000234 PARAMETER Experiment Name: At_Siliques_P Parameter: Tissue Value: Less Than 5mm Siliques vs. Whole Plant
  misc_feature: MA Experiment ID: 20000235 Result: Up-regulated in Transcription
  misc_feature: MA Experiment 20000235 PARAMETER Experiment Name: At_Siliques_P Parameter: Age (day) Value: 21
  misc_feature: MA Experiment 20000235 PARAMETER Experiment Name: At_Siliques_P Parameter: Organism Value: A. thaliana
  misc_feature: MA Experiment 20000235 PARAMETER Experiment Name: At_Siliques_P Parameter: Plant Line Value: WS
  misc_feature: MA Experiment 20000235 PARAMETER Experiment Name: At_Siliques_P Parameter: Tissue Value: 5-10mm Siliques vs. Whole Plant
  misc_feature: MA Experiment ID: 20000264 Result: Up-regulated in Transcription
  misc_feature: MA Experiment 20000264 PARAMETER Experiment Name: At_Open_Flower_P Parameter: Age (day) Value: 21
  misc_feature: MA Experiment 20000264 PARAMETER Experiment Name: At_Open_Flower_P Parameter: Plant Line Value: WS
  misc_feature: MA Experiment 20000264 PARAMETER Experiment Name: At_Open_Flower_P Parameter: Tissue Value: Open Flower vs. Whole Plant
  misc_feature: MA Experiment ID: 20000265 Result: Up-regulated in Transcription
  misc_feature: MA Experiment 20000265 PARAMETER Experiment Name: At_Open_Flower_P Parameter: Age (day) Value: 21
  misc_feature: MA Experiment 20000265 PARAMETER Experiment Name: At_Open_Flower_P Parameter: Plant Line Value: WS
  misc_feature: MA Experiment 20000265 PARAMETER Experiment Name: At_Open_Flower_P Parameter: Tissue Value: Closed Flower vs. Whole Plant
  misc_feature: MA Experiment ID: 20000439 Result: Up-regulated in Transcription
  misc_feature: MA Experiment 20000439 PARAMETER Experiment Name: At_Roots__P Parameter: Age (day) Value: 14 vs. 21
  misc_feature: MA Experiment 20000439 PARAMETER Experiment Name: At_Roots__P Parameter: Organism Value: A. thaliana
  misc_feature: MA Experiment 20000439 PARAMETER Experiment Name: At_Roots__P Parameter: Tissue Value: Roots vs. Whole Plant
  misc_feature: MA Experiment ID: 20000451 Result: Up-regulated in Transcription
  misc_feature: MA Experiment 20000451 PARAMETER Experiment Name: At_CS6879_Shoots-Roots_P Parameter: Age (day) Value: 14
  misc_feature: MA Experiment 20000451 PARAMETER Experiment Name: At_CS6879_Shoots-Roots_P Parameter: Organism Value: A. thaliana
  misc_feature: MA Experiment 20000451 PARAMETER Experiment Name: At_CS6879_Shoots-Roots_P Parameter: Plant Line Value: CS6879 vs. WS
  misc_feature: MA Experiment 20000451 PARAMETER Experiment Name: At_CS6879_Shoots-Roots_P Parameter: Tissue Value: Roots
  misc_feature: MA Experiment ID: 20000794 Result: Up-regulated in Transcription
  misc_feature: MA Experiment 20000794 PARAMETER Experiment Name: At_Petals_P Parameter: Age (day) Value: 23-25 days
  misc_feature: MA Experiment 20000794 PARAMETER Experiment Name: At_Petals_P Parameter: Plant Line Value: WS
  misc_feature: MA Experiment 20000794 PARAMETER Experiment Name: At_Petals_P Parameter: Tissue Value: Petals vs. Whole plant
atggtgttggcggagcttggaggtcggattatgagcgccatacagaagatgaacaatgtgacaataatcgatgaaaaggctctgaatgattgcttgaacgagatcactcgtgctctgctccagtccgatgtttctttcccccttgtgaaggagatgcagaccaatattaagaaaatcgtcaaccttgaggatctagcagccggccataacaagcgtcgtatcattgagcaggcgatcttcagtgaactctgtaagatgttggatccaggaaagtctgcatttgctcccaaaaaggccaaacctagtgtagttatgttcgtcggattacaaggtgaggtgctggaaaaaccacaacttgtaccaagtatgcttattatcatcagaagaaaagggtacaaaccagctctagtgtgtgcggatactttcagggcaggtgcttttgatcagctgaaacagaatgccaccaaatctaagatcccctattatggaagttacacaggatccgatcctgtgaaaattgctgttgagggagttgataggttcaagaaagaaaattgtgatcttattattgttgacaccagtggtcgccataaacaacaagcttctctctttgaagaaatgcgtcaaatttctgaagcaacgaaaccagatcttgttatatttgttatggatagcagtattggtcaaactgcgtttgaacaagctcgagcatttaaacaaactgttgctgtgggagctgtaattattactaagatggatggtcatgccaagggtggtgggactcttagcgctgttgcagctacaaaaagtcctgtcatattcattggaacaggagagcatatggatgagtttgaagtttttgatgctaaaccgtttgtcagccgtctcttaggaaatggtgatatgtctggattcgtgaataaactacaagaggtggtacctaaagatcaacagcctgaacttctggaaatgctctctcatggtaaatttacattgagaattatgtacgaccagttccagaacatgctgaacatgggcccacttaaggaggttttctccatgctacctggaatgcgtgctgaaatgatgccagagggacatgagaaagaaagccaggcgaagataaagcgatacatgacaatgatggactctatgactaatgaagaactggacagctcaaatccaaaggtgtttaacgagtcaaggataatgcggatagcaagagggtcagggaggattgtaagagaagtgatggagatgttggaagagtacaaaaggttaacaactatgtgggggaaggtgaaagggcttaagaacctagagaaaggaaatatgagcgcactctcaaaaaacaagaactcgcagcaattgagtaaggtcctaccggctcagatgctaaagcagattggcggcatgagtggtctgcagagtctcatgaagcagatgggttcaggtaaagacctgatgggaatgttcggtggccgagacgagtag

SEQ ID NO: 96309 - protein, 497 aa, Arabidopsis thaliana
  peptide (1)..(497): Ceres Seq. ID no. 12732825
  misc_feature (329)..(431): Pfam Name: Signal peptide binding domain Pfam Description: Signal peptide binding domain
  misc_feature (1)..(497): Homolog of NCBI NO: 15239909 NR Description: SRP54 (signal recognition particle 54 KDa) protein id: At5g49500.1 [Arabidopsis thaliana] SRP54 (signal recognition particle 54 KDa) protein [Arabidopsis
  misc_feature (1)..(497): Homolog of NCBI NO: 1711510 NR Description: Signal recognition particle 54 kDa protein 2 >gi|515679|gb|AAA66199.1| signal recognition particle 54 kDa
  misc_feature (1)..(497): Homolog of NCBI NO: 18402407 NR Description: signal recognition particle 54 kDa protein 2 putative; protein id: At1g48900.1, supported by cDNA: supported by cDNA: gi_15810009, supported by cDNA: gi_17386101
  misc_feature (1)..(497): Homolog of NCBI NO: 515681 NR Description: signal recognition particle 54 kDa subunit
  misc_feature (165)..(497): Homolog of NCBI NO: 25294409 NR Description: hypothetical protein F27K7.8 [imported] - thaliana >gi|11094805|gb|AAG29734.1|AC084414_2 signal recognition
  misc_feature (1)..(165): Homolog of NCBI NO: 25294409 NR Description: hypothetical protein F27K7.8 [imported] - thaliana >gi|11094805|gb|AAG29734.1|AC084414_2 signal recognition
  misc_feature (1)..(497): Homolog of NCBI NO: 1711512 NR Description: SIGNAL RECOGNITION PARTICLE 54 KD PROTEIN 2
  misc_feature (1)..(494): Homolog of NCBI NO: 2119055 NR Description: signal recognition particle 54K protein - tomato
  misc_feature (1)..(494): Homolog of NCBI NO: 1711509 NR Description: SIGNAL RECOGNITION PARTICLE 54 KD PROTEIN 1
  misc_feature (1)..(494): Homolog of NCBI NO: 18394225 NR Description: expressed protein; protein id: At1g15310.1, by cDNA: 22158., supported by cDNA: gi_12745000 [Arabidopsis >gi|586036|sp|P37106|SR51_ARATH Signal recognition particle 54
MVLAELGGRIMSAIQKMNNVTIIDEKALNDCLNEITRALLQSDVSFPLVKEMQTNIKKIVNLEDLAAGHNKRRIIEQAIFSELCKMLDPGKSAFAPKKAKPSVVMFVGLQGEVLEKPQLVPSMLIIIRRKGYKPALVCADTFRAGAFDQLKQNATKSKIPYYGSYTGSDPVKIAVEGVDRFKKENCDLIIVDTSGRHKQQASLFEEMRQISEATKPDLVIFVMDSSIGQTAFEQARAFKQTVAVGAVIITKMDGHAKGGGTLSAVAATKSPVIFIGTGEHMDEFEVFDAKPFVSRLLGNGDMSGFVNKLQEVVPKDQQPELLEMLSHGKFTLRIMYDQFQNMLNMGPLKEVFSMLPGMRAEMMPEGHEKESQAKIKRYMTMMDSMTNEELDSSNPKVFNESRIMRIARGSGRIVREVMEMLEEYKRLTTMWGKVKGLKNLEKGNMSALSKNKNSQQLSKVLPAQMLKQIGGMSGLQSLMKQMGSGKDLMGMFGGRDE

SEQ ID NO: 96310 - protein, 487 aa, Arabidopsis thaliana
  peptide (1)..(487): Ceres Seq. ID no. 12732826
  misc_feature (319)..(421): Pfam Name: Signal peptide binding domain Pfam Description: Signal peptide binding domain
  misc_feature (1)..(487): Homolog of NCBI NO: 15239909 NR Description: SRP54 (signal recognition particle 54 KDa) protein id: At5g49500.1 [Arabidopsis thaliana] SRP54 (signal recognition particle 54 KDa) protein [Arabidopsis
  misc_feature (1)..(487): Homolog of NCBI NO: 1711510 NR Description: Signal recognition particle 54 kDa protein 2 >gi|515679|gb|AAA66199.1| signal recognition particle 54 kDa
  misc_feature (1)..(487): Homolog of NCBI NO: 18402407 NR Description: signal recognition particle 54 kDa protein 2 putative; protein id: At1g48900.1, supported by cDNA: supported by cDNA: gi_15810009, supported by cDNA: gi_17386101
  misc_feature (1)..(487): Homolog of NCBI NO: 515681 NR Description: signal recognition particle 54 kDa subunit
  misc_feature (155)..(487): Homolog of NCBI NO: 25294409 NR Description: hypothetical protein F27K7.8 [imported] - thaliana >gi|11094805|gb|AAG29734.1|AC084414_2 signal recognition
  misc_feature (1)..(155): Homolog of NCBI NO: 25294409 NR Description: hypothetical protein F27K7.8 [imported] - thaliana >gi|11094805|gb|AAG29734.1|AC084414_2 signal recognition
  misc_feature (1)..(487): Homolog of NCBI NO: 1711512 NR Description: SIGNAL RECOGNITION PARTICLE 54 KD PROTEIN 2
  misc_feature (1)..(484): Homolog of NCBI NO: 2119055 NR Description: signal recognition particle 54K protein - tomato
  misc_feature (1)..(484): Homolog of NCBI NO: 1711509 NR Description: SIGNAL RECOGNITION PARTICLE 54 KD PROTEIN 1
  misc_feature (1)..(484): Homolog of NCBI NO: 18394225 NR Description: expressed protein; protein id: At1g15310.1, by cDNA: 22158., supported by cDNA: gi_12745000 [Arabidopsis >gi|586036|sp|P37106|SR51_ARATH Signal recognition particle 54
MSAIQKMNNVTIIDEKALNDCLNEITRALLQSDVSFPLVKEMQTNIKKIVNLEDLAAGHNKRRIIEQAIFSELCKMLDPGKSAFAPKKAKPSVVMFVGLQGEVLEKPQLVPSMLIIIRRKGYKPALVCADTFRAGAFDQLKQNATKSKIPYYGSYTGSDPVKIAVEGVDRFKKENCDLIIVDTSGRHKQQASLFEEMRQISEATKPDLVIFVMDSSIGQTAFEQARAFKQTVAVGAVIITKMDGHAKGGGTLSAVAATKSPVIFIGTGEHMDEFEVFDAKPFVSRLLGNGDMSGFVNKLQEVVPKDQQPELLEMLSHGKFTLRIMYDQFQNMLNMGPLKEVFSMLPGMRAEMMPEGHEKESQAKIKRYMTMMDSMTNEELDSSNPKVFNESRIMRIARGSGRIVREVMEMLEEYKRLTTMWGKVKGLKNLEKGNMSALSKNKNSQQLSKVLPAQMLKQIGGMSGLQSLMKQMGSGKDLMGMFGGRDE

SEQ ID NO: 96311 - protein, 481 aa, Arabidopsis thaliana
  peptide (1)..(481): Ceres Seq. ID no. 12732827
  misc_feature (313)..(415): Pfam Name: Signal peptide binding domain Pfam Description: Signal peptide binding domain
  misc_feature (1)..(481): Homolog of NCBI NO: 15239909 NR Description: SRP54 (signal recognition particle 54 KDa) protein id: At5g49500.1 [Arabidopsis thaliana] SRP54 (signal recognition particle 54 KDa) protein [Arabidopsis
  misc_feature (1)..(481): Homolog of NCBI NO: 1711510 NR Description: Signal recognition particle 54 kDa protein 2 >gi|515679|gb|AAA66199.1| signal recognition particle 54 kDa
  misc_feature (1)..(481): Homolog of NCBI NO: 18402407 NR Description: signal recognition particle 54 kDa protein 2 putative; protein id: At1g48900.1, supported by cDNA: supported by cDNA: gi_15810009, supported by cDNA: gi_17386101
  misc_feature (1)..(481): Homolog of NCBI NO: 515681 NR Description: signal recognition particle 54 kDa subunit
  misc_feature (149)..(481): Homolog of NCBI NO: 25294409 NR Description: hypothetical protein F27K7.8 [imported] - thaliana >gi|11094805|gb|AAG29734.1|AC084414_2 signal recognition
  misc_feature (1)..(149): Homolog of NCBI NO: 25294409 NR Description: hypothetical protein F27K7.8 [imported] - thaliana >gi|11094805|gb|AAG29734.1|AC084414_2 signal recognition
  misc_feature (1)..(481): Homolog of NCBI NO: 1711512 NR Description: SIGNAL RECOGNITION PARTICLE 54 KD PROTEIN 2
  misc_feature (1)..(478): Homolog of NCBI NO: 2119055 NR Description: signal recognition particle 54K protein - tomato
  misc_feature (1)..(478): Homolog of NCBI NO: 1711509 NR Description: SIGNAL RECOGNITION PARTICLE 54 KD PROTEIN 1
  misc_feature (1)..(478): Homolog of NCBI NO: 18394225 NR Description: expressed protein; protein id: At1g15310.1, by cDNA: 22158., supported by cDNA: gi_12745000 [Arabidopsis >gi|586036|sp|P37106|SR51_ARATH Signal recognition particle 54
MNNVTIIDEKALNDCLNEITRALLQSDVSFPLVKEMQTNIKKIVNLEDLAAGHNKRRIIEQAIFSELCKMLDPGKSAFAPKKAKPSVVMFVGLQGEVLEKPQLVPSMLIIIRRKGYKPALVCADTFRAGAFDQLKQNATKSKIPYYGSYTGSDPVKIAVEGVDRFKKENCDLIIVDTSGRHKQQASLFEEMRQISEATKPDLVIFVMDSSIGQTAFEQARAFKQTVAVGAVIITKMDGHAKGGGTLSAVAATKSPVIFIGTGEHMDEFEVFDAKPFVSRLLGNGDMSGFVNKLQEVVPKDQQPELLEMLSHGKFTLRIMYDQFQNMLNMGPLKEVFSMLPGMRAEMMPEGHEKESQAKIKRYMTMMDSMTNEELDSSNPKVFNESRIMRIARGSGRIVREVMEMLEEYKRLTTMWGKVKGLKNLEKGNMSALSKNKNSQQLSKVLPAQMLKQIGGMSGLQSLMKQMGSGKDLMGMFGGRDE

SEQ ID NO: 96312 - DNA, 1791 bp, Arabidopsis thaliana
  misc_feature (1)..(1791): Ceres Seq. ID no. 12732828
  misc_feature: MA Experiment ID: 20000182 Result: Up-regulated in Transcription
  misc_feature: MA Experiment 20000182 PARAMETER Experiment Name: At_2mM_SA_P Parameter: Age (day) Value: 14
  misc_feature: MA Experiment 20000182 PARAMETER Experiment Name: At_2mM_SA_P Parameter: Organism Value: A. thaliana
  misc_feature: MA Experiment 20000182 PARAMETER Experiment Name: At_2mM_SA_P Parameter: Plant Line Value: WS
  misc_feature: MA Experiment 20000182 PARAMETER Experiment Name: At_2mM_SA_P Parameter: Timepoint (hr) Value: 6
  misc_feature: MA Experiment 20000182 PARAMETER Experiment Name: At_2mM_SA_P Parameter: Tissue Value: Aerial
  misc_feature: MA Experiment 20000182 PARAMETER Experiment Name: At_2mM_SA_P Parameter: Treatment Value: 2mM SA vs. No Treatment
  misc_feature: MA Experiment ID: 20000185 Result: Down-regulated in Transcription
  misc_feature: MA Experiment 20000185 PARAMETER Experiment Name: At_Roots__P Parameter: Age (day) Value: 7 vs. 21
  misc_feature: MA Experiment 20000185 PARAMETER Experiment Name: At_Roots__P Parameter: Organism Value: A. thaliana
  misc_feature: MA Experiment 20000185 PARAMETER Experiment Name: At_Roots__P Parameter: Tissue Value: Roots vs. Whole Plant
  misc_feature: MA Experiment ID: 20000438 Result: Down-regulated in Transcription
  misc_feature: MA Experiment 20000438 PARAMETER Experiment Name: At_Shoots__P Parameter: Age (day) Value: 14
  misc_feature: MA Experiment 20000438 PARAMETER Experiment Name: At_Shoots__P Parameter: Tissue Value: Shoots vs. Whole Plant
  misc_feature: MA Experiment ID: 20000453 Result: Up-regulated in Transcription
  misc_feature: MA Experiment 20000453 PARAMETER Experiment Name: At_100uM_ABA_P Parameter: Age (day) Value: 15
  misc_feature: MA Experiment 20000453 PARAMETER Experiment Name: At_100uM_ABA_P Parameter: Organism Value: A. thaliana
  misc_feature: MA Experiment 20000453 PARAMETER Experiment Name: At_100uM_ABA_P Parameter: Plant Line Value: WS
  misc_feature: MA Experiment 20000453 PARAMETER Experiment Name: At_100uM_ABA_P Parameter: Timepoint (hr) Value: 24
  misc_feature: MA Experiment 20000453 PARAMETER Experiment Name: At_100uM_ABA_P Parameter: Tissue Value: Aerial
  misc_feature: MA Experiment 20000453 PARAMETER Experiment Name: At_100uM_ABA_P Parameter: Treatment Value: 100uM ABA vs. No Treatment
  misc_feature: MA Experiment ID: 20000460 Result: Up-regulated in Transcription
  misc_feature: MA Experiment 20000460 PARAMETER Experiment Name: At_10percent_PEG_P Parameter: Age (day) Value: 12
  misc_feature: MA Experiment 20000460 PARAMETER Experiment Name: At_10percent_PEG_P Parameter: Organism Value: A. thaliana
  misc_feature: MA Experiment 20000460 PARAMETER Experiment Name: At_10percent_PEG_P Parameter: Plant Line Value: WS
  misc_feature: MA Experiment 20000460 PARAMETER Experiment Name: At_10percent_PEG_P Parameter: Timepoint (day) Value: 12
  misc_feature: MA Experiment 20000460 PARAMETER Experiment Name: At_10percent_PEG_P Parameter: Tissue Value: Whole Plant
  misc_feature: MA Experiment 20000460 PARAMETER Experiment Name: At_10percent_PEG_P Parameter: Treatment Value: 10percent PEG vs. No Treatment
  misc_feature: MA Experiment ID: 20000495 Result: Down-regulated in Transcription
  misc_feature: MA Experiment 20000495 PARAMETER Experiment Name: At_Guard_Cells_P Parameter: Harvest Date Value: 8/2/2002
  misc_feature: MA Experiment 20000495 PARAMETER Experiment Name: At_Guard_Cells_P Parameter: Organism Value: A. thaliana
  misc_feature: MA Experiment 20000495 PARAMETER Experiment Name: At_Guard_Cells_P Parameter: Tissue Value: Guard Cells vs. Leaves
  misc_feature: MA Experiment ID: 20000496 Result: Down-regulated in Transcription
  misc_feature: MA Experiment 20000496 PARAMETER Experiment Name: At_Guard_Cells_P Parameter: Harvest Date Value: 7/19/2002
  misc_feature: MA Experiment 20000496 PARAMETER Experiment Name: At_Guard_Cells_P Parameter: Organism Value: Canola
  misc_feature: MA Experiment 20000496 PARAMETER Experiment Name: At_Guard_Cells_P Parameter: Tissue Value: Guard Cells vs. Leaves
  misc_feature: MA Experiment ID: 20000527 Result: Up-regulated in Transcription
  misc_feature: MA Experiment 20000527 PARAMETER Experiment Name: At_10percent_PEG_P Parameter: Age (day) Value: 20
  misc_feature: MA Experiment 20000527 PARAMETER Experiment Name: At_10percent_PEG_P Parameter: Organism Value: A. thaliana
  misc_feature: MA Experiment 20000527 PARAMETER Experiment Name: At_10percent_PEG_P Parameter: Plant Line Value: WS
  misc_feature: MA Experiment 20000527 PARAMETER Experiment Name: At_10percent_PEG_P Parameter: Timepoint (day) Value: 20
  misc_feature: MA Experiment 20000527 PARAMETER Experiment Name: At_10percent_PEG_P Parameter: Tissue Value: Whole Plant
  misc_feature: MA Experiment 20000527 PARAMETER Experiment Name: At_10percent_PEG_P Parameter: Treatment Value: 10percent PEG vs. No Treatment
aatcacccagaaagctaaagaaaagttttccttttttcccctcacgaaatctcagagaagatgatatatatctataaaagtatcatctcatagattccatcttttctctattacatggagaagaaaaaagaagaggatcatcatcatcaacaacaacaacaacaacaaaaggagatcaagaacacagagacaaagatcgagcaagaacaagaacaagaacaaaaacaagaaatctctcaagcatcatcatcatcaaacatggcgaatctagttacgtcatcagatcatcatccgttggagctagctggaaatctctcaagcatcttcgatacttcatctttaccttttccttattcttatttcgaagatcactcttctaataatcctaattctttcctagacttgctccgacaagatcatcagtttgcttcttcctctaattcctcttctttttcattcgatgcctttcctctccccaataacaacaacaacacctctttttttacggatttgcccttacctcaagctgagtcatcagaagtcgtgaacacaacaccgacttctccaaactcaacctcagtctcatcttcctccaacgaagctgcaaatgataacaacagtggtaaagaagttactgttaaagatcaagaagaaggagatcaacaacaagagcaaaagggtactaagccacagttgaaggcaaagaagaagaatcaaaagaaagctagagaagctaggtttgcgtttctgacgaagagcgatattgataatcttgacgacggttataggtggagaaaatacggccaaaaagctgtcaaaaacagtccttatcccagaagctattaccgttgcaccacagtgggttgcggagtgaagaagagagtggagagatcctccgatgatccttcgatcgtcatgacaacctacgaaggtcagcatacccatcctttccccatgacgccacgtggacacatcggaatgctcacgtcaccaatcctagaccacggtgcaaccaccgcgtcatcatcatcattctccatccctcagccacgttacttgctgactcaacatcaccagccctacaacatgtacaacaacaactctctaagtatgatcaatagaagatcatccgatggcactttcgtaaatccaggtccatcatcatcattccccggctttggttatgatatgtctcaagcttctacttcaacttcttcttccattagagatcatggattgcttcaagatattcttccttcgcagatcagatccgatactattaacactcaaaccaatgaagagaataagaaatgaagaagttttttttcccggggcaattgtttttttctttaggccggatccggtaggtaggtttcatgaggagtttttggtcggtttaggtaaaccgatgttgatggctttctaatgtttttttcttcattacatttagcatcggttttgtttcatcaccacgaaataagcaatcgacgctaagttggaacagaggtttatgtagcatatgtgatataggtataacttcattttttgtttgagtattaataaagatgtatcgttaactttttatgacttcggagagagaagagtttaatctagttatatagtatgtatttagttgtattatagtgtttctagaccatctaatttgtaatcatgctatcactagcccggctcagaatcttacatttattttattttcatatatccatcctaatcgatgtagatttacataacatacagtatacacaaagatacttcgaggtttgttgctat

SEQ ID NO: 96313 - protein, 399 aa, Arabidopsis thaliana
  peptide (1)..(399): Ceres Seq. ID no. 12732829
  misc_feature (220)..(279): Pfam Name: WRKY DNA -binding domain Pfam Description: WRKY DNA -binding domain
  misc_feature (1)..(399): Homolog of NCBI NO: 15239913 NR Description: WRKY family transcription factor; protein id: supported by cDNA: gi_17064165, supported by cDNA: gi_17380791, by cDNA: gi_20259612 [Arabidopsis thaliana]
  misc_feature (84)..(384): Homolog of NCBI NO: 15226550 NR Description: WRKY family transcription factor; protein id: supported by cDNA: 114256., supported by cDNA: gi_15990583
  misc_feature (84)..(381): Homolog of NCBI NO: 21536889 NR Description: putative WRKY-type DNA binding protein
  misc_feature (84)..(369): Homolog of NCBI NO: 15220582 NR Description: WRKY family transcription factor; protein id: supported by cDNA: gi_15991739 [Arabidopsis thaliana]
  misc_feature (88)..(349): Homolog of NCBI NO: 15222282 NR Description: WRKY family transcription factor; protein id: supported by cDNA: gi_18252124 [Arabidopsis thaliana]
  misc_feature (152)..(369): Homolog of NCBI NO: 25518132 NR Description: F1N18.10 protein - Arabidopsis thaliana
  misc_feature (143)..(386): Homolog of NCBI NO: 34912866 NR Description: putative DNA-binding protein homolog [Oryza
  misc_feature (163)..(385): Homolog of NCBI NO: 13236648 NR Description: putative DNA binding protein [Oryza sativa]
  misc_feature (69)..(285): Homolog of NCBI NO: 15236785 NR Description: WRKY family transcription factor; protein id: supported by cDNA: gi_17064157, supported by cDNA: gi_17979527 thaliana] >gi|17064158|gb|AAL35286.1|AF442393_1 WRKY
  misc_feature (148)..(391): Homolog of NCBI NO: 11357984 NR Description: hypothetical protein T12C14.40 - Arabidopsis >gi|7340705|emb|CAB82948.1| putative protein [Arabidopsis
MEKKKEEDHHHQQQQQQQKEIKNTETKIEQEQEQEQKQEISQASSSSNMANLVTSSDHHPLELAGNLSSIFDTSSLPFPYSYFEDHSSNNPNSFLDLLRQDHQFASSSNSSSFSFDAFPLPNNNNNTSFFTDLPLPQAESSEVVNTTPTSPNSTSVSSSSNEAANDNNSGKEVTVKDQEEGDQQQEQKGTKPQLKAKKKNQKKAREARFAFLTKSDIDNLDDGYRWRKYGQKAVKNSPYPRSYYRCTTVGCGVKKRVERSSDDPSIVMTTYEGQHTHPFPMTPRGHIGMLTSPILDHGATTASSSSFSIPQPRYLLTQHHQPYNMYNNNSLSMINRRSSDGTFVNPGPSSSFPGFGYDMSQASTSTSSSIRDHGLLQDILPSQIRSDTINTQTNEENKK

SEQ ID NO: 96314 - protein, 351 aa, Arabidopsis thaliana
  peptide (1)..(351): Ceres Seq. ID no. 12732830
  misc_feature (172)..(231): Pfam Name: WRKY DNA -binding domain Pfam Description: WRKY DNA -binding domain
  misc_feature (1)..(351): Homolog of NCBI NO: 15239913 NR Description: WRKY family transcription factor; protein id: supported by cDNA: gi_17064165, supported by cDNA: gi_17380791, by cDNA: gi_20259612 [Arabidopsis thaliana]
  misc_feature (36)..(336): Homolog of NCBI NO: 15226550 NR Description: WRKY family transcription factor; protein id: supported by cDNA: 114256., supported by cDNA: gi_15990583
  misc_feature (36)..(333): Homolog of NCBI NO: 21536889 NR Description: putative WRKY-type DNA binding protein
  misc_feature (36)..(321): Homolog of NCBI NO: 15220582 NR Description: WRKY family transcription factor; protein id: supported by cDNA: gi_15991739 [Arabidopsis thaliana]
  misc_feature (40)..(301): Homolog of NCBI NO: 15222282 NR Description: WRKY family transcription factor; protein id: supported by cDNA: gi_18252124 [Arabidopsis thaliana]
  misc_feature (104)..(321): Homolog of NCBI NO: 25518132 NR Description: F1N18.10 protein - Arabidopsis thaliana
  misc_feature (95)..(338): Homolog of NCBI NO: 34912866 NR Description: putative DNA-binding protein homolog [Oryza
  misc_feature (115)..(337): Homolog of NCBI NO: 13236648 NR Description: putative DNA binding protein [Oryza sativa]
  misc_feature (21)..(237): Homolog of NCBI NO: 15236785 NR Description: WRKY family transcription factor; protein id: supported by cDNA: gi_17064157, supported by cDNA: gi_17979527 thaliana] >gi|17064158|gb|AAL35286.1|AF442393_1 WRKY
  misc_feature (100)..(343): Homolog of NCBI NO: 11357984 NR Description: hypothetical protein T12C14.40 - Arabidopsis >gi|7340705|emb|CAB82948.1| putative protein [Arabidopsis
MANLVTSSDHHPLELAGNLSSIFDTSSLPFPYSYFEDHSSNNPNSFLDLLRQDHQFASSSNSSSFSFDAFPLPNNNNNTSFFTDLPLPQAESSEVVNTTPTSPNSTSVSSSSNEAANDNNSGKEVTVKDQEEGDQQQEQKGTKPQLKAKKKNQKKAREARFAFLTKSDIDNLDDGYRWRKYGQKAVKNSPYPRSYYRCTTVGCGVKKRVERSSDDPSIVMTTYEGQHTHPFPMTPRGHIGMLTSPILDHGATTASSSSFSIPQPRYLLTQHHQPYNMYNNNSLSMINRRSSDGTFVNPGPSSSFPGFGYDMSQASTSTSSSIRDHGLLQDILPSQIRSDTINTQTNEENKK

SEQ ID NO: 96315 - DNA, 825 bp, Arabidopsis thaliana
  misc_feature (1)..(825): Ceres Seq. ID no. 12732835
  misc_feature: MA Experiment ID: 20000179 Result: Down-regulated in Transcription
  misc_feature: MA Experiment 20000179 PARAMETER Experiment Name: At_Germinating_Seeds_P Parameter: Age (hr) Value: 6 vs. 0
  misc_feature: MA Experiment 20000179 PARAMETER Experiment Name: At_Germinating_Seeds_P Parameter: Tissue Value: Germinating Seeds
  misc_feature: MA Experiment ID: 20000180 Result: Down-regulated in Transcription
  misc_feature: MA Experiment 20000180 PARAMETER Experiment Name: At_Germinating_Seeds_P Parameter: Age (hr) Value: 24 vs. 0
  misc_feature: MA Experiment 20000180 PARAMETER Experiment Name: At_Germinating_Seeds_P Parameter: Tissue Value: Germinating Seeds
  misc_feature: MA Experiment ID: 20000184 Result: Up-regulated in Transcription
  misc_feature: MA Experiment 20000184 PARAMETER Experiment Name: At_Shoots__P Parameter: Age (day) Value: 7
  misc_feature: MA Experiment 20000184 PARAMETER Experiment Name: At_Shoots__P Parameter: Tissue Value: Shoots vs. Whole Plant
  misc_feature: MA Experiment ID: 20000185 Result: Up-regulated in Transcription
  misc_feature: MA Experiment 20000185 PARAMETER Experiment Name: At_Roots__P Parameter: Age (day) Value: 7 vs. 21
  misc_feature: MA Experiment 20000185 PARAMETER Experiment Name: At_Roots__P Parameter: Organism Value: A. thaliana
  misc_feature: MA Experiment 20000185 PARAMETER Experiment Name: At_Roots__P Parameter: Tissue Value: Roots vs. Whole Plant
  misc_feature: MA Experiment ID: 20000234 Result: Up-regulated in Transcription
  misc_feature: MA Experiment 20000234 PARAMETER Experiment Name: At_Siliques_P Parameter: Age (day) Value: 21
  misc_feature: MA Experiment 20000234 PARAMETER Experiment Name: At_Siliques_P Parameter: Organism Value: A. thaliana
  misc_feature: MA Experiment 20000234 PARAMETER Experiment Name: At_Siliques_P Parameter: Plant Line Value: WS
  misc_feature: MA Experiment 20000234 PARAMETER Experiment Name: At_Siliques_P Parameter: Tissue Value: Less Than 5mm Siliques vs. Whole Plant
  misc_feature: MA Experiment ID: 20000264 Result: Up-regulated in Transcription
  misc_feature: MA Experiment 20000264 PARAMETER Experiment Name: At_Open_Flower_P Parameter: Age (day) Value: 21
  misc_feature: MA Experiment 20000264 PARAMETER Experiment Name: At_Open_Flower_P Parameter: Plant Line Value: WS
  misc_feature: MA Experiment 20000264 PARAMETER Experiment Name: At_Open_Flower_P Parameter: Tissue Value: Open Flower vs. Whole Plant
  misc_feature: MA Experiment ID: 20000286 Result: Up-regulated in Transcription
  misc_feature: MA Experiment 20000286 PARAMETER Experiment Name: At_Open_Flower_P Parameter: Age (day) Value: 21
  misc_feature: MA Experiment 20000286 PARAMETER Experiment Name: At_Open_Flower_P Parameter: Plant Line Value: WS
  misc_feature: MA Experiment 20000286 PARAMETER Experiment Name: At_Open_Flower_P Parameter: Tissue Value: Half Open vs. Whole Plant
  misc_feature: MA Experiment ID: 20000436 Result: Down-regulated in Transcription
  misc_feature: MA Experiment 20000436 PARAMETER Experiment Name: At_Drought_P Parameter: Age (day) Value: 7
  misc_feature: MA Experiment 20000436 PARAMETER Experiment Name: At_Drought_P Parameter: Organism Value: A. thaliana
  misc_feature: MA Experiment 20000436 PARAMETER Experiment Name: At_Drought_P Parameter: Plant Line Value: WS
  misc_feature: MA Experiment 20000436 PARAMETER Experiment Name: At_Drought_P Parameter: Timepoint (hr) Value: 12
  misc_feature: MA Experiment 20000436 PARAMETER Experiment Name: At_Drought_P Parameter: Tissue Value: Whole Plant
  misc_feature: MA Experiment 20000436 PARAMETER Experiment Name: At_Drought_P Parameter: Treatment Value: Drought vs. No Drought
  misc_feature: MA Experiment ID: 20000439 Result: Up-regulated in Transcription
  misc_feature: MA Experiment 20000439 PARAMETER Experiment Name: At_Roots__P Parameter: Age (day) Value: 14 vs. 21
  misc_feature: MA Experiment 20000439 PARAMETER Experiment Name: At_Roots__P Parameter: Organism Value: A. thaliana
  misc_feature: MA Experiment 20000439 PARAMETER Experiment Name: At_Roots__P Parameter: Tissue Value: Roots vs. Whole Plant
  misc_feature: MA Experiment ID: 20000453 Result: Down-regulated in Transcription
  misc_feature: MA Experiment 20000453 PARAMETER Experiment Name: At_100uM_ABA_P Parameter: Age (day) Value: 15
  misc_feature: MA Experiment 20000453 PARAMETER Experiment Name: At_100uM_ABA_P Parameter: Organism Value: A. thaliana
  misc_feature: MA Experiment 20000453 PARAMETER Experiment Name: At_100uM_ABA_P Parameter: Plant Line Value: WS
  misc_feature: MA Experiment 20000453 PARAMETER Experiment Name: At_100uM_ABA_P Parameter: Timepoint (hr) Value: 24
  misc_feature: MA Experiment 20000453 PARAMETER Experiment Name: At_100uM_ABA_P Parameter: Tissue Value: Aerial
  misc_feature: MA Experiment 20000453 PARAMETER Experiment Name: At_100uM_ABA_P Parameter: Treatment Value: 100uM ABA vs. No Treatment
  misc_feature: MA Experiment ID: 20001557 Result: Up-regulated in Transcription
  misc_feature: MA Experiment 20001557 PARAMETER Experiment Name: At_Drought_Soil_Dry_P Parameter: Age (day) Value: 27
  misc_feature: MA Experiment 20001557 PARAMETER Experiment Name: At_Drought_Soil_Dry_P Parameter: Organism Value: A. thaliana
  misc_feature: MA Experiment 20001557 PARAMETER Experiment Name: At_Drought_Soil_Dry_P Parameter: Plant Line Value: WS
  misc_feature: MA Experiment 20001557 PARAMETER Experiment Name: At_Drought_Soil_Dry_P Parameter: Post Timepoint (hr) Value: 3
  misc_feature: MA Experiment 20001557 PARAMETER Experiment Name: At_Drought_Soil_Dry_P Parameter: Post-Treatment Value: Re-Water vs. No Drought
  misc_feature: MA Experiment 20001557 PARAMETER Experiment Name: At_Drought_Soil_Dry_P Parameter: Timepoint (day) Value: 13
  misc_feature: MA Experiment 20001557 PARAMETER Experiment Name: At_Drought_Soil_Dry_P Parameter: Treatment Value: Drought vs. No Drought
  misc_feature: MA Experiment ID: 20001558 Result: Up-regulated in Transcription
  misc_feature: MA Experiment 20001558 PARAMETER Experiment Name: At_Drought_Soil_Dry_P Parameter: Age (day) Value: 27
  misc_feature: MA Experiment 20001558 PARAMETER Experiment Name: At_Drought_Soil_Dry_P Parameter: Organism Value: A. thaliana
  misc_feature: MA Experiment 20001558 PARAMETER Experiment Name: At_Drought_Soil_Dry_P Parameter: Plant Line Value: WS
  misc_feature: MA Experiment 20001558 PARAMETER Experiment Name: At_Drought_Soil_Dry_P Parameter: Post Timepoint (hr) Value: 6
  misc_feature: MA Experiment 20001558 PARAMETER Experiment Name: At_Drought_Soil_Dry_P Parameter: Post-Treatment Value: Re-Water vs. No Drought
  misc_feature: MA Experiment 20001558 PARAMETER Experiment Name: At_Drought_Soil_Dry_P Parameter: Timepoint (day) Value: 13
  misc_feature: MA Experiment 20001558 PARAMETER Experiment Name: At_Drought_Soil_Dry_P Parameter: Treatment Value: Drought vs. No Drought
  misc_feature: MA Experiment ID: 20001757 Result: Up-regulated in Transcription
  misc_feature: MA Experiment 20001757 PARAMETER Experiment Name: At_50mM_NH4NO3_L-to-H_P Parameter: Timepoint (hr) Value: 6
  misc_feature: MA Experiment 20001757 PARAMETER Experiment Name: At_50mM_NH4NO3_L-to-H_P Parameter: Tissue Value: Leaf
  misc_feature: MA Experiment 20001757 PARAMETER Experiment Name: At_50mM_NH4NO3_L-to-H_P Parameter: Treatment Value: 50mM NH4NO3 vs 100mM Mannitol
  misc_feature: MA Experiment ID: 20001911 Result: Down-regulated in Transcription
  misc_feature: MA Experiment 20001911 PARAMETER Experiment Name: At_Drought_Reproduction_P Parameter: Age (day) Value: 40
  misc_feature: MA Experiment 20001911 PARAMETER Experiment Name: At_Drought_Reproduction_P Parameter: Organism Value: A. thaliana
  misc_feature: MA Experiment 20001911 PARAMETER Experiment Name: At_Drought_Reproduction_P Parameter: Plant Line Value: WS
  misc_feature: MA Experiment 20001911 PARAMETER Experiment Name: At_Drought_Reproduction_P Parameter: Timepoint (day) Value: 10
  misc_feature: MA Experiment 20001911 PARAMETER Experiment Name: At_Drought_Reproduction_P Parameter: Tissue Value: Flowers
  misc_feature: MA Experiment 20001911 PARAMETER Experiment Name: At_Drought_Reproduction_P Parameter: Treatment Value: Drought vs. No Drought
atgattactcttcctctgcgagacgacgatgaggaaaacgacacatacgaagctaaaatgctcctcataggcgagaatggtctcgacggtgagagtttacctcctactcctctgcgtgacggtgcactggagctccagaagtataacatcagctccatcgagtcaacagtcgtgattcgtgagctgacgtcacaaggtctctcctttcagctctggccagcggcttctactttcgtcacgttgcttgataactaccgacgtgaccctagcaagagtccactcaccgccacactcttgtcgctgaaaaaaccatcgccgttgaacatactcgagctcggatctggaaccggcctcgtcgggatcgctgcggcaatcactctctctgctaacgtcacggtgacggatctcccacacgtcttagataatctcaacttcaacgccgaagcaaacgctgaaattgttgagagattcggcgggaaagtcaacgtggcaccactacgatggggagaagctgatgacgtggaggttctaggtcagaacgttgacttgattctggcttcggacgtggtgtatcatgaccatctctacgagcctctcctcaaaacgctgcgtttgatgcagctagaggggaagaggttaattttcctgatggcgcatctaaggagatggaagaaagaatctgtcttcttcaaaaaagctcgaaagctcttcgatgttgacgttatccactctgatgttcctcaagaaagttctagaatcggtgttgtggtttaccgtttcaccacgaaacagccaaatcagaatggtcggattgtttcgtgttag

SEQ ID NO: 96316 - protein, 274 aa, Arabidopsis thaliana
  peptide (1)..(274): Ceres Seq. ID no. 12732836
  misc_feature (1)..(274): Homolog of NCBI NO: 15240506 NR Description: putative protein; protein id: At5g49560.1 thaliana] >gi|10177622|dbj|BAB10769.1|
  misc_feature (44)..(268): Homolog of NCBI NO: 15230327 NR Description: putative protein; protein id: At3g50850.1
  misc_feature (44)..(268): Homolog of NCBI NO: 26451147 NR Description: unknown protein [Arabidopsis thaliana]
  misc_feature (33)..(264): Homolog of NCBI NO: 33146776 NR Description: unknown protein [Oryza sativa (japonica
  misc_feature (4)..(221): Homolog of NCBI NO: 38567162 NR Description: conserved hypothetical protein [Neurospora crassa]
  misc_feature (4)..(221): Homolog of NCBI NO: 32422727 NR Description: hypothetical protein [Neurospora crassa]
  misc_feature (46)..(249): Homolog of NCBI NO: 40739926 NR Description: hypothetical protein AN3851.2 [Aspergillus
  misc_feature (57)..(193): Homolog of NCBI NO: 38109737 NR Description: hypothetical protein MG01212.4 [Magnaporthe
  misc_feature (60)..(204): Homolog of NCBI NO: 19075657 NR Description: uv-induced protein uvi22 [Schizosaccharomyces >gi|731086|sp|P40389|RRG1_SCHPO Rapid response to glucose protein
  misc_feature (109)..(263): Homolog of NCBI NO: 32406690 NR Description: predicted protein [Neurospora crassa] predicted protein [Neurospora crassa]
MITLPLRDDDEENDTYEAKMLLIGENGLDGESLPPTPLRDGALELQKYNISSIESTVVIRELTSQGLSFQLWPAASTFVTLLDNYRRDPSKSPLTATLLSLKKPSPLNILELGSGTGLVGIAAAITLSANVTVTDLPHVLDNLNFNAEANAEIVERFGGKVNVAPLRWGEADDVEVLGQNVDLILASDVVYHDHLYEPLLKTLRLMQLEGKRLIFLMAHLRRWKKESVFFKKARKLFDVDVIHSDVPQESSRIGVVVYRFTTKQPNQNGRIVSC

SEQ ID NO: 96317 - protein, 255 aa, Arabidopsis thaliana
  peptide (1)..(255): Ceres Seq. ID no. 12732837
  misc_feature (1)..(255): Homolog of NCBI NO: 15240506 NR Description: putative protein; protein id: At5g49560.1 thaliana] >gi|10177622|dbj|BAB10769.1|
  misc_feature (25)..(249): Homolog of NCBI NO: 15230327 NR Description: putative protein; protein id: At3g50850.1
  misc_feature (25)..(249): Homolog of NCBI NO: 26451147 NR Description: unknown protein [Arabidopsis thaliana]
  misc_feature (14)..(245): Homolog of NCBI NO: 33146776 NR Description: unknown protein [Oryza sativa (japonica
  misc_feature (1)..(202): Homolog of NCBI NO: 38567162 NR Description: conserved hypothetical protein [Neurospora crassa]
  misc_feature (1)..(202): Homolog of NCBI NO: 32422727 NR Description: hypothetical protein [Neurospora crassa]
  misc_feature (27)..(230): Homolog of NCBI NO: 40739926 NR Description: hypothetical protein AN3851.2 [Aspergillus
  misc_feature (38)..(174): Homolog of NCBI NO: 38109737 NR Description: hypothetical protein MG01212.4 [Magnaporthe
  misc_feature (41)..(185): Homolog of NCBI NO: 19075657 NR Description: uv-induced protein uvi22 [Schizosaccharomyces >gi|731086|sp|P40389|RRG1_SCHPO Rapid response to glucose protein
  misc_feature (90)..(244): Homolog of NCBI NO: 32406690 NR Description: predicted protein [Neurospora crassa] predicted protein [Neurospora crassa]
MLLIGENGLDGESLPPTPLRDGALELQKYNISSIESTVVIRELTSQGLSFQLWPAASTFVTLLDNYRRDPSKSPLTATLLSLKKPSPLNILELGSGTGLVGIAAAITLSANVTVTDLPHVLDNLNFNAEANAEIVERFGGKVNVAPLRWGEADDVEVLGQNVDLILASDVVYHDHLYEPLLKTLRLMQLEGKRLIFLMAHLRRWKKESVFFKKARKLFDVDVIHSDVPQESSRIGVVVYRFTTKQPNQNGRIVSC

SEQ ID NO: 96318 - DNA, 2088 bp, Arabidopsis thaliana
  misc_feature (1)..(2088): Ceres Seq. ID no. 12732842
  misc_feature: MA Experiment ID: 20000184 Result: Down-regulated in Transcription
  misc_feature: MA Experiment 20000184 PARAMETER Experiment Name: At_Shoots__P Parameter: Age (day) Value: 7
  misc_feature: MA Experiment 20000184 PARAMETER Experiment Name: At_Shoots__P Parameter: Tissue Value: Shoots vs. Whole Plant
atggcacgaaaaggaagtcatcagaagaatggaatggataaccaaacgaagcaaaaaaagaagactgcttctgattctttgctgtctaataagggacaagggaaaaataatgaggctgagagtgttctgaaagagaattgtcaagatgataagcagactaaaagtagtccagtttgtgaaactttagaaagagatatggatgaggcaaaaggcgctgcttctctcaaggatatagatcagtctgttgcttcggagagcgatttagctggaggtagtagacctcgtaatgaacctggttttacaacagaagaaactagatatattccgtttggtcgtgaacacattgacagtgttatgagaagcttgctggatatattgagcacgaatagcccgtcagagaatattgagttagcatataatgcagtactgaggaaactgaggatatccactgctactgtatcaagggaaatgactaagtgtatggaaagacacaggcctttgatagattctgtcaaattacgagtatataaaggtcgtgatcttgttctaacgaaaatgcggcaagtattcccggttgtcttcaggtggcttatgcactttggcagcataattcttcttctatctctggtttggttggactgtgcaatccggggttttgattcattcattcggatgggaacagcatcttttttctctatcatgtggtgtggtctcttttcagcgttttcgatgttcggcatgaccaaatttatactgatttcggttgcaactgttttggtggcattgttcattggcttcgtagttgggtctgttacgcttgccatttctggtttggttttgctatggctctatggtagcttttggacaacactgctcttcctcttctttggaggtctggcattcatgatgaagcacgagcgcgttgcactgtttataatcacagtgtattcagtctatagtgcattgagttatgttggatggctaggtcttctattggcttttaatcttgctttcatctcaaccgatgctctcatatatttcttcaagaataaaataaatcagcagagcactgctgatagacccactgagcccgtaaatgattcatcttttgaaaatggccctggctttccgggagaccgtggcccaggagtcgcgtcaactagcggaacagactctgagttaacatctgaagatgaaattgctcggttactgaattgtcctgaccactattcagctttgggcttagctcgatatgggaatgttgatatggcttatctcaaacgagaatataggaaaaaggcgatgctagtccatcctgataagaatatggggaatgagagagcagctgaagcttttaagaaacttcagaatgcatatgaggtattacttgattctgtaaagcaaaaatcatatgatgatgaattgaagagggaagaactactgaactactttcggaggtttcagaactcttctcaaaaggacactcggggacacggtttctctgggtcgggttttggaagctcagaaggtgaaggagaggaagcatttagagagtgtagacagatagcgtgtaaaaaatgtggcaatctccatgcctggtttcttacaaagaaatcaaaatctacagctagatggtgccaggattgcaaggaattccatcaagcaaaagatggagatggttgggttgaacaagcttcccagcacgtcttgttcgggctatttcaaaaggttgatatgccgcgtgcttatgtttgtgcagacagcaaaatatatgaagcttctcagtggtatatctgtcagggaatgagatgtcctgcaaacacccacaagccgagcttccatgtgaacatgaacgcgacagctgccaaacgaggaacaagtggttcttcagggcaaaaaggaaaccagagaatgccaaacacaaacccggacgaaacaatgacagaggaagagttctatgagtggttgcagaacgcggttcaatctggtatgtttgataatgcaagagagaacccgtcttcagcaaccgccagtagcactagtagtagtagcagcaagaaaaagaaaaagggaaagaagcaatggtga

SEQ ID NO: 96319 - protein, 695 aa, Arabidopsis thaliana
  peptide (1)..(695): Ceres Seq. ID no. 12732843
  misc_feature (408)..(475): Pfam Name: DnaJ domain Pfam Description: DnaJ domain
  misc_feature (147)..(695): Homolog of NCBI NO: 31249740 NR Description: putative heat shock protein [Oryza sativa
  misc_feature (393)..(688): Homolog of NCBI NO: 7487909 NR Description: hypothetical protein YUP8H12R.35 - Arabidopsis >gi|3152572|gb|AAC17053.1| Contains homology to DNAJ heatshock
  misc_feature (204)..(364): Homolog of NCBI NO: 7487909 NR Description: hypothetical protein YUP8H12R.35 - Arabidopsis >gi|3152572|gb|AAC17053.1| Contains homology to DNAJ heatshock
  misc_feature (393)..(617): Homolog of NCBI NO: 15219309 NR Description: S-locus protein, putative; protein id:
  misc_feature (201)..(302): Homolog of NCBI NO: 15219309 NR Description: S-locus protein, putative; protein id:
  misc_feature (461)..(685): Homolog of NCBI NO: 29371958 NR Description: DNAJ-like protein [Oryza sativa (japonica
  misc_feature (384)..(617): Homolog of NCBI NO: 6069485 NR Description: S-locus protein 5 [Brassica rapa]
  misc_feature (307)..(364): Homolog of NCBI NO: 6069485 NR Description: S-locus protein 5 [Brassica rapa]
  misc_feature (393)..(617): Homolog of NCBI NO: 25518299 NR Description: hypothetical protein F19K19.3 - Arabidopsis >gi|9989051|gb|AAG10814.1|AC011808_2 Similar to DNAJ proteins
  misc_feature (315)..(370): Homolog of NCBI NO: 25518299 NR Description: hypothetical protein F19K19.3 - Arabidopsis >gi|9989051|gb|AAG10814.1|AC011808_2 Similar to DNAJ proteins
MARKGSHQKNGMDNQTKQKKKTASDSLLSNKGQGKNNEAESVLKENCQDDKQTKSSPVCETLERDMDEAKGAASLKDIDQSVASESDLAGGSRPRNEPGFTTEETRYIPFGREHIDSVMRSLLDILSTNSPSENIELAYNAVLRKLRISTATVSREMTKCMERHRPLIDSVKLRVYKGRDLVLTKMRQVFPVVFRWLMHFGSIILLLSLVWLDCAIRGFDSFIRMGTASFFSIMWCGLFSAFSMFGMTKFILISVATVLVALFIGFVVGSVTLAISGLVLLWLYGSFWTTLLFLFFGGLAFMMKHERVALFIITVYSVYSALSYVGWLGLLLAFNLAFISTDALIYFFKNKINQQSTADRPTEPVNDSSFENGPGFPGDRGPGVASTSGTDSELTSEDEIARLLNCPDHYSALGLARYGNVDMAYLKREYRKKAMLVHPDKNMGNERAAEAFKKLQNAYEVLLDSVKQKSYDDELKREELLNYFRRFQNSSQKDTRGHGFSGSGFGSSEGEGEEAFRECRQIACKKCGNLHAWFLTKKSKSTARWCQDCKEFHQAKDGDGWVEQASQHVLFGLFQKVDMPRAYVCADSKIYEASQWYICQGMRCPANTHKPSFHVNMNATAAKRGTSGSSGQKGNQRMPNTNPDETMTEEEFYEWLQNAVQSGMFDNARENPSSATASSTSSSSSKKKKKGKKQW

SEQ ID NO: 96320 - protein, 684 aa, Arabidopsis thaliana
  peptide (1)..(684): Ceres Seq. ID no. 12732844
  misc_feature (397)..(464): Pfam Name: DnaJ domain Pfam Description: DnaJ domain
  misc_feature (136)..(684): Homolog of NCBI NO: 31249740 NR Description: putative heat shock protein [Oryza sativa
  misc_feature (382)..(677): Homolog of NCBI NO: 7487909 NR Description: hypothetical protein YUP8H12R.35 - Arabidopsis >gi|3152572|gb|AAC17053.1| Contains homology to DNAJ heatshock
  misc_feature (193)..(353): Homolog of NCBI NO: 7487909 NR Description: hypothetical protein YUP8H12R.35 - Arabidopsis >gi|3152572|gb|AAC17053.1| Contains homology to DNAJ heatshock
  misc_feature (382)..(606): Homolog of NCBI NO: 15219309 NR Description: S-locus protein, putative; protein id:
  misc_feature (190)..(291): Homolog of NCBI NO: 15219309 NR Description: S-locus protein, putative; protein id:
  misc_feature (450)..(674): Homolog of NCBI NO: 29371958 NR Description: DNAJ-like protein [Oryza sativa (japonica
  misc_feature (373)..(606): Homolog of NCBI NO: 6069485 NR Description: S-locus protein 5 [Brassica rapa]
  misc_feature (296)..(353): Homolog of NCBI NO: 6069485 NR Description: S-locus protein 5 [Brassica rapa]
  misc_feature (382)..(606): Homolog of NCBI NO: 25518299 NR Description: hypothetical protein F19K19.3 - Arabidopsis >gi|9989051|gb|AAG10814.1|AC011808_2 Similar to DNAJ proteins
  misc_feature (304)..(359): Homolog of NCBI NO: 25518299 NR Description: hypothetical protein F19K19.3 - Arabidopsis >gi|9989051|gb|AAG10814.1|AC011808_2 Similar to DNAJ proteins
MDNQTKQKKKTASDSLLSNKGQGKNNEAESVLKENCQDDKQTKSSPVCETLERDMDEAKGAASLKDIDQSVASESDLAGGSRPRNEPGFTTEETRYIPFGREHIDSVMRSLLDILSTNSPSENIELAYNAVLRKLRISTATVSREMTKCMERHRPLIDSVKLRVYKGRDLVLTKMRQVFPVVFRWLMHFGSIILLLSLVWLDCAIRGFDSFIRMGTASFFSIMWCGLFSAFSMFGMTKFILISVATVLVALFIGFVVGSVTLAISGLVLLWLYGSFWTTLLFLFFGGLAFMMKHERVALFIITVYSVYSALSYVGWLGLLLAFNLAFISTDALIYFFKNKINQQSTADRPTEPVNDSSFENGPGFPGDRGPGVASTSGTDSELTSEDEIARLLNCPDHYSALGLARYGNVDMAYLKREYRKKAMLVHPDKNMGNERAAEAFKKLQNAYEVLLDSVKQKSYDDELKREELLNYFRRFQNSSQKDTRGHGFSGSGFGSSEGEGEEAFRECRQIACKKCGNLHAWFLTKKSKSTARWCQDCKEFHQAKDGDGWVEQASQHVLFGLFQKVDMPRAYVCADSKIYEASQWYICQGMRCPANTHKPSFHVNMNATAAKRGTSGSSGQKGNQRMPNTNPDETMTEEEFYEWLQNAVQSGMFDNARENPSSATASSTSSSSSKKKKKGKKQW

SEQ ID NO: 96321 - protein, 630 aa, Arabidopsis thaliana
  peptide (1)..(630): Ceres Seq. ID no. 12732845
  misc_feature (343)..(410): Pfam Name: DnaJ domain Pfam Description: DnaJ domain
  misc_feature (82)..(630): Homolog of NCBI NO: 31249740 NR Description: putative heat shock protein [Oryza sativa
  misc_feature (328)..(623): Homolog of NCBI NO: 7487909 NR Description: hypothetical protein YUP8H12R.35 - Arabidopsis >gi|3152572|gb|AAC17053.1| Contains homology to DNAJ heatshock
  misc_feature (139)..(299): Homolog of NCBI NO: 7487909 NR Description: hypothetical protein YUP8H12R.35 - Arabidopsis >gi|3152572|gb|AAC17053.1| Contains homology to DNAJ heatshock
  misc_feature (328)..(552): Homolog of NCBI NO: 15219309 NR Description: S-locus protein, putative; protein id:
  misc_feature (136)..(237): Homolog of NCBI NO: 15219309 NR Description: S-locus protein, putative; protein id:
  misc_feature (396)..(620): Homolog of NCBI NO: 29371958 NR Description: DNAJ-like protein [Oryza sativa (japonica
  misc_feature (319)..(552): Homolog of NCBI NO: 6069485 NR Description: S-locus protein 5 [Brassica rapa]
  misc_feature (242)..(299): Homolog of NCBI NO: 6069485 NR Description: S-locus protein 5 [Brassica rapa]
  misc_feature (328)..(552): Homolog of NCBI NO: 25518299 NR Description: hypothetical protein F19K19.3 - Arabidopsis >gi|9989051|gb|AAG10814.1|AC011808_2 Similar to DNAJ proteins
  misc_feature (250)..(305): Homolog of NCBI NO: 25518299 NR Description: hypothetical protein F19K19.3 - Arabidopsis >gi|9989051|gb|AAG10814.1|AC011808_2 Similar to DNAJ proteins
MDEAKGAASLKDIDQSVASESDLAGGSRPRNEPGFTTEETRYIPFGREHIDSVMRSLLDILSTNSPSENIELAYNAVLRKLRISTATVSREMTKCMERHRPLIDSVKLRVYKGRDLVLTKMRQVFPVVFRWLMHFGSIILLLSLVWLDCAIRGFDSFIRMGTASFFSIMWCGLFSAFSMFGMTKFILISVATVLVALFIGFVVGSVTLAISGLVLLWLYGSFWTTLLFLFFGGLAFMMKHERVALFIITVYSVYSALSYVGWLGLLLAFNLAFISTDALIYFFKNKINQQSTADRPTEPVNDSSFENGPGFPGDRGPGVASTSGTDSELTSEDEIARLLNCPDHYSALGLARYGNVDMAYLKREYRKKAMLVHPDKNMGNERAAEAFKKLQNAYEVLLDSVKQKSYDDELKREELLNYFRRFQNSSQKDTRGHGFSGSGFGSSEGEGEEAFRECRQIACKKCGNLHAWFLTKKSKSTARWCQDCKEFHQAKDGDGWVEQASQHVLFGLFQKVDMPRAYVCADSKIYEASQWYICQGMRCPANTHKPSFHVNMNATAAKRGTSGSSGQKGNQRMPNTNPDETMTEEEFYEWLQNAVQSGMFDNARENPSSATASSTSSSSSKKKKKGKKQW

SEQ ID NO: 96322 - DNA, 1021 bp, Arabidopsis thaliana
  misc_feature (1)..(1021): Ceres Seq. ID no. 12732849
  misc_feature: MA Experiment ID: 20001757 Result: Down-regulated in Transcription
  misc_feature: MA Experiment 20001757 PARAMETER Experiment Name: At_50mM_NH4NO3_L-to-H_P Parameter: Timepoint (hr) Value: 6
  misc_feature: MA Experiment 20001757 PARAMETER Experiment Name: At_50mM_NH4NO3_L-to-H_P Parameter: Tissue Value: Leaf
  misc_feature: MA Experiment 20001757 PARAMETER Experiment Name: At_50mM_NH4NO3_L-to-H_P Parameter: Treatment Value: 50mM NH4NO3 vs 100mM Mannitol
atgggtgacaaaggaaggagcttaaagatcaacaagaacatggaggaattcacgaaagtggaagaagaaatggacgtaaggagaggtccatggacagttgaggaagatttagagctcatcaattacattgctagtcatggtgaaggtcgatggaactctctcgctcgttgcgccgaactcaaaaggaccggaaaaagctgcagacttcggtggctgaactatctccgaccagatgtgcgccgtggaaacataaccctcgaagaacaactcttgattcttgaacttcacacacgttggggcaatagatggtctaagattgcacaatatttaccaggaagaacggataacgagatcaaaaactattggagaacacgtgttcaaaagcatgcaaaacagcttaaatgcgacgtgaacagtcaacaatttaaagacaccatgaagtatctttggatgcctcggctcgtagaaaggatccaagccgcgtccatcgggtctgtttccatgtcatcttgcgtcaccacctcctcagatcagttcgtgatcaacaacaacaacaccaacaacgtggataatttggctttaatgagtaaccctaatggttacatcacgccggataattccagcgtggcagtatctcctgtatcagatttgacggagtgtcaagtgagtagtgaagtgtggaagattggtcaggatgagaatttggtggatccaaaaatgacatcgccgaattatatggataatagcagtggactattaaacggagattttacgaagatgcaagatcaaagtgaccttaattggtttgaaaatattaatgggatggtaccaaattattcggacagtttttggaacattggaaatgatgaagacttctggctcttacaacaacatcaacaagtccacgacaatggaagcttctgaatagacaagaagctattttacaaagtaaagggaaaatacaaagcttctgaatttaaaagtgtgaaaggaatttgttataaacaaagctttttatttg

SEQ ID NO: 96323 - protein, 307 aa, Arabidopsis thaliana
  peptide (1)..(307): Ceres Seq. ID no. 12732850
  misc_feature (28)..(75): Pfam Name: Myb-like DNA-binding domain Pfam Description: Myb-like DNA-binding domain
  misc_feature (1)..(307): Homolog of NCBI NO: 15240518 NR Description: myb family transcription factor; protein id:
  misc_feature (90)..(307): Homolog of NCBI NO: 11358561 NR Description: myb-related transcription factor MYB78 [imported] Arabidopsis thaliana (fragment) >gi|3941510|gb|AAC83631.1|
  misc_feature (1)..(219): Homolog of NCBI NO: 15230731 NR Description: myb family transcription factor (MYB108); protein At3g06490.1 [Arabidopsis thaliana] putative transcription factor MYB108 [Arabidopsis thaliana]
  misc_feature (8)..(307): Homolog of NCBI NO: 7446185 NR Description: dehydration-induced myb-related protein Cpm7 - plantagineum >gi|1002800|gb|AAB58314.1| Cpm7 [Craterostigma
  misc_feature (6)..(307): Homolog of NCBI NO: 7446184 NR Description: myb-related protein Cpm5 - Craterostigma
  misc_feature (6)..(307): Homolog of NCBI NO: 7446183 NR Description: ABA-induced myb-related protein Cpm10 -
  misc_feature (14)..(303): Homolog of NCBI NO: 14249015 NR Description: myb-like transcription factor Myb 5 [Gossypium
  misc_feature (25)..(296): Homolog of NCBI NO: 13177578 NR Description: Myb transcription factor JAMyb [Oryza sativa]
  misc_feature (14)..(303): Homolog of NCBI NO: 14249019 NR Description: recombinant myb-like transcription factor Myb 5
  misc_feature (14)..(297): Homolog of NCBI NO: 23476301 NR Description: myb-like transcription factor 5 [Gossypium
MGDKGRSLKINKNMEEFTKVEEEMDVRRGPWTVEEDLELINYIASHGEGRWNSLARCAELKRTGKSCRLRWLNYLRPDVRRGNITLEEQLLILELHTRWGNRWSKIAQYLPGRTDNEIKNYWRTRVQKHAKQLKCDVNSQQFKDTMKYLWMPRLVERIQAASIGSVSMSSCVTTSSDQFVINNNNTNNVDNLALMSNPNGYITPDNSSVAVSPVSDLTECQVSSEVWKIGQDENLVDPKMTSPNYMDNSSGLLNGDFTKMQDQSDLNWFENINGMVPNYSDSFWNIGNDEDFWLLQQHQQVHDNGSF

SEQ ID NO: 96324 - protein, 294 aa, Arabidopsis thaliana
  peptide (1)..(294): Ceres Seq. ID no. 12732851
  misc_feature (15)..(62): Pfam Name: Myb-like DNA-binding domain Pfam Description: Myb-like DNA-binding domain
  misc_feature (1)..(294): Homolog of NCBI NO: 15240518 NR Description: myb family transcription factor; protein id:
  misc_feature (77)..(294): Homolog of NCBI NO: 11358561 NR Description: myb-related transcription factor MYB78 [imported] Arabidopsis thaliana (fragment) >gi|3941510|gb|AAC83631.1|
  misc_feature (1)..(206): Homolog of NCBI NO: 15230731 NR Description: myb family transcription factor (MYB108); protein At3g06490.1 [Arabidopsis thaliana] putative transcription factor MYB108 [Arabidopsis thaliana]
  misc_feature (1)..(294): Homolog of NCBI NO: 7446185 NR Description: dehydration-induced myb-related protein Cpm7 - plantagineum >gi|1002800|gb|AAB58314.1| Cpm7 [Craterostigma
  misc_feature (1)..(294): Homolog of NCBI NO: 7446184 NR Description: myb-related protein Cpm5 - Craterostigma
  misc_feature (1)..(294): Homolog of NCBI NO: 7446183 NR Description: ABA-induced myb-related protein Cpm10 -
  misc_feature (1)..(290): Homolog of NCBI NO: 14249015 NR Description: myb-like transcription factor Myb 5 [Gossypium
  misc_feature (12)..(283): Homolog of NCBI NO: 13177578 NR Description: Myb transcription factor JAMyb [Oryza sativa]
  misc_feature (1)..(290): Homolog of NCBI NO: 14249019 NR Description: recombinant myb-like transcription factor Myb 5
  misc_feature (1)..(284): Homolog of NCBI NO: 23476301 NR Description: myb-like transcription factor 5 [Gossypium
MEEFTKVEEEMDVRRGPWTVEEDLELINYIASHGEGRWNSLARCAELKRTGKSCRLRWLNYLRPDVRRGNITLEEQLLILELHTRWGNRWSKIAQYLPGRTDNEIKNYWRTRVQKHAKQLKCDVNSQQFKDTMKYLWMPRLVERIQAASIGSVSMSSCVTTSSDQFVINNNNTNNVDNLALMSNPNGYITPDNSSVAVSPVSDLTECQVSSEVWKIGQDENLVDPKMTSPNYMDNSSGLLNGDFTKMQDQSDLNWFENINGMVPNYSDSFWNIGNDEDFWLLQQHQQVHDNGSF

SEQ ID NO: 96325 - protein, 284 aa, Arabidopsis thaliana
  peptide (1)..(284): Ceres Seq. ID no. 12732852
  misc_feature (5)..(52): Pfam Name: Myb-like DNA-binding domain Pfam Description: Myb-like DNA-binding domain
  misc_feature (1)..(284): Homolog of NCBI NO: 15240518 NR Description: myb family transcription factor; protein id:
  misc_feature (67)..(284): Homolog of NCBI NO: 11358561 NR Description: myb-related transcription factor MYB78 [imported] Arabidopsis thaliana (fragment) >gi|3941510|gb|AAC83631.1|
  misc_feature (1)..(196): Homolog of NCBI NO: 15230731 NR Description: myb family transcription factor (MYB108); protein At3g06490.1 [Arabidopsis thaliana] putative transcription factor MYB108 [Arabidopsis thaliana]
  misc_feature (1)..(284): Homolog of NCBI NO: 7446185 NR Description: dehydration-induced myb-related protein Cpm7 - plantagineum >gi|1002800|gb|AAB58314.1| Cpm7 [Craterostigma
  misc_feature (1)..(284): Homolog of NCBI NO: 7446184 NR Description: myb-related protein Cpm5 - Craterostigma
  misc_feature (1)..(284): Homolog of NCBI NO: 7446183 NR Description: ABA-induced myb-related protein Cpm10 -
  misc_feature (1)..(280): Homolog of NCBI NO: 14249015 NR Description: myb-like transcription factor Myb 5 [Gossypium
  misc_feature (2)..(273): Homolog of NCBI NO: 13177578 NR Description: Myb transcription factor JAMyb [Oryza sativa]
  misc_feature (1)..(280): Homolog of NCBI NO: 14249019 NR Description: recombinant myb-like transcription factor Myb 5
  misc_feature (1)..(274): Homolog of NCBI NO: 23476301 NR Description: myb-like transcription factor 5 [Gossypium
MDVRRGPWTVEEDLELINYIASHGEGRWNSLARCAELKRTGKSCRLRWLNYLRPDVRRGNITLEEQLLILELHTRWGNRWSKIAQYLPGRTDNEIKNYWRTRVQKHAKQLKCDVNSQQFKDTMKYLWMPRLVERIQAASIGSVSMSSCVTTSSDQFVINNNNTNNVDNLALMSNPNGYITPDNSSVAVSPVSDLTECQVSSEVWKIGQDENLVDPKMTSPNYMDNSSGLLNGDFTKMQDQSDLNWFENINGMVPNYSDSFWNIGNDEDFWLLQQHQQVHDNGSF

SEQ ID NO: 96326 - DNA, 1660 bp, Arabidopsis thaliana
  misc_feature (1)..(1660): Ceres Seq. ID no. 12732853
  misc_feature: MA Experiment ID: 20000169 Result: Down-regulated in Transcription
  misc_feature: MA Experiment 20000169 PARAMETER Experiment Name: At_100uM_ABA_P Parameter: Age (day) Value: 14
  misc_feature: MA Experiment 20000169 PARAMETER Experiment Name: At_100uM_ABA_P Parameter: Organism Value: A. thaliana
  misc_feature: MA Experiment 20000169 PARAMETER Experiment Name: At_100uM_ABA_P Parameter: Plant Line Value: WS
  misc_feature: MA Experiment 20000169 PARAMETER Experiment Name: At_100uM_ABA_P Parameter: Timepoint (hr) Value: 6
  misc_feature: MA Experiment 20000169 PARAMETER Experiment Name: At_100uM_ABA_P Parameter: Tissue Value: Aerial
  misc_feature: MA Experiment 20000169 PARAMETER Experiment Name: At_100uM_ABA_P Parameter: Treatment Value: 100uM ABA vs. No Treatment
  misc_feature: MA Experiment ID: 20000173 Result: Down-regulated in Transcription
  misc_feature: MA Experiment 20000173 PARAMETER Experiment Name: At_42deg_Heat_P Parameter: Age (day) Value: 14
  misc_feature: MA Experiment 20000173 PARAMETER Experiment Name: At_42deg_Heat_P Parameter: Organism Value: A. thaliana
  misc_feature: MA Experiment 20000173 PARAMETER Experiment Name: At_42deg_Heat_P Parameter: Plant Line Value: WS
  misc_feature: MA Experiment 20000173 PARAMETER Experiment Name: At_42deg_Heat_P Parameter: Temperature (deg C) Value: 42 vs. 22
  misc_feature: MA Experiment 20000173 PARAMETER Experiment Name: At_42deg_Heat_P Parameter: Timepoint (hr) Value: 6
  misc_feature: MA Experiment 20000173 PARAMETER Experiment Name: At_42deg_Heat_P Parameter: Tissue Value: Aerial
  misc_feature: MA Experiment ID: 20000185 Result: Down-regulated in Transcription
  misc_feature: MA Experiment 20000185 PARAMETER Experiment Name: At_Roots__P Parameter: Age (day) Value: 7 vs. 21
  misc_feature: MA Experiment 20000185 PARAMETER Experiment Name: At_Roots__P Parameter: Organism Value: A. thaliana
  misc_feature: MA Experiment 20000185 PARAMETER Experiment Name: At_Roots__P Parameter: Tissue Value: Roots vs. Whole Plant
  misc_feature: MA Experiment ID: 20000286 Result: Up-regulated in Transcription
  misc_feature: MA Experiment 20000286 PARAMETER Experiment Name: At_Open_Flower_P Parameter: Age (day) Value: 21
  misc_feature: MA Experiment 20000286 PARAMETER Experiment Name: At_Open_Flower_P Parameter: Plant Line Value: WS
  misc_feature: MA Experiment 20000286 PARAMETER Experiment Name: At_Open_Flower_P Parameter: Tissue Value: Half Open vs. Whole Plant
  misc_feature: MA Experiment ID: 20000445 Result: Up-regulated in Transcription
  misc_feature: MA Experiment 20000445 PARAMETER Experiment Name: At_100uM_NAA__P Parameter: Age (day) Value: 14
  misc_feature: MA Experiment 20000445 PARAMETER Experiment Name: At_100uM_NAA__P Parameter: Organism Value: A. thaliana
  misc_feature: MA Experiment 20000445 PARAMETER Experiment Name: At_100uM_NAA__P Parameter: Plant Line Value: WS
  misc_feature: MA Experiment 20000445 PARAMETER Experiment Name: At_100uM_NAA__P Parameter: Timepoint (hr) Value: 6
  misc_feature: MA Experiment 20000445 PARAMETER Experiment Name: At_100uM_NAA__P Parameter: Tissue Value: Aerial
  misc_feature: MA Experiment 20000445 PARAMETER Experiment Name: At_100uM_NAA__P Parameter: Treatment Value: 100uM NAA vs. No Treatment
  misc_feature: MA Experiment ID: 20000451 Result: Up-regulated in Transcription
  misc_feature: MA Experiment 20000451 PARAMETER Experiment Name: At_CS6879_Shoots-Roots_P Parameter: Age (day) Value: 14
  misc_feature: MA Experiment 20000451 PARAMETER Experiment Name: At_CS6879_Shoots-Roots_P Parameter: Organism Value: A. thaliana
  misc_feature: MA Experiment 20000451 PARAMETER Experiment Name: At_CS6879_Shoots-Roots_P Parameter: Plant Line Value: CS6879 vs. WS
  misc_feature: MA Experiment 20000451 PARAMETER Experiment Name: At_CS6879_Shoots-Roots_P Parameter: Tissue Value: Roots
  misc_feature: MA Experiment ID: 20000453 Result: Down-regulated in Transcription
  misc_feature: MA Experiment 20000453 PARAMETER Experiment Name: At_100uM_ABA_P Parameter: Age (day) Value: 15
  misc_feature: MA Experiment 20000453 PARAMETER Experiment Name: At_100uM_ABA_P Parameter: Organism Value: A. thaliana
  misc_feature: MA Experiment 20000453 PARAMETER Experiment Name: At_100uM_ABA_P Parameter: Plant Line Value: WS
  misc_feature: MA Experiment 20000453 PARAMETER Experiment Name: At_100uM_ABA_P Parameter: Timepoint (hr) Value: 24
  misc_feature: MA Experiment 20000453 PARAMETER Experiment Name: At_100uM_ABA_P Parameter: Tissue Value: Aerial
  misc_feature: MA Experiment 20000453 PARAMETER Experiment Name: At_100uM_ABA_P Parameter: Treatment Value: 100uM ABA vs. No Treatment
  misc_feature: MA Experiment ID: 20000495 Result: Up-regulated in Transcription
  misc_feature: MA Experiment 20000495 PARAMETER Experiment Name: At_Guard_Cells_P Parameter: Harvest Date Value: 8/2/2002
  misc_feature: MA Experiment 20000495 PARAMETER Experiment Name: At_Guard_Cells_P Parameter: Organism Value: A. thaliana
  misc_feature: MA Experiment 20000495 PARAMETER Experiment Name: At_Guard_Cells_P Parameter: Tissue Value: Guard Cells vs. Leaves
  misc_feature: MA Experiment ID: 20000527 Result: Down-regulated in Transcription
  misc_feature: MA Experiment 20000527 PARAMETER Experiment Name: At_10percent_PEG_P Parameter: Age (day) Value: 20
  misc_feature: MA Experiment 20000527 PARAMETER Experiment Name: At_10percent_PEG_P Parameter: Organism Value: A. thaliana
  misc_feature: MA Experiment 20000527 PARAMETER Experiment Name: At_10percent_PEG_P Parameter: Plant Line Value: WS
  misc_feature: MA Experiment 20000527 PARAMETER Experiment Name: At_10percent_PEG_P Parameter: Timepoint (day) Value: 20
  misc_feature: MA Experiment 20000527 PARAMETER Experiment Name: At_10percent_PEG_P Parameter: Tissue Value: Whole Plant
  misc_feature: MA Experiment 20000527 PARAMETER Experiment Name: At_10percent_PEG_P Parameter: Treatment Value: 10percent PEG vs. No Treatment
  misc_feature: MA Experiment ID: 20000573 Result: Down-regulated in Transcription
  misc_feature: MA Experiment 20000573 PARAMETER Experiment Name: At_100uM_ABA_Mutants__P Parameter: Organism Value: A. thaliana
  misc_feature: MA Experiment 20000573 PARAMETER Experiment Name: At_100uM_ABA_Mutants__P Parameter: Plant Line Value: CS22 vs. Ler wt
  misc_feature: MA Experiment 20000573 PARAMETER Experiment Name: At_100uM_ABA_Mutants__P Parameter: Timepoint (hr) Value: N/A
  misc_feature: MA Experiment 20000573 PARAMETER Experiment Name: At_100uM_ABA_Mutants__P Parameter: Tissue Value: Whole Plant
  misc_feature: MA Experiment 20000573 PARAMETER Experiment Name: At_100uM_ABA_Mutants__P Parameter: Treatment Value: None
  misc_feature: MA Experiment ID: 20001451 Result: Down-regulated in Transcription
  misc_feature: MA Experiment 20001451 PARAMETER Experiment Name: At_Far-red-induction_P Parameter: Age (day) Value: 7
  misc_feature: MA Experiment 20001451 PARAMETER Experiment Name: At_Far-red-induction_P Parameter: Light Value: Far-red vs. White
  misc_feature: MA Experiment 20001451 PARAMETER Experiment Name: At_Far-red-induction_P Parameter: Organism Value: A. thaliana
  misc_feature: MA Experiment 20001451 PARAMETER Experiment Name: At_Far-red-induction_P Parameter: Plant Line Value: Columbia
  misc_feature: MA Experiment 20001451 PARAMETER Experiment Name: At_Far-red-induction_P Parameter: Timepoint (hr) Value: 24
  misc_feature: MA Experiment 20001451 PARAMETER Experiment Name: At_Far-red-induction_P Parameter: Tissue Value: Whole Plant
  misc_feature: MA Experiment ID: 20001555 Result: Down-regulated in Transcription
  misc_feature: MA Experiment 20001555 PARAMETER Experiment Name: At_Drought_Soil_Dry_P Parameter: Age (day) Value: 24
  misc_feature: MA Experiment 20001555 PARAMETER Experiment Name: At_Drought_Soil_Dry_P Parameter: Organism Value: A. thaliana
  misc_feature: MA Experiment 20001555 PARAMETER Experiment Name: At_Drought_Soil_Dry_P Parameter: Plant Line Value: WS
  misc_feature: MA Experiment 20001555 PARAMETER Experiment Name: At_Drought_Soil_Dry_P Parameter: Post Timepoint (hr) Value: None
  misc_feature: MA Experiment 20001555 PARAMETER Experiment Name: At_Drought_Soil_Dry_P Parameter: Post-Treatment Value: None
  misc_feature: MA Experiment 20001555 PARAMETER Experiment Name: At_Drought_Soil_Dry_P Parameter: Timepoint (day) Value: 10
  misc_feature: MA Experiment 20001555 PARAMETER Experiment Name: At_Drought_Soil_Dry_P Parameter: Treatment Value: Drought vs. No Drought
  misc_feature: MA Experiment ID: 20001556 Result: Down-regulated in Transcription
  misc_feature: MA Experiment 20001556 PARAMETER Experiment Name: At_Drought_Soil_Dry_P Parameter: Age (day) Value: 26
  misc_feature: MA Experiment 20001556 PARAMETER Experiment Name: At_Drought_Soil_Dry_P Parameter: Organism Value: A. thaliana
  misc_feature: MA Experiment 20001556 PARAMETER Experiment Name: At_Drought_Soil_Dry_P Parameter: Plant Line Value: WS
  misc_feature: MA Experiment 20001556 PARAMETER Experiment Name: At_Drought_Soil_Dry_P Parameter: Post Timepoint (hr) Value: None
  misc_feature: MA Experiment 20001556 PARAMETER Experiment Name: At_Drought_Soil_Dry_P Parameter: Post-Treatment Value: None
  misc_feature: MA Experiment 20001556 PARAMETER Experiment Name: At_Drought_Soil_Dry_P Parameter: Timepoint (day) Value: 12
  misc_feature: MA Experiment 20001556 PARAMETER Experiment Name: At_Drought_Soil_Dry_P Parameter: Treatment Value: Drought vs. No Drought
  misc_feature: MA Experiment ID: 20001559 Result: Down-regulated in Transcription
  misc_feature: MA Experiment 20001559 PARAMETER Experiment Name: At_Drought_Soil_Dry_P Parameter: Age (day) Value: 28
  misc_feature: MA Experiment 20001559 PARAMETER Experiment Name: At_Drought_Soil_Dry_P Parameter: Organism Value: A. thaliana
  misc_feature: MA Experiment 20001559 PARAMETER Experiment Name: At_Drought_Soil_Dry_P Parameter: Plant Line Value: WS
  misc_feature: MA Experiment 20001559 PARAMETER Experiment Name: At_Drought_Soil_Dry_P Parameter: Post Timepoint (hr) Value: 29
  misc_feature: MA Experiment 20001559 PARAMETER Experiment Name: At_Drought_Soil_Dry_P Parameter: Post-Treatment Value: Re-Water vs. No Drought
  misc_feature: MA Experiment 20001559 PARAMETER Experiment Name: At_Drought_Soil_Dry_P Parameter: Timepoint (day) Value: 14
  misc_feature: MA Experiment 20001559 PARAMETER Experiment Name: At_Drought_Soil_Dry_P Parameter: Treatment Value: Drought vs. No Drought
  misc_feature: MA Experiment ID: 20001560 Result: Down-regulated in Transcription
  misc_feature: MA Experiment 20001560 PARAMETER Experiment Name: At_Drought_Soil_Dry_P Parameter: Age (day) Value: 28
  misc_feature: MA Experiment 20001560 PARAMETER Experiment Name: At_Drought_Soil_Dry_P Parameter: Organism Value: A. thaliana
  misc_feature: MA Experiment 20001560 PARAMETER Experiment Name: At_Drought_Soil_Dry_P Parameter: Plant Line Value: WS
  misc_feature: MA Experiment 20001560 PARAMETER Experiment Name: At_Drought_Soil_Dry_P Parameter: Post Timepoint (hr) Value: None
  misc_feature: MA Experiment 20001560 PARAMETER Experiment Name: At_Drought_Soil_Dry_P Parameter: Post-Treatment Value: None
  misc_feature: MA Experiment 20001560 PARAMETER Experiment Name: At_Drought_Soil_Dry_P Parameter: Timepoint (day) Value: 14
  misc_feature: MA Experiment 20001560 PARAMETER Experiment Name: At_Drought_Soil_Dry_P Parameter: Treatment Value: Drought vs. No Drought
  misc_feature: MA Experiment ID: 20001904 Result: Down-regulated in Transcription
  misc_feature: MA Experiment 20001904 PARAMETER Experiment Name: At_Drought_Reproduction_P Parameter: Age (day) Value: 37
  misc_feature: MA Experiment 20001904 PARAMETER Experiment Name: At_Drought_Reproduction_P Parameter: Organism Value: A. thaliana
  misc_feature: MA Experiment 20001904 PARAMETER Experiment Name: At_Drought_Reproduction_P Parameter: Plant Line Value: WS
  misc_feature: MA Experiment 20001904 PARAMETER Experiment Name: At_Drought_Reproduction_P Parameter: Timepoint (day) Value: 7
  misc_feature: MA Experiment 20001904 PARAMETER Experiment Name: At_Drought_Reproduction_P Parameter: Tissue Value: Rosettes
  misc_feature: MA Experiment 20001904 PARAMETER Experiment Name: At_Drought_Reproduction_P Parameter: Treatment Value: Drought vs. No Drought
  misc_feature: MA Experiment ID: 20001906 Result: Down-regulated in Transcription
  misc_feature: MA Experiment 20001906 PARAMETER Experiment Name: At_Drought_Reproduction_P Parameter: Age (day) Value: 35
  misc_feature: MA Experiment 20001906 PARAMETER Experiment Name: At_Drought_Reproduction_P Parameter: Organism Value: A. thaliana
  misc_feature: MA Experiment 20001906 PARAMETER Experiment Name: At_Drought_Reproduction_P Parameter: Plant Line Value: WS
  misc_feature: MA Experiment 20001906 PARAMETER Experiment Name: At_Drought_Reproduction_P Parameter: Timepoint (day) Value: 5
  misc_feature: MA Experiment 20001906 PARAMETER Experiment Name: At_Drought_Reproduction_P Parameter: Tissue Value: Siliques
  misc_feature: MA Experiment 20001906 PARAMETER Experiment Name: At_Drought_Reproduction_P Parameter: Treatment Value: Drought vs. No Drought
tcttcttcttattttatcatagctaagctcaaaaacaatcgatagatggagaagaagaagagcatgttcgttgaacagagcttcccggagcatgaaattggcgatactaacaaaaactttgacgaggatggccgcgacaaaagaactgggacatggatgaccgggagtgcacacataataacggccgtgatagggtcgggagtgttgtctttggcgtgggcaatcgcacaacttggatgggtggcaggacccgccgtactaatggctttttctttcataacatattttacatcaaccatgcttgccgattgttaccgttcccctgaccctgttaccggcaaacgcaactacacctacatggaagttgtccgatcctatctaggaggaagaaaagtgcaattatgtggattggctcaatacgggaatctgattggaataacaatcggctacacaatcacagcttcaattagcatggtggcagtgaagaggtcgaattgtttccacaaaaatgggcataatgttaaatgtgccacttcaaacactcccttcatgatcatatttgcaatcatccaaattattcttagccaaatcccaaatttccataacctctcttggctctccattcttgcggccgtaatgtccttttgttatgcctccatcggtgttggtctctccatcgccaaagcggcgggtggcggtgagcacgtaagaacaacactgacaggagttacggtcgggattgatgtatcgggtgccgagaaaatatggagaacgttccaagcgattggggacattgcatttgcctacgcatactcaactgttctcattgaaatacaggacaccttgaaagcaggtcctccatcggagaacaaagccatgaaaagagcaagccttgtgggtgtctccacaacaaccttcttctacatgttatgcggttgtgttggttacgctgcctttggaaatgatgctcctggaaatttcctaactggttttggtttctatgagccattctggctaatcgactttgccaatgtctgcatcgccgtgcaccttatcggcgcctaccaagtcttttgtcaaccaatttttcagttcgtagagagccagagcgcgaaacgttggcctgataacaagtttattacaggagaatacaaaatccatgtcccttgctgtggtgattttagtatcaacttcctcagattggtatggaggacttcatatgttgtggtcaccgcggttgtagccatgatcttccctttcttcaacgatttcttgggtcttattggagcagcttccttctggcctttgactgtttactttcccattgagatgcatattgctcagaagaagataccgaaattctctttcacttggacttggttaaaaatcttgagttggacttgtttcattgtgtccctcgttgctgcagccggatcagtgcaaggactcatacaaagtctcaaggatttcaagcctttccaggctccttagtgaaaatatgtgttctcgccaacgtctccaagaacacaagttccatgcactctcttccctccaataaaagtttctatttctttgtagtttattggtgtgagacaatctcataccaaaatattgtacctctacttgcttgtcttaaacaaatctatcatcagtttatccc

SEQ ID NO: 96327 - protein, 481 aa, Arabidopsis thaliana
  peptide (1)..(481): Ceres Seq. ID no. 12732854
  misc_feature (1)..(481): Homolog of NCBI NO: 15240523 NR Description: amino acid permease 6 (emb CAA65051.1); protein At5g49630.1 [Arabidopsis thaliana] >gi|11277401|pir||T50691 amino
  misc_feature (3)..(455): Homolog of NCBI NO: 24370975 NR Description: amino acid transporter [Solanum tuberosum]
  misc_feature (11)..(479): Homolog of NCBI NO: 15217945 NR Description: amino acid permease I; protein id: At1g58360.1, by cDNA: gi_404018 [Arabidopsis thaliana] >gi|541848|pir||A48187
  misc_feature (11)..(479): Homolog of NCBI NO: 2654019 NR Description: neutral amino acid transport system II
  misc_feature (18)..(480): Homolog of NCBI NO: 27447655 NR Description: amino acid transporter [Lycopersicon esculentum]
  misc_feature (17)..(479): Homolog of NCBI NO: 15218370 NR Description: putative amino acid permease; protein id: [Arabidopsis thaliana] >gi|7442730|pir||T00620 probable amino
  misc_feature (43)..(428): Homolog of NCBI NO: 7442731 NR Description: probable amino acid transporter protein AAP1 -
  misc_feature (17)..(480): Homolog of NCBI NO: 27447657 NR Description: amino acid transporter [Lycopersicon esculentum]
  misc_feature (47)..(426): Homolog of NCBI NO: 4322321 NR Description: amino acid transporter [Nepenthes alata]
  misc_feature (22)..(479): Homolog of NCBI NO: 7442735 NR Description: amino acid transport protein AAP1 - castor bean
MEKKKSMFVEQSFPEHEIGDTNKNFDEDGRDKRTGTWMTGSAHIITAVIGSGVLSLAWAIAQLGWVAGPAVLMAFSFITYFTSTMLADCYRSPDPVTGKRNYTYMEVVRSYLGGRKVQLCGLAQYGNLIGITIGYTITASISMVAVKRSNCFHKNGHNVKCATSNTPFMIIFAIIQIILSQIPNFHNLSWLSILAAVMSFCYASIGVGLSIAKAAGGGEHVRTTLTGVTVGIDVSGAEKIWRTFQAIGDIAFAYAYSTVLIEIQDTLKAGPPSENKAMKRASLVGVSTTTFFYMLCGCVGYAAFGNDAPGNFLTGFGFYEPFWLIDFANVCIAVHLIGAYQVFCQPIFQFVESQSAKRWPDNKFITGEYKIHVPCCGDFSINFLRLVWRTSYVVVTAVVAMIFPFFNDFLGLIGAASFWPLTVYFPIEMHIAQKKIPKFSFTWTWLKILSWTCFIVSLVAAAGSVQGLIQSLKDFKPFQAP

SEQ ID NO: 96328 - protein, 475 aa, Arabidopsis thaliana
  peptide (1)..(475): Ceres Seq. ID no. 12732855
  misc_feature (1)..(475): Homolog of NCBI NO: 15240523 NR Description: amino acid permease 6 (emb CAA65051.1); protein At5g49630.1 [Arabidopsis thaliana] >gi|11277401|pir||T50691 amino
  misc_feature (1)..(449): Homolog of NCBI NO: 24370975 NR Description: amino acid transporter [Solanum tuberosum]
  misc_feature (5)..(473): Homolog of NCBI NO: 15217945 NR Description: amino acid permease I; protein id: At1g58360.1, by cDNA: gi_404018 [Arabidopsis thaliana] >gi|541848|pir||A48187
  misc_feature (5)..(473): Homolog of NCBI NO: 2654019 NR Description: neutral amino acid transport system II
  misc_feature (12)..(474): Homolog of NCBI NO: 27447655 NR Description: amino acid transporter [Lycopersicon esculentum]
  misc_feature (11)..(473): Homolog of NCBI NO: 15218370 NR Description: putative amino acid permease; protein id: [Arabidopsis thaliana] >gi|7442730|pir||T00620 probable amino
  misc_feature (37)..(422): Homolog of NCBI NO: 7442731 NR Description: probable amino acid transporter protein AAP1 -
  misc_feature (11)..(474): Homolog of NCBI NO: 27447657 NR Description: amino acid transporter [Lycopersicon esculentum]
  misc_feature (41)..(420): Homolog of NCBI NO: 4322321 NR Description: amino acid transporter [Nepenthes alata]
  misc_feature (16)..(473): Homolog of NCBI NO: 7442735 NR Description: amino acid transport protein AAP1 - castor bean
MFVEQSFPEHEIGDTNKNFDEDGRDKRTGTWMTGSAHIITAVIGSGVLSLAWAIAQLGWVAGPAVLMAFSFITYFTSTMLADCYRSPDPVTGKRNYTYMEVVRSYLGGRKVQLCGLAQYGNLIGITIGYTITASISMVAVKRSNCFHKNGHNVKCATSNTPFMIIFAIIQIILSQIPNFHNLSWLSILAAVMSFCYASIGVGLSIAKAAGGGEHVRTTLTGVTVGIDVSGAEKIWRTFQAIGDIAFAYAYSTVLIEIQDTLKAGPPSENKAMKRASLVGVSTTTFFYMLCGCVGYAAFGNDAPGNFLTGFGFYEPFWLIDFANVCIAVHLIGAYQVFCQPIFQFVESQSAKRWPDNKFITGEYKIHVPCCGDFSINFLRLVWRTSYVVVTAVVAMIFPFFNDFLGLIGAASFWPLTVYFPIEMHIAQKKIPKFSFTWTWLKILSWTCFIVSLVAAAGSVQGLIQSLKDFKPFQAP

SEQ ID NO: 96329 - protein, 444 aa, Arabidopsis thaliana
  peptide (1)..(444): Ceres Seq. ID no. 12732856
  misc_feature (1)..(444): Homolog of NCBI NO: 15240523 NR Description: amino acid permease 6 (emb CAA65051.1); protein At5g49630.1 [Arabidopsis thaliana] >gi|11277401|pir||T50691 amino
  misc_feature (1)..(418): Homolog of NCBI NO: 24370975 NR Description: amino acid transporter [Solanum tuberosum]
  misc_feature (1)..(442): Homolog of NCBI NO: 15217945 NR Description: amino acid permease I; protein id: At1g58360.1, by cDNA: gi_404018 [Arabidopsis thaliana] >gi|541848|pir||A48187
  misc_feature (1)..(442): Homolog of NCBI NO: 2654019 NR Description: neutral amino acid transport system II
  misc_feature (1)..(443): Homolog of NCBI NO: 27447655 NR Description: amino acid transporter [Lycopersicon esculentum]
  misc_feature (1)..(442): Homolog of NCBI NO: 15218370 NR Description: putative amino acid permease; protein id: [Arabidopsis thaliana] >gi|7442730|pir||T00620 probable amino
  misc_feature (6)..(391): Homolog of NCBI NO: 7442731 NR Description: probable amino acid transporter protein AAP1 -
  misc_feature (1)..(443): Homolog of NCBI NO: 27447657 NR Description: amino acid transporter [Lycopersicon esculentum]
  misc_feature (10)..(389): Homolog of NCBI NO: 4322321 NR Description: amino acid transporter [Nepenthes alata]
  misc_feature (1)..(442): Homolog of NCBI NO: 7442735 NR Description: amino acid transport protein AAP1 - castor bean
MTGSAHIITAVIGSGVLSLAWAIAQLGWVAGPAVLMAFSFITYFTSTMLADCYRSPDPVTGKRNYTYMEVVRSYLGGRKVQLCGLAQYGNLIGITIGYTITASISMVAVKRSNCFHKNGHNVKCATSNTPFMIIFAIIQIILSQIPNFHNLSWLSILAAVMSFCYASIGVGLSIAKAAGGGEHVRTTLTGVTVGIDVSGAEKIWRTFQAIGDIAFAYAYSTVLIEIQDTLKAGPPSENKAMKRASLVGVSTTTFFYMLCGCVGYAAFGNDAPGNFLTGFGFYEPFWLIDFANVCIAVHLIGAYQVFCQPIFQFVESQSAKRWPDNKFITGEYKIHVPCCGDFSINFLRLVWRTSYVVVTAVVAMIFPFFNDFLGLIGAASFWPLTVYFPIEMHIAQKKIPKFSFTWTWLKILSWTCFIVSLVAAAGSVQGLIQSLKDFKPFQAP

SEQ ID NO: 96330 - DNA, 831 bp, Arabidopsis thaliana
  misc_feature (1)..(831): Ceres Seq. ID no. 12732869
  misc_feature: MA Experiment ID: 20000171 Result: Up-regulated in Transcription
  misc_feature: MA Experiment 20000171 PARAMETER Experiment Name: At_42deg_Heat_P Parameter: Age (day) Value: 14
  misc_feature: MA Experiment 20000171 PARAMETER Experiment Name: At_42deg_Heat_P Parameter: Organism Value: A. thaliana
  misc_feature: MA Experiment 20000171 PARAMETER Experiment Name: At_42deg_Heat_P Parameter: Plant Line Value: WS
  misc_feature: MA Experiment 20000171 PARAMETER Experiment Name: At_42deg_Heat_P Parameter: Temperature (deg C) Value: 42 vs. 22
  misc_feature: MA Experiment 20000171 PARAMETER Experiment Name: At_42deg_Heat_P Parameter: Timepoint (hr) Value: 1
  misc_feature: MA Experiment 20000171 PARAMETER Experiment Name: At_42deg_Heat_P Parameter: Tissue Value: Aerial
  misc_feature: MA Experiment ID: 20000173 Result: Up-regulated in Transcription
  misc_feature: MA Experiment 20000173 PARAMETER Experiment Name: At_42deg_Heat_P Parameter: Age (day) Value: 14
  misc_feature: MA Experiment 20000173 PARAMETER Experiment Name: At_42deg_Heat_P Parameter: Organism Value: A. thaliana
  misc_feature: MA Experiment 20000173 PARAMETER Experiment Name: At_42deg_Heat_P Parameter: Plant Line Value: WS
  misc_feature: MA Experiment 20000173 PARAMETER Experiment Name: At_42deg_Heat_P Parameter: Temperature (deg C) Value: 42 vs. 22
  misc_feature: MA Experiment 20000173 PARAMETER Experiment Name: At_42deg_Heat_P Parameter: Timepoint (hr) Value: 6
  misc_feature: MA Experiment 20000173 PARAMETER Experiment Name: At_42deg_Heat_P Parameter: Tissue Value: Aerial
  misc_feature: MA Experiment ID: 20000182 Result: Up-regulated in Transcription
  misc_feature: MA Experiment 20000182 PARAMETER Experiment Name: At_2mM_SA_P Parameter: Age (day) Value: 14
  misc_feature: MA Experiment 20000182 PARAMETER Experiment Name: At_2mM_SA_P Parameter: Organism Value: A. thaliana
  misc_feature: MA Experiment 20000182 PARAMETER Experiment Name: At_2mM_SA_P Parameter: Plant Line Value: WS
  misc_feature: MA Experiment 20000182 PARAMETER Experiment Name: At_2mM_SA_P Parameter: Timepoint (hr) Value: 6
  misc_feature: MA Experiment 20000182 PARAMETER Experiment Name: At_2mM_SA_P Parameter: Tissue Value: Aerial
  misc_feature: MA Experiment 20000182 PARAMETER Experiment Name: At_2mM_SA_P Parameter: Treatment Value: 2mM SA vs. No Treatment
  misc_feature: MA Experiment ID: 20000184 Result: Up-regulated in Transcription
  misc_feature: MA Experiment 20000184 PARAMETER Experiment Name: At_Shoots__P Parameter: Age (day) Value: 7
  misc_feature: MA Experiment 20000184 PARAMETER Experiment Name: At_Shoots__P Parameter: Tissue Value: Shoots vs. Whole Plant
  misc_feature: MA Experiment ID: 20000234 Result: Down-regulated in Transcription
  misc_feature: MA Experiment 20000234 PARAMETER Experiment Name: At_Siliques_P Parameter: Age (day) Value: 21
  misc_feature: MA Experiment 20000234 PARAMETER Experiment Name: At_Siliques_P Parameter: Organism Value: A. thaliana
  misc_feature: MA Experiment 20000234 PARAMETER Experiment Name: At_Siliques_P Parameter: Plant Line Value: WS
  misc_feature: MA Experiment 20000234 PARAMETER Experiment Name: At_Siliques_P Parameter: Tissue Value: Less Than 5mm Siliques vs. Whole Plant
  misc_feature: MA Experiment ID: 20000437 Result: Up-regulated in Transcription
  misc_feature: MA Experiment 20000437 PARAMETER Experiment Name: At_Drought_P Parameter: Age (day) Value: 8
  misc_feature: MA Experiment 20000437 PARAMETER Experiment Name: At_Drought_P Parameter: Organism Value: A. thaliana
  misc_feature: MA Experiment 20000437 PARAMETER Experiment Name: At_Drought_P Parameter: Plant Line Value: WS
  misc_feature: MA Experiment 20000437 PARAMETER Experiment Name: At_Drought_P Parameter: Timepoint (hr) Value: 24
  misc_feature: MA Experiment 20000437 PARAMETER Experiment Name: At_Drought_P Parameter: Tissue Value: Whole Plant
  misc_feature: MA Experiment 20000437 PARAMETER Experiment Name: At_Drought_P Parameter: Treatment Value: Drought vs. No Drought
  misc_feature: MA Experiment ID: 20000438 Result: Up-regulated in Transcription
  misc_feature: MA Experiment 20000438 PARAMETER Experiment Name: At_Shoots__P Parameter: Age (day) Value: 14
  misc_feature: MA Experiment 20000438 PARAMETER Experiment Name: At_Shoots__P Parameter: Tissue Value: Shoots vs. Whole Plant
  misc_feature: MA Experiment ID: 20001247 Result: Up-regulated in Transcription
  misc_feature: MA Experiment 20001247 PARAMETER Experiment Name: At_Far-red-induction_P Parameter: Age (day) Value: 7
  misc_feature: MA Experiment 20001247 PARAMETER Experiment Name: At_Far-red-induction_P Parameter: Light Value: Far-red vs. White
  misc_feature: MA Experiment 20001247 PARAMETER Experiment Name: At_Far-red-induction_P Parameter: Organism Value: A. thaliana
  misc_feature: MA Experiment 20001247 PARAMETER Experiment Name: At_Far-red-induction_P Parameter: Plant Line Value: Columbia
  misc_feature: MA Experiment 20001247 PARAMETER Experiment Name: At_Far-red-induction_P Parameter: Timepoint (hr) Value: 1
  misc_feature: MA Experiment 20001247 PARAMETER Experiment Name: At_Far-red-induction_P Parameter: Tissue Value: Whole Plant
  misc_feature: MA Experiment ID: 20001248 Result: Up-regulated in Transcription
  misc_feature: MA Experiment 20001248 PARAMETER Experiment Name: At_Far-red-induction_P Parameter: Age (day) Value: 7
  misc_feature: MA Experiment 20001248 PARAMETER Experiment Name: At_Far-red-induction_P Parameter: Light Value: Far-red vs. White
  misc_feature: MA Experiment 20001248 PARAMETER Experiment Name: At_Far-red-induction_P Parameter: Organism Value: A. thaliana
  misc_feature: MA Experiment 20001248 PARAMETER Experiment Name: At_Far-red-induction_P Parameter: Plant Line Value: Columbia
  misc_feature: MA Experiment 20001248 PARAMETER Experiment Name: At_Far-red-induction_P Parameter: Timepoint (hr) Value: 4
  misc_feature: MA Experiment 20001248 PARAMETER Experiment Name: At_Far-red-induction_P Parameter: Tissue Value: Whole Plant
  misc_feature: MA Experiment ID: 20001450 Result: Up-regulated in Transcription
  misc_feature: MA Experiment 20001450 PARAMETER Experiment Name: At_Far-red-induction_P Parameter: Age (day) Value: 7
  misc_feature: MA Experiment 20001450 PARAMETER Experiment Name: At_Far-red-induction_P Parameter: Light Value: Far-red vs. White
  misc_feature: MA Experiment 20001450 PARAMETER Experiment Name: At_Far-red-induction_P Parameter: Organism Value: A. thaliana
  misc_feature: MA Experiment 20001450 PARAMETER Experiment Name: At_Far-red-induction_P Parameter: Plant Line Value: Columbia
  misc_feature: MA Experiment 20001450 PARAMETER Experiment Name: At_Far-red-induction_P Parameter: Timepoint (hr) Value: 8
  misc_feature: MA Experiment 20001450 PARAMETER Experiment Name: At_Far-red-induction_P Parameter: Tissue Value: Whole Plant
  misc_feature: MA Experiment ID: 20001451 Result: Up-regulated in Transcription
  misc_feature: MA Experiment 20001451 PARAMETER Experiment Name: At_Far-red-induction_P Parameter: Age (day) Value: 7
  misc_feature: MA Experiment 20001451 PARAMETER Experiment Name: At_Far-red-induction_P Parameter: Light Value: Far-red vs. White
  misc_feature: MA Experiment 20001451 PARAMETER Experiment Name: At_Far-red-induction_P Parameter: Organism Value: A. thaliana
  misc_feature: MA Experiment 20001451 PARAMETER Experiment Name: At_Far-red-induction_P Parameter: Plant Line Value: Columbia
  misc_feature: MA Experiment 20001451 PARAMETER Experiment Name: At_Far-red-induction_P Parameter: Timepoint (hr) Value: 24
  misc_feature: MA Experiment 20001451 PARAMETER Experiment Name: At_Far-red-induction_P Parameter: Tissue Value: Whole Plant
  misc_feature: MA Experiment ID: 20001557 Result: Up-regulated in Transcription
  misc_feature: MA Experiment 20001557 PARAMETER Experiment Name: At_Drought_Soil_Dry_P Parameter: Age (day) Value: 27
  misc_feature: MA Experiment 20001557 PARAMETER Experiment Name: At_Drought_Soil_Dry_P Parameter: Organism Value: A. thaliana
  misc_feature: MA Experiment 20001557 PARAMETER Experiment Name: At_Drought_Soil_Dry_P Parameter: Plant Line Value: WS
  misc_feature: MA Experiment 20001557 PARAMETER Experiment Name: At_Drought_Soil_Dry_P Parameter: Post Timepoint (hr) Value: 3
  misc_feature: MA Experiment 20001557 PARAMETER Experiment Name: At_Drought_Soil_Dry_P Parameter: Post-Treatment Value: Re-Water vs. No Drought
  misc_feature: MA Experiment 20001557 PARAMETER Experiment Name: At_Drought_Soil_Dry_P Parameter: Timepoint (day) Value: 13
  misc_feature: MA Experiment 20001557 PARAMETER Experiment Name: At_Drought_Soil_Dry_P Parameter: Treatment Value: Drought vs. No Drought
  misc_feature: MA Experiment ID: 20001904 Result: Up-regulated in Transcription
  misc_feature: MA Experiment 20001904 PARAMETER Experiment Name: At_Drought_Reproduction_P Parameter: Age (day) Value: 37
  misc_feature: MA Experiment 20001904 PARAMETER Experiment Name: At_Drought_Reproduction_P Parameter: Organism Value: A. thaliana
  misc_feature: MA Experiment 20001904 PARAMETER Experiment Name: At_Drought_Reproduction_P Parameter: Plant Line Value: WS
  misc_feature: MA Experiment 20001904 PARAMETER Experiment Name: At_Drought_Reproduction_P Parameter: Timepoint (day) Value: 7
  misc_feature: MA Experiment 20001904 PARAMETER Experiment Name: At_Drought_Reproduction_P Parameter: Tissue Value: Rosettes
  misc_feature: MA Experiment 20001904 PARAMETER Experiment Name: At_Drought_Reproduction_P Parameter: Treatment Value: Drought vs. No Drought
atgaaaggtgaatacagagagcaaaagagtaacgaaatgttttccaagcttcctcatcatcaacaacaacagcaacaacaacaacaacaacactctcttacctctcacttccacctctcctccaccgtaacccccaccgtcgatgactcctccatcgaagtggtccgacgtccacgtggcagaccaccaggttccaaaaacaaacctaaaccacccgtcttcgtcacacgtgacaccgaccctcctatgagtccttacatcctcgaagttccttcaggaaacgacgtcgtcgaagccatcaaccgtttctgccgccgtaaatccatcggagtctgcgtccttagtggctctggctctgtagctaacgtcactttacgtcagccatcaccggcagctcttggctctaccataactttccatggaaagtttgatctcctctccgtctccgcaacgtttctccctcctccgcctcgtacttccttgtctcctcccgtttctaacttcttcaccgtctctctcgctggacctcaaggacaaatcatcggagggttcgtcgctggtccacttatttcggcaggaacagtttacgtcatcgccgcaagtttcaacaacccttcttatcaccggttaccggcggaagaagagcaaaaacactcggcggggacaggggaaagagagggacaatctccgccggtctctggtggcggtgaagagtcaggacagatggcgggaagtggaggagagtcgtgtggggtatcaatgtacagttgccacatgggtggctctgatgttatttgggcccctacagccagagctccaccgccatactaa

SEQ ID NO: 96331 - protein, 276 aa, Arabidopsis thaliana
  peptide (1)..(276): Ceres Seq. ID no. 12732870
  misc_feature (1)..(276): Homolog of NCBI NO: 15240535 NR Description: putative protein; protein id: At5g49700.1
  misc_feature (52)..(245): Homolog of NCBI NO: 15223782 NR Description: hypothetical protein; protein id: At1g14490.1
  misc_feature (49)..(256): Homolog of NCBI NO: 18396925 NR Description: expressed protein; protein id: At3g04570.1, by cDNA: 15781. [Arabidopsis thaliana] hypothetical protein [Arabidopsis thaliana]
  misc_feature (54)..(245): Homolog of NCBI NO: 38346718 NR Description: OSJNBa0086O06.16 [Oryza sativa (japonica
  misc_feature (41)..(261): Homolog of NCBI NO: 7486025 NR Description: hypothetical protein F23E12.50 - Arabidopsis >gi|3080411|emb|CAA18730.1| putative protein [Arabidopsis >gi|7270491|emb|CAB80256.1| putative protein [Arabidopsis
  misc_feature (41)..(261): Homolog of NCBI NO: 30690333 NR Description: expressed protein [Arabidopsis thaliana]
  misc_feature (49)..(246): Homolog of NCBI NO: 18414224 NR Description: Expressed protein; protein id: At4g14465.1, by cDNA: 36844. [Arabidopsis thaliana]
  misc_feature (17)..(275): Homolog of NCBI NO: 15223074 NR Description: unknown protein; protein id: At1g76500.1
  misc_feature (49)..(246): Homolog of NCBI NO: 21593180 NR Description: putative DNA-binding protein [Arabidopsis
  misc_feature (53)..(246): Homolog of NCBI NO: 15235815 NR Description: putative DNA binding protein; protein id:
MKGEYREQKSNEMFSKLPHHQQQQQQQQQQHSLTSHFHLSSTVTPTVDDSSIEVVRRPRGRPPGSKNKPKPPVFVTRDTDPPMSPYILEVPSGNDVVEAINRFCRRKSIGVCVLSGSGSVANVTLRQPSPAALGSTITFHGKFDLLSVSATFLPPPPRTSLSPPVSNFFTVSLAGPQGQIIGGFVAGPLISAGTVYVIAASFNNPSYHRLPAEEEQKHSAGTGEREGQSPPVSGGGEESGQMAGSGGESCGVSMYSCHMGGSDVIWAPTARAPPPY

SEQ ID NO: 96332 - protein, 264 aa, Arabidopsis thaliana
  peptide (1)..(264): Ceres Seq. ID no. 12732871
  misc_feature (1)..(264): Homolog of NCBI NO: 15240535 NR Description: putative protein; protein id: At5g49700.1
  misc_feature (40)..(233): Homolog of NCBI NO: 15223782 NR Description: hypothetical protein; protein id: At1g14490.1
  misc_feature (37)..(244): Homolog of NCBI NO: 18396925 NR Description: expressed protein; protein id: At3g04570.1, by cDNA: 15781. [Arabidopsis thaliana] hypothetical protein [Arabidopsis thaliana]
  misc_feature (42)..(233): Homolog of NCBI NO: 38346718 NR Description: OSJNBa0086O06.16 [Oryza sativa (japonica
  misc_feature (29)..(249): Homolog of NCBI NO: 7486025 NR Description: hypothetical protein F23E12.50 - Arabidopsis >gi|3080411|emb|CAA18730.1| putative protein [Arabidopsis >gi|7270491|emb|CAB80256.1| putative protein [Arabidopsis
  misc_feature (29)..(249): Homolog of NCBI NO: 30690333 NR Description: expressed protein [Arabidopsis thaliana]
  misc_feature (37)..(234): Homolog of NCBI NO: 18414224 NR Description: Expressed protein; protein id: At4g14465.1, by cDNA: 36844. [Arabidopsis thaliana]
  misc_feature (5)..(263): Homolog of NCBI NO: 15223074 NR Description: unknown protein; protein id: At1g76500.1
  misc_feature (37)..(234): Homolog of NCBI NO: 21593180 NR Description: putative DNA-binding protein [Arabidopsis
  misc_feature (41)..(234): Homolog of NCBI NO: 15235815 NR Description: putative DNA binding protein; protein id:
MFSKLPHHQQQQQQQQQQHSLTSHFHLSSTVTPTVDDSSIEVVRRPRGRPPGSKNKPKPPVFVTRDTDPPMSPYILEVPSGNDVVEAINRFCRRKSIGVCVLSGSGSVANVTLRQPSPAALGSTITFHGKFDLLSVSATFLPPPPRTSLSPPVSNFFTVSLAGPQGQIIGGFVAGPLISAGTVYVIAASFNNPSYHRLPAEEEQKHSAGTGEREGQSPPVSGGGEESGQMAGSGGESCGVSMYSCHMGGSDVIWAPTARAPPPY

SEQ ID NO: 96333 - protein, 194 aa, Arabidopsis thaliana
  peptide (1)..(194): Ceres Seq. ID no. 12732872
  misc_feature (1)..(194): Homolog of NCBI NO: 15240535 NR Description: putative protein; protein id: At5g49700.1
  misc_feature (1)..(163): Homolog of NCBI NO: 15223782 NR Description: hypothetical protein; protein id: At1g14490.1
  misc_feature (1)..(174): Homolog of NCBI NO: 18396925 NR Description: expressed protein; protein id: At3g04570.1, by cDNA: 15781. [Arabidopsis thaliana] hypothetical protein [Arabidopsis thaliana]
  misc_feature (1)..(163): Homolog of NCBI NO: 38346718 NR Description: OSJNBa0086O06.16 [Oryza sativa (japonica
  misc_feature (1)..(179): Homolog of NCBI NO: 7486025 NR Description: hypothetical protein F23E12.50 - Arabidopsis >gi|3080411|emb|CAA18730.1| putative protein [Arabidopsis >gi|7270491|emb|CAB80256.1| putative protein [Arabidopsis
  misc_feature (1)..(179): Homolog of NCBI NO: 30690333 NR Description: expressed protein [Arabidopsis thaliana]
  misc_feature (1)..(164): Homolog of NCBI NO: 18414224 NR Description: Expressed protein; protein id: At4g14465.1, by cDNA: 36844. [Arabidopsis thaliana]
  misc_feature (1)..(193): Homolog of NCBI NO: 15223074 NR Description: unknown protein; protein id: At1g76500.1
  misc_feature (1)..(164): Homolog of NCBI NO: 21593180 NR Description: putative DNA-binding protein [Arabidopsis
  misc_feature (1)..(164): Homolog of NCBI NO: 15235815 NR Description: putative DNA binding protein; protein id:
MSPYILEVPSGNDVVEAINRFCRRKSIGVCVLSGSGSVANVTLRQPSPAALGSTITFHGKFDLLSVSATFLPPPPRTSLSPPVSNFFTVSLAGPQGQIIGGFVAGPLISAGTVYVIAASFNNPSYHRLPAEEEQKHSAGTGEREGQSPPVSGGGEESGQMAGSGGESCGVSMYSCHMGGSDVIWAPTARAPPPY

SEQ ID NO: 96334 - DNA, 2841 bp, Arabidopsis thaliana
  misc_feature (1)..(2841): Ceres Seq. ID no. 12732873
  misc_feature: MA Experiment ID: 20000173 Result: Down-regulated in Transcription
  misc_feature: MA Experiment 20000173 PARAMETER Experiment Name: At_42deg_Heat_P Parameter: Age (day) Value: 14
  misc_feature: MA Experiment 20000173 PARAMETER Experiment Name: At_42deg_Heat_P Parameter: Organism Value: A. thaliana
  misc_feature: MA Experiment 20000173 PARAMETER Experiment Name: At_42deg_Heat_P Parameter: Plant Line Value: WS
  misc_feature: MA Experiment 20000173 PARAMETER Experiment Name: At_42deg_Heat_P Parameter: Temperature (deg C) Value: 42 vs. 22
  misc_feature: MA Experiment 20000173 PARAMETER Experiment Name: At_42deg_Heat_P Parameter: Timepoint (hr) Value: 6
  misc_feature: MA Experiment 20000173 PARAMETER Experiment Name: At_42deg_Heat_P Parameter: Tissue Value: Aerial
  misc_feature: MA Experiment ID: 20000180 Result: Up-regulated in Transcription
  misc_feature: MA Experiment 20000180 PARAMETER Experiment Name: At_Germinating_Seeds_P Parameter: Age (hr) Value: 24 vs. 0
  misc_feature: MA Experiment 20000180 PARAMETER Experiment Name: At_Germinating_Seeds_P Parameter: Tissue Value: Germinating Seeds
  misc_feature: MA Experiment ID: 20000234 Result: Down-regulated in Transcription
  misc_feature: MA Experiment 20000234 PARAMETER Experiment Name: At_Siliques_P Parameter: Age (day) Value: 21
  misc_feature: MA Experiment 20000234 PARAMETER Experiment Name: At_Siliques_P Parameter: Organism Value: A. thaliana
  misc_feature: MA Experiment 20000234 PARAMETER Experiment Name: At_Siliques_P Parameter: Plant Line Value: WS
  misc_feature: MA Experiment 20000234 PARAMETER Experiment Name: At_Siliques_P Parameter: Tissue Value: Less Than 5mm Siliques vs. Whole Plant
  misc_feature: MA Experiment ID: 20000496 Result: Up-regulated in Transcription
  misc_feature: MA Experiment 20000496 PARAMETER Experiment Name: At_Guard_Cells_P Parameter: Harvest Date Value: 7/19/2002
  misc_feature: MA Experiment 20000496 PARAMETER Experiment Name: At_Guard_Cells_P Parameter: Organism Value: Canola
  misc_feature: MA Experiment 20000496 PARAMETER Experiment Name: At_Guard_Cells_P Parameter: Tissue Value: Guard Cells vs. Leaves
  misc_feature: MA Experiment ID: 20000527 Result: Down-regulated in Transcription
  misc_feature: MA Experiment 20000527 PARAMETER Experiment Name: At_10percent_PEG_P Parameter: Age (day) Value: 20
  misc_feature: MA Experiment 20000527 PARAMETER Experiment Name: At_10percent_PEG_P Parameter: Organism Value: A. thaliana
  misc_feature: MA Experiment 20000527 PARAMETER Experiment Name: At_10percent_PEG_P Parameter: Plant Line Value: WS
  misc_feature: MA Experiment 20000527 PARAMETER Experiment Name: At_10percent_PEG_P Parameter: Timepoint (day) Value: 20
  misc_feature: MA Experiment 20000527 PARAMETER Experiment Name: At_10percent_PEG_P Parameter: Tissue Value: Whole Plant
  misc_feature: MA Experiment 20000527 PARAMETER Experiment Name: At_10percent_PEG_P Parameter: Treatment Value: 10percent PEG vs. No Treatment
  misc_feature: MA Experiment ID: 20000794 Result: Up-regulated in Transcription
  misc_feature: MA Experiment 20000794 PARAMETER Experiment Name: At_Petals_P Parameter: Age (day) Value: 23-25 days
  misc_feature: MA Experiment 20000794 PARAMETER Experiment Name: At_Petals_P Parameter: Plant Line Value: WS
  misc_feature: MA Experiment 20000794 PARAMETER Experiment Name: At_Petals_P Parameter: Tissue Value: Petals vs. Whole plant
atgaagatgagttcaagaattggattatttaagctcttgatcttgcttttcttccaaatttactctgtttatgcgttcacagatggttcagattttactgctttacaagccctgaagaacgaatgggacacgttatccaagagttggaaaagctctgatccttgtggaaccgaatgggttggaattacatgtaacaacgataaccgtgttgtttcaatatcattaaccaaccgtaacttgaaaggaaagcttcctaccgaaatttcgacattgtctgaattgcaaaccttggatttgactggcaatcctgaattgtctggaccgcttccagcaaatatcggtaacctcaggaagttgactttcttgagccttatgggatgtgcttttaatggtccaatccctgattccatagggaatcttgaacaacttacaagactctctctgaatttaaataaatttagtggaacaattccggcttccatgggacggttatcgaaactatattggttcgacatagctgacaatcagttagaaggaaagcttccagtttctgatggggcttctttacctggacttgacatgcttcttcaaactgggcattttcattttggtaataacaagctttcaggcgaaatcccagagaagctctttagctcagaaatgactttgctacatgtgctgtttgatggaaaccaattcaccggtagcatcccagagagcctcggcctagttcaaaatttgactgtgttacgtcttgataggaatagactaagtggagacattccttcaagtcttaataatctcacaaatcttcaagaactgcatttgtccgacaacaaatttacaggtagtcttccaaatttgaccagcttgaccagtctctacacattggatgtgagcaataacccgttggcgttatcaccggttccatcatggatccctttcttaaactctttgtcaacattaaggttggaagatatccaacttgatggtccagtaccaacctccctttttagccctcttcaattgcaaactgtttccctaaagcacaatcttataaacacaacattggaccttggtaccaactatagcaaacaattggattttgtggatttacgagacaacttcataactggttataaatcaccagctaataaccccgtcaatgtaatgttggcagataatcaagtgtgccaagacccggcgaatcagctgagtggctactgcaatgcagtccaaccaaattccacattttctaccctaacaaaatgtggtaatcattgtggtaaaggtaaggaaccgaatcaaggctgccactgtgtgtatccacttacaggagtattcaccttaaggtctccttcattctccggattttcaaacaacagtaacttcctaaagtttggggagagtttaatgactttctttaagaatggcaagtatcctgtagactctgtggccatgagaaacataagcgagaatccaactgattatcatcttttgataaatctcttgatctttccatcgggacgcgaccgctttaatcagacggaaatggactctattaattctgcatttaccattcaggattataagcctcctccaagatttggtccttatattttcgtcgccgatcagtacaaaacattctctgatttagaagattccaagacagtaagtatgaaagttataattggagtagtagttggtgttgtagttcttctgttgctgttggctttagctgggatttacgctcttagacagaagaagagagctcagagagcaactgatcaaatgaatccttttgccaagtgggatgcggggaagaatgaaatggatgctccacaactaatgggaacaaaagcctttactttcgaagagcttagcaaatgtactaacaacttttcagatgcaaatgatgttggcggtggaggttatggccaggtctacaaaggtacccttcccaatgggcaagtcatagcaatcaaaagagctcaacaaggatccatgcaaggagcgttcgagtttaagaccgagattgagcttctttcaagggtccatcataaaaatgttgttaagcttttgggcttctgttttgatcaaaaagaacaaatgctcgtatacgagtacatacctaatgggtcccttagagacggtctatcagggaagaatggggttaaactggattggacaagaaggctcaaaatagcacttggctcagggaagggtctagcttatcttcatgagcttgctgatcctccaattatacatagagacgtcaaatcaaataacatattacttgatgaacatctaaccgcaaaggttgctgatttcggtctctccaaacttgtgggggaccctgaaaaagctcatgtcacaacacaagtgaaaggaaccatgggctatcttgatcctgagtactacatgacgaatcaattgacggagaagagcgatgtgtatgggtttggtgtggtgatgcttgagttattaaccggtaaaagtccgatagatagaggcagctatgttgtgaaagaggtaaagaagaagatggataaatcgaggaacttgtatgacttacaagaattgttggacacgacaattatccaaaacagcgggaatttgaaagggttcgagaagtatgtagatgtggctctacaatgcgtggagccagagggagttaataggccaacaatgagtgaggtggtgcaagaacttgagagcatattgcggcttgttggattaaaccctaacgccgattcagcaacatacgaggaagcatctggtgatccttatggtagggattcgtttgagtacactggggttttcccaactccaaaaccctaa

SEQ ID NO: 96335 - protein, 946 aa, Arabidopsis thaliana
  peptide (1)..(946): Ceres Seq. ID no. 12732874
  misc_feature (634)..(834): Pfam Name: Protein kinase domain Pfam Description: Protein kinase domain
  misc_feature (101)..(925): Homolog of NCBI NO: 8978273 NR Description: receptor protein kinase-like [Arabidopsis
  misc_feature (72)..(943): Homolog of NCBI NO: 15240549 NR Description: leucine-rich repeat transmembrane protein kinase, protein id: At5g49780.1 [Arabidopsis thaliana]
  misc_feature (11)..(939): Homolog of NCBI NO: 30699436 NR Description: leucine-rich repeat transmembrane protein kinase, [Arabidopsis thaliana] >gi|26450791|dbj|BAC42504.1| unknown
  misc_feature (11)..(939): Homolog of NCBI NO: 7715608 NR Description: F20B17.5 [Arabidopsis thaliana]
  misc_feature (195)..(931): Homolog of NCBI NO: 34909240 NR Description: putative receptor protein kinase [Oryza sativa
  misc_feature (91)..(929): Homolog of NCBI NO: 15222211 NR Description: leucine-rich repeat transmembrane protein kinase,
  misc_feature (27)..(909): Homolog of NCBI NO: 30679474 NR Description: leucine-rich repeat transmembrane protein kinase,
  misc_feature (105)..(926): Homolog of NCBI NO: 34905792 NR Description: P0401G10.22 [Oryza sativa (japonica
  misc_feature (539)..(927): Homolog of NCBI NO: 15240244 NR Description: leucine-rich repeat transmembrane protein kinase,
  misc_feature (2)..(286): Homolog of NCBI NO: 15240244 NR Description: leucine-rich repeat transmembrane protein kinase,
MKMSSRIGLFKLLILLFFQIYSVYAFTDGSDFTALQALKNEWDTLSKSWKSSDPCGTEWVGITCNNDNRVVSISLTNRNLKGKLPTEISTLSELQTLDLTGNPELSGPLPANIGNLRKLTFLSLMGCAFNGPIPDSIGNLEQLTRLSLNLNKFSGTIPASMGRLSKLYWFDIADNQLEGKLPVSDGASLPGLDMLLQTGHFHFGNNKLSGEIPEKLFSSEMTLLHVLFDGNQFTGSIPESLGLVQNLTVLRLDRNRLSGDIPSSLNNLTNLQELHLSDNKFTGSLPNLTSLTSLYTLDVSNNPLALSPVPSWIPFLNSLSTLRLEDIQLDGPVPTSLFSPLQLQTVSLKHNLINTTLDLGTNYSKQLDFVDLRDNFITGYKSPANNPVNVMLADNQVCQDPANQLSGYCNAVQPNSTFSTLTKCGNHCGKGKEPNQGCHCVYPLTGVFTLRSPSFSGFSNNSNFLKFGESLMTFFKNGKYPVDSVAMRNISENPTDYHLLINLLIFPSGRDRFNQTEMDSINSAFTIQDYKPPPRFGPYIFVADQYKTFSDLEDSKTVSMKVIIGVVVGVVVLLLLLALAGIYALRQKKRAQRATDQMNPFAKWDAGKNEMDAPQLMGTKAFTFEELSKCTNNFSDANDVGGGGYGQVYKGTLPNGQVIAIKRAQQGSMQGAFEFKTEIELLSRVHHKNVVKLLGFCFDQKEQMLVYEYIPNGSLRDGLSGKNGVKLDWTRRLKIALGSGKGLAYLHELADPPIIHRDVKSNNILLDEHLTAKVADFGLSKLVGDPEKAHVTTQVKGTMGYLDPEYYMTNQLTEKSDVYGFGVVMLELLTGKSPIDRGSYVVKEVKKKMDKSRNLYDLQELLDTTIIQNSGNLKGFEKYVDVALQCVEPEGVNRPTMSEVVQELESILRLVGLNPNADSATYEEASGDPYGRDSFEYTGVFPTPKP

SEQ ID NO: 96336 - protein, 944 aa, Arabidopsis thaliana
  peptide (1)..(944): Ceres Seq. ID no. 12732875
  misc_feature (632)..(832): Pfam Name: Protein kinase domain Pfam Description: Protein kinase domain
  misc_feature (99)..(923): Homolog of NCBI NO: 8978273 NR Description: receptor protein kinase-like [Arabidopsis
  misc_feature (70)..(941): Homolog of NCBI NO: 15240549 NR Description: leucine-rich repeat transmembrane protein kinase, protein id: At5g49780.1 [Arabidopsis thaliana]
  misc_feature (9)..(937): Homolog of NCBI NO: 30699436 NR Description: leucine-rich repeat transmembrane protein kinase, [Arabidopsis thaliana] >gi|26450791|dbj|BAC42504.1| unknown
  misc_feature (9)..(937): Homolog of NCBI NO: 7715608 NR Description: F20B17.5 [Arabidopsis thaliana]
  misc_feature (193)..(929): Homolog of NCBI NO: 34909240 NR Description: putative receptor protein kinase [Oryza sativa
  misc_feature (89)..(927): Homolog of NCBI NO: 15222211 NR Description: leucine-rich repeat transmembrane protein kinase,
  misc_feature (25)..(907): Homolog of NCBI NO: 30679474 NR Description: leucine-rich repeat transmembrane protein kinase,
  misc_feature (103)..(924): Homolog of NCBI NO: 34905792 NR Description: P0401G10.22 [Oryza sativa (japonica
  misc_feature (537)..(925): Homolog of NCBI NO: 15240244 NR Description: leucine-rich repeat transmembrane protein kinase,
  misc_feature (1)..(284): Homolog of NCBI NO: 15240244 NR Description: leucine-rich repeat transmembrane protein kinase,
MSSRIGLFKLLILLFFQIYSVYAFTDGSDFTALQALKNEWDTLSKSWKSSDPCGTEWVGITCNNDNRVVSISLTNRNLKGKLPTEISTLSELQTLDLTGNPELSGPLPANIGNLRKLTFLSLMGCAFNGPIPDSIGNLEQLTRLSLNLNKFSGTIPASMGRLSKLYWFDIADNQLEGKLPVSDGASLPGLDMLLQTGHFHFGNNKLSGEIPEKLFSSEMTLLHVLFDGNQFTGSIPESLGLVQNLTVLRLDRNRLSGDIPSSLNNLTNLQELHLSDNKFTGSLPNLTSLTSLYTLDVSNNPLALSPVPSWIPFLNSLSTLRLEDIQLDGPVPTSLFSPLQLQTVSLKHNLINTTLDLGTNYSKQLDFVDLRDNFITGYKSPANNPVNVMLADNQVCQDPANQLSGYCNAVQPNSTFSTLTKCGNHCGKGKEPNQGCHCVYPLTGVFTLRSPSFSGFSNNSNFLKFGESLMTFFKNGKYPVDSVAMRNISENPTDYHLLINLLIFPSGRDRFNQTEMDSINSAFTIQDYKPPPRFGPYIFVADQYKTFSDLEDSKTVSMKVIIGVVVGVVVLLLLLALAGIYALRQKKRAQRATDQMNPFAKWDAGKNEMDAPQLMGTKAFTFEELSKCTNNFSDANDVGGGGYGQVYKGTLPNGQVIAIKRAQQGSMQGAFEFKTEIELLSRVHHKNVVKLLGFCFDQKEQMLVYEYIPNGSLRDGLSGKNGVKLDWTRRLKIALGSGKGLAYLHELADPPIIHRDVKSNNILLDEHLTAKVADFGLSKLVGDPEKAHVTTQVKGTMGYLDPEYYMTNQLTEKSDVYGFGVVMLELLTGKSPIDRGSYVVKEVKKKMDKSRNLYDLQELLDTTIIQNSGNLKGFEKYVDVALQCVEPEGVNRPTMSEVVQELESILRLVGLNPNADSATYEEASGDPYGRDSFEYTGVFPTPKP

SEQ ID NO: 96337 - protein, 822 aa, Arabidopsis thaliana
  peptide (1)..(822): Ceres Seq. ID no. 12732876
  misc_feature (510)..(710): Pfam Name: Protein kinase domain Pfam Description: Protein kinase domain
  misc_feature (1)..(801): Homolog of NCBI NO: 8978273 NR Description: receptor protein kinase-like [Arabidopsis
  misc_feature (1)..(819): Homolog of NCBI NO: 15240549 NR Description: leucine-rich repeat transmembrane protein kinase, protein id: At5g49780.1 [Arabidopsis thaliana]
  misc_feature (1)..(815): Homolog of NCBI NO: 30699436 NR Description: leucine-rich repeat transmembrane protein kinase, [Arabidopsis thaliana] >gi|26450791|dbj|BAC42504.1| unknown
  misc_feature (1)..(815): Homolog of NCBI NO: 7715608 NR Description: F20B17.5 [Arabidopsis thaliana]
  misc_feature (71)..(807): Homolog of NCBI NO: 34909240 NR Description: putative receptor protein kinase [Oryza sativa
  misc_feature (1)..(805): Homolog of NCBI NO: 15222211 NR Description: leucine-rich repeat transmembrane protein kinase,
  misc_feature (1)..(785): Homolog of NCBI NO: 30679474 NR Description: leucine-rich repeat transmembrane protein kinase,
  misc_feature (1)..(802): Homolog of NCBI NO: 34905792 NR Description: P0401G10.22 [Oryza sativa (japonica
  misc_feature (415)..(803): Homolog of NCBI NO: 15240244 NR Description: leucine-rich repeat transmembrane protein kinase,
  misc_feature (1)..(162): Homolog of NCBI NO: 15240244 NR Description: leucine-rich repeat transmembrane protein kinase,
MGCAFNGPIPDSIGNLEQLTRLSLNLNKFSGTIPASMGRLSKLYWFDIADNQLEGKLPVSDGASLPGLDMLLQTGHFHFGNNKLSGEIPEKLFSSEMTLLHVLFDGNQFTGSIPESLGLVQNLTVLRLDRNRLSGDIPSSLNNLTNLQELHLSDNKFTGSLPNLTSLTSLYTLDVSNNPLALSPVPSWIPFLNSLSTLRLEDIQLDGPVPTSLFSPLQLQTVSLKHNLINTTLDLGTNYSKQLDFVDLRDNFITGYKSPANNPVNVMLADNQVCQDPANQLSGYCNAVQPNSTFSTLTKCGNHCGKGKEPNQGCHCVYPLTGVFTLRSPSFSGFSNNSNFLKFGESLMTFFKNGKYPVDSVAMRNISENPTDYHLLINLLIFPSGRDRFNQTEMDSINSAFTIQDYKPPPRFGPYIFVADQYKTFSDLEDSKTVSMKVIIGVVVGVVVLLLLLALAGIYALRQKKRAQRATDQMNPFAKWDAGKNEMDAPQLMGTKAFTFEELSKCTNNFSDANDVGGGGYGQVYKGTLPNGQVIAIKRAQQGSMQGAFEFKTEIELLSRVHHKNVVKLLGFCFDQKEQMLVYEYIPNGSLRDGLSGKNGVKLDWTRRLKIALGSGKGLAYLHELADPPIIHRDVKSNNILLDEHLTAKVADFGLSKLVGDPEKAHVTTQVKGTMGYLDPEYYMTNQLTEKSDVYGFGVVMLELLTGKSPIDRGSYVVKEVKKKMDKSRNLYDLQELLDTTIIQNSGNLKGFEKYVDVALQCVEPEGVNRPTMSEVVQELESILRLVGLNPNADSATYEEASGDPYGRDSFEYTGVFPTPKP

SEQ ID NO: 96338 - DNA, 2290 bp, Arabidopsis thaliana
  misc_feature (1)..(2290): Ceres Seq. ID no. 12732900
  misc_feature: MA Experiment ID: 20000171 Result: Up-regulated in Transcription
  misc_feature: MA Experiment 20000171 PARAMETER Experiment Name: At_42deg_Heat_P Parameter: Age (day) Value: 14
  misc_feature: MA Experiment 20000171 PARAMETER Experiment Name: At_42deg_Heat_P Parameter: Organism Value: A. thaliana
  misc_feature: MA Experiment 20000171 PARAMETER Experiment Name: At_42deg_Heat_P Parameter: Plant Line Value: WS
  misc_feature: MA Experiment 20000171 PARAMETER Experiment Name: At_42deg_Heat_P Parameter: Temperature (deg C) Value: 42 vs. 22
  misc_feature: MA Experiment 20000171 PARAMETER Experiment Name: At_42deg_Heat_P Parameter: Timepoint (hr) Value: 1
  misc_feature: MA Experiment 20000171 PARAMETER Experiment Name: At_42deg_Heat_P Parameter: Tissue Value: Aerial
  misc_feature: MA Experiment ID: 20000173 Result: Up-regulated in Transcription
  misc_feature: MA Experiment 20000173 PARAMETER Experiment Name: At_42deg_Heat_P Parameter: Age (day) Value: 14
  misc_feature: MA Experiment 20000173 PARAMETER Experiment Name: At_42deg_Heat_P Parameter: Organism Value: A. thaliana
  misc_feature: MA Experiment 20000173 PARAMETER Experiment Name: At_42deg_Heat_P Parameter: Plant Line Value: WS
  misc_feature: MA Experiment 20000173 PARAMETER Experiment Name: At_42deg_Heat_P Parameter: Temperature (deg C) Value: 42 vs. 22
  misc_feature: MA Experiment 20000173 PARAMETER Experiment Name: At_42deg_Heat_P Parameter: Timepoint (hr) Value: 6
  misc_feature: MA Experiment 20000173 PARAMETER Experiment Name: At_42deg_Heat_P Parameter: Tissue Value: Aerial
  misc_feature: MA Experiment ID: 20000213 Result: Up-regulated in Transcription
  misc_feature: MA Experiment 20000213 PARAMETER Experiment Name: At_4deg_Cold_P Parameter: Timepoint (hr) Value: 2
  misc_feature: MA Experiment ID: 20000437 Result: Down-regulated in Transcription
  misc_feature: MA Experiment 20000437 PARAMETER Experiment Name: At_Drought_P Parameter: Age (day) Value: 8
  misc_feature: MA Experiment 20000437 PARAMETER Experiment Name: At_Drought_P Parameter: Organism Value: A. thaliana
  misc_feature: MA Experiment 20000437 PARAMETER Experiment Name: At_Drought_P Parameter: Plant Line Value: WS
  misc_feature: MA Experiment 20000437 PARAMETER Experiment Name: At_Drought_P Parameter: Timepoint (hr) Value: 24
  misc_feature: MA Experiment 20000437 PARAMETER Experiment Name: At_Drought_P Parameter: Tissue Value: Whole Plant
  misc_feature: MA Experiment 20000437 PARAMETER Experiment Name: At_Drought_P Parameter: Treatment Value: Drought vs. No Drought
  misc_feature: MA Experiment ID: 20000495 Result: Down-regulated in Transcription
  misc_feature: MA Experiment 20000495 PARAMETER Experiment Name: At_Guard_Cells_P Parameter: Harvest Date Value: 8/2/2002
  misc_feature: MA Experiment 20000495 PARAMETER Experiment Name: At_Guard_Cells_P Parameter: Organism Value: A. thaliana
  misc_feature: MA Experiment 20000495 PARAMETER Experiment Name: At_Guard_Cells_P Parameter: Tissue Value: Guard Cells vs. Leaves
  misc_feature: MA Experiment ID: 20000496 Result: Down-regulated in Transcription
  misc_feature: MA Experiment 20000496 PARAMETER Experiment Name: At_Guard_Cells_P Parameter: Harvest Date Value: 7/19/2002
  misc_feature: MA Experiment 20000496 PARAMETER Experiment Name: At_Guard_Cells_P Parameter: Organism Value: Canola
  misc_feature: MA Experiment 20000496 PARAMETER Experiment Name: At_Guard_Cells_P Parameter: Tissue Value: Guard Cells vs. Leaves
  misc_feature: MA Experiment ID: 20001248 Result: Down-regulated in Transcription
  misc_feature: MA Experiment 20001248 PARAMETER Experiment Name: At_Far-red-induction_P Parameter: Age (day) Value: 7
  misc_feature: MA Experiment 20001248 PARAMETER Experiment Name: At_Far-red-induction_P Parameter: Light Value: Far-red vs. White
  misc_feature: MA Experiment 20001248 PARAMETER Experiment Name: At_Far-red-induction_P Parameter: Organism Value: A. thaliana
  misc_feature: MA Experiment 20001248 PARAMETER Experiment Name: At_Far-red-induction_P Parameter: Plant Line Value: Columbia
  misc_feature: MA Experiment 20001248 PARAMETER Experiment Name: At_Far-red-induction_P Parameter: Timepoint (hr) Value: 4
  misc_feature: MA Experiment 20001248 PARAMETER Experiment Name: At_Far-red-induction_P Parameter: Tissue Value: Whole Plant
  misc_feature: MA Experiment ID: 20001450 Result: Down-regulated in Transcription
  misc_feature: MA Experiment 20001450 PARAMETER Experiment Name: At_Far-red-induction_P Parameter: Age (day) Value: 7
  misc_feature: MA Experiment 20001450 PARAMETER Experiment Name: At_Far-red-induction_P Parameter: Light Value: Far-red vs. White
  misc_feature: MA Experiment 20001450 PARAMETER Experiment Name: At_Far-red-induction_P Parameter: Organism Value: A. thaliana
  misc_feature: MA Experiment 20001450 PARAMETER Experiment Name: At_Far-red-induction_P Parameter: Plant Line Value: Columbia
  misc_feature: MA Experiment 20001450 PARAMETER Experiment Name: At_Far-red-induction_P Parameter: Timepoint (hr) Value: 8
  misc_feature: MA Experiment 20001450 PARAMETER Experiment Name: At_Far-red-induction_P Parameter: Tissue Value: Whole Plant
  misc_feature: MA Experiment ID: 20001451 Result: Down-regulated in Transcription
  misc_feature: MA Experiment 20001451 PARAMETER Experiment Name: At_Far-red-induction_P Parameter: Age (day) Value: 7
  misc_feature: MA Experiment 20001451 PARAMETER Experiment Name: At_Far-red-induction_P Parameter: Light Value: Far-red vs. White
  misc_feature: MA Experiment 20001451 PARAMETER Experiment Name: At_Far-red-induction_P Parameter: Organism Value: A. thaliana
  misc_feature: MA Experiment 20001451 PARAMETER Experiment Name: At_Far-red-induction_P Parameter: Plant Line Value: Columbia
  misc_feature: MA Experiment 20001451 PARAMETER Experiment Name: At_Far-red-induction_P Parameter: Timepoint (hr) Value: 24
  misc_feature: MA Experiment 20001451 PARAMETER Experiment Name: At_Far-red-induction_P Parameter: Tissue Value: Whole Plant
  misc_feature: MA Experiment ID: 20001757 Result: Up-regulated in Transcription
  misc_feature: MA Experiment 20001757 PARAMETER Experiment Name: At_50mM_NH4NO3_L-to-H_P Parameter: Timepoint (hr) Value: 6
  misc_feature: MA Experiment 20001757 PARAMETER Experiment Name: At_50mM_NH4NO3_L-to-H_P Parameter: Tissue Value: Leaf
  misc_feature: MA Experiment 20001757 PARAMETER Experiment Name: At_50mM_NH4NO3_L-to-H_P Parameter: Treatment Value: 50mM NH4NO3 vs 100mM Mannitol
atcttcttcttcttcatctacctaacttaggttttatcaatctctcatttccaaccatggcttcctccgccgcccaaattcacatcctcggcggaatcggattccctacttcgtcttcttcctcctccaccaaaaacctcgacaacaaaaccaattccattccacgaagcgtcttcttcggcaacagaacaagtcctttcactactccaacctccgccttccttcgtatgggacgaagaaacaacaacgcttcccgatacaccgttggtccagtccgtgtggttaacgagaaagtcgtcggaatcgatttaggcacgacgaattcagctgttgctgctatggaaggaggtaaaccaacgattgtgactaacgctgaaggtcaaagaactacaccttctgttgtggcttatactaagagtaaagatagacttgttggtcagattgctaaacgtcaagctgttgttaatccggagaatactttcttctctgttaagaggtttattggtagaagaatgaatgaagttgctgaagagtctaagcaggtttcttatagagttattaaagatgagaatggtaatgttaagcttgattgtcctgctattggtaaacaatttgctgctgaggagatttctgctcaggttttgaggaagcttgtggatgatgcttcgagatttttgaatgataaagtaacgaaagctgtcatcactgtgcctgcttacttcaatgattcacaaaggacggctactaaagatgctggtcgtattgctggattggaagttcttaggattattaatgagcctactgctgcttctttggcttatgggtttgagaggaaaagcaatgaaactattcttgtttttgatcttggtggtggtacttttgatgtctcagtccttgaggttggtgacggtgtttttgaagtgctttcgacttctggtgatacacatttgggaggtgatgactttgacaagagagtcgttgattggcttgcttcaaccttcaagaaggatgaaggtatagatcttctcaaagacaagcaagcgcttcagaggttgacggaggcagctgaaaaagctaaaattgagctttcctcactgactcagacaaacatgagtttgccttttatcactgcaacggctgatgggcctaagcacattgaaaccactctcaccaggggcaagtttgaagaattgtgctctgacttactcgacagggtcaggacacctgtggagaattccctgagggatgcaaaactcagcttcaaagatattgatgaggtgatccttgttggtggatccacacgtatccctgctgttcaggatcttgtaaggaagctgacaggaaaagaacccaatgtctcagtcaatcctgatgaagttgtagctttaggtgctgcagttcaggccggtgttctatcaggagatgtgagtgacattgttcttcttgatgtgacgccgctatcgcttggtttggaaactcttggtggtgtcatgaccaagatcattccaagaaacaccacacttccaacttctaagtcagaagtcttctcaactgctgcagatggacagacaagcgttgagattaatgtgttacagggtgagagagagttcgtaagagataacaagtctattggtagcttccgtcttgatggtattccacctgcaccacgtggagttccacaaatcgaggtcaaattcgacattgatgccaatggaattctatctgtcagtgcttcggacaaaggtacaggaaagaagcaggacatcaccattactggtgctagtaccttaccaaaggatgaggtagacacaatggtgcaagaagcagagaggtttgcaaaggaagacaaagaaaagagagatgcgattgacacaaagaaccaggctgactccgtcgtttaccagacagagaagcagcttaaagaacttggagagaaaattccaggtccagtgaaagaaaaggttgaggctaagctccaagagctgaaggagaagatagcaagcggatcaactcaagaaatcaaagacaccatggcagctcttaaccaagaagtgatgcagattggccagtctctgtacaaccaaccccaaccaggtggtgctgattctcctcctggaggtgaagcttcctcgtcgtctgacacatcatcctcagccaaaggtggagacaacggcggtgatgtgattgacgctgacttcacagacagcaattaatacgaattggattcatacaaggattatttatggggtttgtccatgattttgtaggaatgataatgtgatttgttggc

SEQ ID NO: 96339 - protein, 736 aa, Arabidopsis thaliana
  peptide (1)..(736): Ceres Seq. ID no. 12732901
  misc_feature (98)..(693): Pfam Name: Hsp70 protein Pfam Description: Hsp70 protein
  misc_feature (19)..(735): Homolog of NCBI NO: 7441880 NR Description: dnaK-type molecular chaperone HSC70-9, - spinach >gi|2654208|gb|AAB91471.1| heat shock 70 protein oleracea] >gi|2773050|gb|AAB96659.1| heat shock 70 protein
  misc_feature (19)..(735): Homolog of NCBI NO: 7441856 NR Description: heat shock protein, 70K, chloroplast - cucumber
  misc_feature (19)..(735): Homolog of NCBI NO: 1928991 NR Description: heat shock protein 70 precursor [Citrullus
  misc_feature (19)..(735): Homolog of NCBI NO: 399942 NR Description: Stromal 70 kDa heat shock-related protein,
  misc_feature (19)..(735): Homolog of NCBI NO: 445605 NR Description: heat shock protein hsp70
  misc_feature (91)..(734): Homolog of NCBI NO: 7441862 NR Description: dnaK-type molecular chaperone hsp70b precursor,
  misc_feature (152)..(717): Homolog of NCBI NO: 1708311 NR Description: Stromal 70 kDa heat shock-related protein,
  misc_feature (97)..(686): Homolog of NCBI NO: 3121997 NR Description: Chaperone protein dnaK (Heat shock protein 70) shock 70 kDa protein) (HSP70) >gi|2073390|emb|CAA73479.1| dnaK
  misc_feature (97)..(686): Homolog of NCBI NO: 17230482 NR Description: DnaK-type molecular chaperone [Nostoc sp. PCC >gi|20141450|sp|Q9ZEJ6|DNAK_ANASP Chaperone protein dnaK (Heat
  misc_feature (97)..(665): Homolog of NCBI NO: 23040330 NR Description: hypothetical protein [Trichodesmium erythraeum
LLLLHLPNLGFINLSFPTMASSAAQIHILGGIGFPTSSSSSSTKNLDNKTNSIPRSVFFGNRTSPFTTPTSAFLRMGRRNNNASRYTVGPVRVVNEKVVGIDLGTTNSAVAAMEGGKPTIVTNAEGQRTTPSVVAYTKSKDRLVGQIAKRQAVVNPENTFFSVKRFIGRRMNEVAEESKQVSYRVIKDENGNVKLDCPAIGKQFAAEEISAQVLRKLVDDASRFLNDKVTKAVITVPAYFNDSQRTATKDAGRIAGLEVLRIINEPTAASLAYGFERKSNETILVFDLGGGTFDVSVLEVGDGVFEVLSTSGDTHLGGDDFDKRVVDWLASTFKKDEGIDLLKDKQALQRLTEAAEKAKIELSSLTQTNMSLPFITATADGPKHIETTLTRGKFEELCSDLLDRVRTPVENSLRDAKLSFKDIDEVILVGGSTRIPAVQDLVRKLTGKEPNVSVNPDEVVALGAAVQAGVLSGDVSDIVLLDVTPLSLGLETLGGVMTKIIPRNTTLPTSKSEVFSTAADGQTSVEINVLQGEREFVRDNKSIGSFRLDGIPPAPRGVPQIEVKFDIDANGILSVSASDKGTGKKQDITITGASTLPKDEVDTMVQEAERFAKEDKEKRDAIDTKNQADSVVYQTEKQLKELGEKIPGPVKEKVEAKLQELKEKIASGSTQEIKDTMAALNQEVMQIGQSLYNQPQPGGADSPPGGEASSSSDTSSSAKGGDNGGDVIDADFTDSN

SEQ ID NO: 96340 - protein, 718 aa, Arabidopsis thaliana
  peptide (1)..(718): Ceres Seq. ID no. 12732902
  misc_feature (80)..(675): Pfam Name: Hsp70 protein Pfam Description: Hsp70 protein
  misc_feature (1)..(717): Homolog of NCBI NO: 7441880 NR Description: dnaK-type molecular chaperone HSC70-9, - spinach >gi|2654208|gb|AAB91471.1| heat shock 70 protein oleracea] >gi|2773050|gb|AAB96659.1| heat shock 70 protein
  misc_feature (1)..(717): Homolog of NCBI NO: 7441856 NR Description: heat shock protein, 70K, chloroplast - cucumber
  misc_feature (1)..(717): Homolog of NCBI NO: 1928991 NR Description: heat shock protein 70 precursor [Citrullus
  misc_feature (1)..(717): Homolog of NCBI NO: 399942 NR Description: Stromal 70 kDa heat shock-related protein,
  misc_feature (1)..(717): Homolog of NCBI NO: 445605 NR Description: heat shock protein hsp70
  misc_feature (73)..(716): Homolog of NCBI NO: 7441862 NR Description: dnaK-type molecular chaperone hsp70b precursor,
  misc_feature (134)..(699): Homolog of NCBI NO: 1708311 NR Description: Stromal 70 kDa heat shock-related protein,
  misc_feature (79)..(668): Homolog of NCBI NO: 3121997 NR Description: Chaperone protein dnaK (Heat shock protein 70) shock 70 kDa protein) (HSP70) >gi|2073390|emb|CAA73479.1| dnaK
  misc_feature (79)..(668): Homolog of NCBI NO: 17230482 NR Description: DnaK-type molecular chaperone [Nostoc sp. PCC >gi|20141450|sp|Q9ZEJ6|DNAK_ANASP Chaperone protein dnaK (Heat
  misc_feature (79)..(647): Homolog of NCBI NO: 23040330 NR Description: hypothetical protein [Trichodesmium erythraeum
MASSAAQIHILGGIGFPTSSSSSSTKNLDNKTNSIPRSVFFGNRTSPFTTPTSAFLRMGRRNNNASRYTVGPVRVVNEKVVGIDLGTTNSAVAAMEGGKPTIVTNAEGQRTTPSVVAYTKSKDRLVGQIAKRQAVVNPENTFFSVKRFIGRRMNEVAEESKQVSYRVIKDENGNVKLDCPAIGKQFAAEEISAQVLRKLVDDASRFLNDKVTKAVITVPAYFNDSQRTATKDAGRIAGLEVLRIINEPTAASLAYGFERKSNETILVFDLGGGTFDVSVLEVGDGVFEVLSTSGDTHLGGDDFDKRVVDWLASTFKKDEGIDLLKDKQALQRLTEAAEKAKIELSSLTQTNMSLPFITATADGPKHIETTLTRGKFEELCSDLLDRVRTPVENSLRDAKLSFKDIDEVILVGGSTRIPAVQDLVRKLTGKEPNVSVNPDEVVALGAAVQAGVLSGDVSDIVLLDVTPLSLGLETLGGVMTKIIPRNTTLPTSKSEVFSTAADGQTSVEINVLQGEREFVRDNKSIGSFRLDGIPPAPRGVPQIEVKFDIDANGILSVSASDKGTGKKQDITITGASTLPKDEVDTMVQEAERFAKEDKEKRDAIDTKNQADSVVYQTEKQLKELGEKIPGPVKEKVEAKLQELKEKIASGSTQEIKDTMAALNQEVMQIGQSLYNQPQPGGADSPPGGEASSSSDTSSSAKGGDNGGDVIDADFTDSN

SEQ ID NO: 96341 - protein, 661 aa, Arabidopsis thaliana
  peptide (1)..(661): Ceres Seq. ID no. 12732903
  misc_feature (23)..(618): Pfam Name: Hsp70 protein Pfam Description: Hsp70 protein
  misc_feature (1)..(660): Homolog of NCBI NO: 7441880 NR Description: dnaK-type molecular chaperone HSC70-9, - spinach >gi|2654208|gb|AAB91471.1| heat shock 70 protein oleracea] >gi|2773050|gb|AAB96659.1| heat shock 70 protein
  misc_feature (1)..(660): Homolog of NCBI NO: 7441856 NR Description: heat shock protein, 70K, chloroplast - cucumber
  misc_feature (1)..(660): Homolog of NCBI NO: 1928991 NR Description: heat shock protein 70 precursor [Citrullus
  misc_feature (1)..(660): Homolog of NCBI NO: 399942 NR Description: Stromal 70 kDa heat shock-related protein,
  misc_feature (1)..(660): Homolog of NCBI NO: 445605 NR Description: heat shock protein hsp70
  misc_feature (16)..(659): Homolog of NCBI NO: 7441862 NR Description: dnaK-type molecular chaperone hsp70b precursor,
  misc_feature (77)..(642): Homolog of NCBI NO: 1708311 NR Description: Stromal 70 kDa heat shock-related protein,
  misc_feature (22)..(611): Homolog of NCBI NO: 3121997 NR Description: Chaperone protein dnaK (Heat shock protein 70) shock 70 kDa protein) (HSP70) >gi|2073390|emb|CAA73479.1| dnaK
  misc_feature (22)..(611): Homolog of NCBI NO: 17230482 NR Description: DnaK-type molecular chaperone [Nostoc sp. PCC >gi|20141450|sp|Q9ZEJ6|DNAK_ANASP Chaperone protein dnaK (Heat
  misc_feature (22)..(590): Homolog of NCBI NO: 23040330 NR Description: hypothetical protein [Trichodesmium erythraeum
MGRRNNNASRYTVGPVRVVNEKVVGIDLGTTNSAVAAMEGGKPTIVTNAEGQRTTPSVVAYTKSKDRLVGQIAKRQAVVNPENTFFSVKRFIGRRMNEVAEESKQVSYRVIKDENGNVKLDCPAIGKQFAAEEISAQVLRKLVDDASRFLNDKVTKAVITVPAYFNDSQRTATKDAGRIAGLEVLRIINEPTAASLAYGFERKSNETILVFDLGGGTFDVSVLEVGDGVFEVLSTSGDTHLGGDDFDKRVVDWLASTFKKDEGIDLLKDKQALQRLTEAAEKAKIELSSLTQTNMSLPFITATADGPKHIETTLTRGKFEELCSDLLDRVRTPVENSLRDAKLSFKDIDEVILVGGSTRIPAVQDLVRKLTGKEPNVSVNPDEVVALGAAVQAGVLSGDVSDIVLLDVTPLSLGLETLGGVMTKIIPRNTTLPTSKSEVFSTAADGQTSVEINVLQGEREFVRDNKSIGSFRLDGIPPAPRGVPQIEVKFDIDANGILSVSASDKGTGKKQDITITGASTLPKDEVDTMVQEAERFAKEDKEKRDAIDTKNQADSVVYQTEKQLKELGEKIPGPVKEKVEAKLQELKEKIASGSTQEIKDTMAALNQEVMQIGQSLYNQPQPGGADSPPGGEASSSSDTSSSAKGGDNGGDVIDADFTDSN

SEQ ID NO: 96342 - DNA, 1167 bp, Arabidopsis thaliana
  misc_feature (1)..(1167): Ceres Seq. ID no. 12732919
  misc_feature: MA Experiment ID: 20000185 Result: Up-regulated in Transcription
  misc_feature: MA Experiment 20000185 PARAMETER Experiment Name: At_Roots__P Parameter: Age (day) Value: 7 vs. 21
  misc_feature: MA Experiment 20000185 PARAMETER Experiment Name: At_Roots__P Parameter: Organism Value: A. thaliana
  misc_feature: MA Experiment 20000185 PARAMETER Experiment Name: At_Roots__P Parameter: Tissue Value: Roots vs. Whole Plant
  misc_feature: MA Experiment ID: 20000437 Result: Up-regulated in Transcription
  misc_feature: MA Experiment 20000437 PARAMETER Experiment Name: At_Drought_P Parameter: Age (day) Value: 8
  misc_feature: MA Experiment 20000437 PARAMETER Experiment Name: At_Drought_P Parameter: Organism Value: A. thaliana
  misc_feature: MA Experiment 20000437 PARAMETER Experiment Name: At_Drought_P Parameter: Plant Line Value: WS
  misc_feature: MA Experiment 20000437 PARAMETER Experiment Name: At_Drought_P Parameter: Timepoint (hr) Value: 24
  misc_feature: MA Experiment 20000437 PARAMETER Experiment Name: At_Drought_P Parameter: Tissue Value: Whole Plant
  misc_feature: MA Experiment 20000437 PARAMETER Experiment Name: At_Drought_P Parameter: Treatment Value: Drought vs. No Drought
  misc_feature: MA Experiment ID: 20000439 Result: Up-regulated in Transcription
  misc_feature: MA Experiment 20000439 PARAMETER Experiment Name: At_Roots__P Parameter: Age (day) Value: 14 vs. 21
  misc_feature: MA Experiment 20000439 PARAMETER Experiment Name: At_Roots__P Parameter: Organism Value: A. thaliana
  misc_feature: MA Experiment 20000439 PARAMETER Experiment Name: At_Roots__P Parameter: Tissue Value: Roots vs. Whole Plant
atgatacaatttcaagaatccgaagaagaaccagatttttctcaagaagatcatctaacatcttcttctcaaccacttcatcaatgtattgccactcttgtatgtcacacagcatcctacatttcatctctaactcttgcaggaaagagactttacacaggctccaacgacggggttgttagattatggaatgcaaacacgttggaaacattagccgaagcatcaagcaacggcgatgtaataacaggggagagaggaggtggaggagcagtgaaatctttggtaatcttggctgataaactctttacagcacaccaagatcataagatacgtgtgtggaagataaacgacgtcgttgaagaagacgtgggtggtaaaaagtacatgcatttagcgacgatgccaacgattagcgatcgttttgcaaagtgtttgatgccaaagaaccaagttgaaataaggaggcataagaaagcttcatgggttcaccatgtagacgcggtttcgggtttagccttatcaagagatggaacactactctactctgtctcatgggacaggacgcttaaaatctggcgaaccaccgattttaaatgcctagagtcattcacaaacgcccacgatgatgcaatcaatgcggttgcattatccgaaaatggtgatatatatacaggatcttctgaccaaagaatcaaagtgtggaggaagaacatcaatgaagagaatgtaaagaagaagaggaaacattctttagttgcaatattgtcagaacataattcaggtattaacgcattggcattgagcggtactaatggctctcttttgcattccggtggatctgatggatcgatattggtgtgggaacgtgacgatggtggagacattgtagttgttggaatgcttagaggtcacacagagtctgttctatgcctcgcggttgtttcggacatactttgtagtggctcagcagataagacagtgaggttgtggaaatgttcagccaaggattattcatgcttggctatgttagagggacatttaggaccggttaagtgcttgacaggggcatttcgtgattcgcgtaaagcagatgaggcttcttatcatatttatagtggaggactagactctcaagttaaggtttggcaggttttggtgccggcctaa

SEQ ID NO: 96343 - protein, 388 aa, Arabidopsis thaliana
  peptide (1)..(388): Ceres Seq. ID no. 12732920
  misc_feature (1)..(388): Homolog of NCBI NO: 15240616 NR Description: G-protein beta family; protein id: At5g50120.1
  misc_feature (11)..(386): Homolog of NCBI NO: 15221675 NR Description: G-protein beta family; protein id: At1g24130.1
  misc_feature (79)..(386): Homolog of NCBI NO: 18395507 NR Description: G-protein beta family; protein id: At1g24530.1, by cDNA: gi_19310648 [Arabidopsis thaliana] F21J9.19 [Arabidopsis thaliana] >gi|15028341|gb|AAK76647.1|
  misc_feature (89)..(384): Homolog of NCBI NO: 15225317 NR Description: G-protein beta family; protein id: At2g26490.1
  misc_feature (40)..(384): Homolog of NCBI NO: 15230244 NR Description: hypothetical protein; protein id: At3g18950.1
  misc_feature (34)..(384): Homolog of NCBI NO: 15222143 NR Description: En/Spm-like transposon protein, putative; protein At1g49450.1, supported by cDNA: gi_17979258 [Arabidopsis >gi|25405310|pir||B96531 hypothetical protein F13F21.11
  misc_feature (34)..(384): Homolog of NCBI NO: 17979259 NR Description: At1g49450/F13F21_11 [Arabidopsis thaliana]
  misc_feature (40)..(384): Homolog of NCBI NO: 15229740 NR Description: G-protein beta family; protein id: At3g50390.1
  misc_feature (40)..(384): Homolog of NCBI NO: 15220271 NR Description: G-protein beta family; protein id: At1g47610.1
  misc_feature (19)..(384): Homolog of NCBI NO: 15231088 NR Description: G-protein beta family; protein id: At3g51930.1
MIQFQESEEEPDFSQEDHLTSSSQPLHQCIATLVCHTASYISSLTLAGKRLYTGSNDGVVRLWNANTLETLAEASSNGDVITGERGGGGAVKSLVILADKLFTAHQDHKIRVWKINDVVEEDVGGKKYMHLATMPTISDRFAKCLMPKNQVEIRRHKKASWVHHVDAVSGLALSRDGTLLYSVSWDRTLKIWRTTDFKCLESFTNAHDDAINAVALSENGDIYTGSSDQRIKVWRKNINEENVKKKRKHSLVAILSEHNSGINALALSGTNGSLLHSGGSDGSILVWERDDGGDIVVVGMLRGHTESVLCLAVVSDILCSGSADKTVRLWKCSAKDYSCLAMLEGHLGPVKCLTGAFRDSRKADEASYHIYSGGLDSQVKVWQVLVPA

SEQ ID NO: 96344 - protein, 260 aa, Arabidopsis thaliana
  peptide (1)..(260): Ceres Seq. ID no. 12732921
  misc_feature (1)..(260): Homolog of NCBI NO: 15240616 NR Description: G-protein beta family; protein id: At5g50120.1
  misc_feature (1)..(258): Homolog of NCBI NO: 15221675 NR Description: G-protein beta family; protein id: At1g24130.1
  misc_feature (1)..(258): Homolog of NCBI NO: 18395507 NR Description: G-protein beta family; protein id: At1g24530.1, by cDNA: gi_19310648 [Arabidopsis thaliana] F21J9.19 [Arabidopsis thaliana] >gi|15028341|gb|AAK76647.1|
  misc_feature (1)..(256): Homolog of NCBI NO: 15225317 NR Description: G-protein beta family; protein id: At2g26490.1
  misc_feature (1)..(256): Homolog of NCBI NO: 15230244 NR Description: hypothetical protein; protein id: At3g18950.1
  misc_feature (1)..(256): Homolog of NCBI NO: 15222143 NR Description: En/Spm-like transposon protein, putative; protein At1g49450.1, supported by cDNA: gi_17979258 [Arabidopsis >gi|25405310|pir||B96531 hypothetical protein F13F21.11
  misc_feature (1)..(256): Homolog of NCBI NO: 17979259 NR Description: At1g49450/F13F21_11 [Arabidopsis thaliana]
  misc_feature (1)..(256): Homolog of NCBI NO: 15229740 NR Description: G-protein beta family; protein id: At3g50390.1
  misc_feature (1)..(256): Homolog of NCBI NO: 15220271 NR Description: G-protein beta family; protein id: At1g47610.1
  misc_feature (1)..(256): Homolog of NCBI NO: 15231088 NR Description: G-protein beta family; protein id: At3g51930.1
MHLATMPTISDRFAKCLMPKNQVEIRRHKKASWVHHVDAVSGLALSRDGTLLYSVSWDRTLKIWRTTDFKCLESFTNAHDDAINAVALSENGDIYTGSSDQRIKVWRKNINEENVKKKRKHSLVAILSEHNSGINALALSGTNGSLLHSGGSDGSILVWERDDGGDIVVVGMLRGHTESVLCLAVVSDILCSGSADKTVRLWKCSAKDYSCLAMLEGHLGPVKCLTGAFRDSRKADEASYHIYSGGLDSQVKVWQVLVPA

SEQ ID NO: 96345 - protein, 255 aa, Arabidopsis thaliana
  peptide (1)..(255): Ceres Seq. ID no. 12732922
  misc_feature (1)..(255): Homolog of NCBI NO: 15240616 NR Description: G-protein beta family; protein id: At5g50120.1
  misc_feature (1)..(253): Homolog of NCBI NO: 15221675 NR Description: G-protein beta family; protein id: At1g24130.1
  misc_feature (1)..(253): Homolog of NCBI NO: 18395507 NR Description: G-protein beta family; protein id: At1g24530.1, by cDNA: gi_19310648 [Arabidopsis thaliana] F21J9.19 [Arabidopsis thaliana] >gi|15028341|gb|AAK76647.1|
  misc_feature (1)..(251): Homolog of NCBI NO: 15225317 NR Description: G-protein beta family; protein id: At2g26490.1
  misc_feature (1)..(251): Homolog of NCBI NO: 15230244 NR Description: hypothetical protein; protein id: At3g18950.1
  misc_feature (1)..(251): Homolog of NCBI NO: 15222143 NR Description: En/Spm-like transposon protein, putative; protein At1g49450.1, supported by cDNA: gi_17979258 [Arabidopsis >gi|25405310|pir||B96531 hypothetical protein F13F21.11
  misc_feature (1)..(251): Homolog of NCBI NO: 17979259 NR Description: At1g49450/F13F21_11 [Arabidopsis thaliana]
  misc_feature (1)..(251): Homolog of NCBI NO: 15229740 NR Description: G-protein beta family; protein id: At3g50390.1
  misc_feature (1)..(251): Homolog of NCBI NO: 15220271 NR Description: G-protein beta family; protein id: At1g47610.1
  misc_feature (1)..(251): Homolog of NCBI NO: 15231088 NR Description: G-protein beta family; protein id: At3g51930.1
MPTISDRFAKCLMPKNQVEIRRHKKASWVHHVDAVSGLALSRDGTLLYSVSWDRTLKIWRTTDFKCLESFTNAHDDAINAVALSENGDIYTGSSDQRIKVWRKNINEENVKKKRKHSLVAILSEHNSGINALALSGTNGSLLHSGGSDGSILVWERDDGGDIVVVGMLRGHTESVLCLAVVSDILCSGSADKTVRLWKCSAKDYSCLAMLEGHLGPVKCLTGAFRDSRKADEASYHIYSGGLDSQVKVWQVLVPA

SEQ ID NO: 96346 - DNA, 1806 bp, Arabidopsis thaliana
  misc_feature (1)..(1806): Ceres Seq. ID no. 12732937
  misc_feature: MA Experiment ID: 20000286 Result: Up-regulated in Transcription
  misc_feature: MA Experiment 20000286 PARAMETER Experiment Name: At_Open_Flower_P Parameter: Age (day) Value: 21
  misc_feature: MA Experiment 20000286 PARAMETER Experiment Name: At_Open_Flower_P Parameter: Plant Line Value: WS
  misc_feature: MA Experiment 20000286 PARAMETER Experiment Name: At_Open_Flower_P Parameter: Tissue Value: Half Open vs. Whole Plant
acgcacaattaaatatatattcaaagaagaaacgtgcctttaatccaaatatcgttagttatcacttctatatcagcatacatggccaaggagaagcaaccgctgatggaggatctagaacaaggaatacagctaagtacgagggagaatgaaaccggatctggtaaagtgggtagatggagcgaaggatttcgtgatccattggtttctaaacacggaacagctgagaaagcaaagattgtttctgtcacgactaaaccgtataaaccggattcttgctatgaatctgagatttccggtatatggccttcttcgtttagcaaagagtattgttgcatctatagagtacctaaccggttaaggagagttaatccagaggcatacactcctcagatgcttctcatcggtccacttcaacattctaagaaagctaatgcccttgagctttccaaaaccgatttaagatatttggactatatgaacatggagcttcacaagaagaagtaccttaatgctattgcaaataaatatggggatcaaattatcgaagttttcaaggagatcatagaaacaagtgagaaattcgttagagaaagctacgccgagtcaacggactggatcaaacctcaagatttcgttgatatgatccttctcgactcggtgttcatactaggggtctttattcaggctgaaactactcaaaacatcaagaagaaagaagaaattcttttccatgaagaagatattattttccaggagccttgtctcataaccactattttagaagacctaatcttactcgagaaccaactcccttatgtccttttagagaaactctctaaaccttttttcgcaaatcttaaaaccaaggaaactttccgtgacattatccttcgagcttttaggttgaaaggagagatcaaagaaggaacgaatttccgtcattttacagatttgttcagacgtgtccgtgtggaaacactttgtttgacaaaagaacaaatcaaaagcgcaaaggataagccaccggagatcataaagagtctgcacaacgcagacaaactagacagtgctggagtggattttgtgcgtctggaaagaaaaaacgatttatcgttggtgataactttcgaacgcggaatcttggaaataccttgtttcttagcggacgacaacaccgagaggattatgaggaacttaatggccctcgagcaatgtcattaccctctcactgcttatgtttgtaactacatagctttcttggattttcttatcgacaccgaccaagacgttgacttgctcgtcaagaaaggagttataaagaactggttaggacatcaagcatcggtggcggaaatggtaaacaagctgtgtttagggcttgtggattttggatctcactattacggtatagccgatagactcaacaaacactacgaaagccgtcgcaatagatccatagccacactccggcgagtttactttaaagatctttggaccggaactgccaccattgccgccgccgttatcctcgtgttgactttgattgggacggttgcttccgtactccaggtgacgcagaaggataataattctccaccgcctccggctatgttccgaggaccgtagattgtctcttgttatatacgaaacaaacaatagttgttttttttctccaatgtttaatttggttttctctttgctcgactttgttccacaaataatgcttctttttcatattttctttatttagtccatcatggctaacgtcatcttttgattatgtatcttcaagttaaaattctc

SEQ ID NO: 96347 - protein, 515 aa, Arabidopsis thaliana
  peptide (1)..(515): Ceres Seq. ID no. 12732938
  misc_feature (79)..(488): Pfam Name: Plant protein of unknown function Pfam Description: Plant protein of unknown function
  misc_feature (1)..(515): Homolog of NCBI NO: 18406666 NR Description: expressed protein; protein id: At2g44930.1, by cDNA: gi_15810320, supported by cDNA: gi_20465590 [Arabidopsis >gi|15810321|gb|AAL07048.1| unknown protein [Arabidopsis
  misc_feature (1)..(497): Homolog of NCBI NO: 7486946 NR Description: hypothetical protein At2g44930 [imported] -
  misc_feature (68)..(514): Homolog of NCBI NO: 15226899 NR Description: hypothetical protein; protein id: At2g28580.1
  misc_feature (61)..(301): Homolog of NCBI NO: 15232337 NR Description: putative protein; protein id: At3g60470.1
  misc_feature (278)..(501): Homolog of NCBI NO: 15232337 NR Description: putative protein; protein id: At3g60470.1
  misc_feature (85)..(369): Homolog of NCBI NO: 17979379 NR Description: unknown protein [Arabidopsis thaliana]
  misc_feature (326)..(497): Homolog of NCBI NO: 17979379 NR Description: unknown protein [Arabidopsis thaliana]
  misc_feature (85)..(369): Homolog of NCBI NO: 22330443 NR Description: Expressed protein; protein id: At1g65985.1, by cDNA: gi_17979378 [Arabidopsis thaliana]
  misc_feature (326)..(497): Homolog of NCBI NO: 22330443 NR Description: Expressed protein; protein id: At1g65985.1, by cDNA: gi_17979378 [Arabidopsis thaliana]
  misc_feature (85)..(497): Homolog of NCBI NO: 15220363 NR Description: hypothetical protein; protein id: At1g67150.1
MAKEKQPLMEDLEQGIQLSTRENETGSGKVGRWSEGFRDPLVSKHGTAEKAKIVSVTTKPYKPDSCYESEISGIWPSSFSKEYCCIYRVPNRLRRVNPEAYTPQMLLIGPLQHSKKANALELSKTDLRYLDYMNMELHKKKYLNAIANKYGDQIIEVFKEIIETSEKFVRESYAESTDWIKPQDFVDMILLDSVFILGVFIQAETTQNIKKKEEILFHEEDIIFQEPCLITTILEDLILLENQLPYVLLEKLSKPFFANLKTKETFRDIILRAFRLKGEIKEGTNFRHFTDLFRRVRVETLCLTKEQIKSAKDKPPEIIKSLHNADKLDSAGVDFVRLERKNDLSLVITFERGILEIPCFLADDNTERIMRNLMALEQCHYPLTAYVCNYIAFLDFLIDTDQDVDLLVKKGVIKNWLGHQASVAEMVNKLCLGLVDFGSHYYGIADRLNKHYESRRNRSIATLRRVYFKDLWTGTATIAAAVILVLTLIGTVASVLQVTQKDNNSPPPPAMFRGP

SEQ ID NO: 96348 - protein, 507 aa, Arabidopsis thaliana
  peptide (1)..(507): Ceres Seq. ID no. 12732939
  misc_feature (71)..(480): Pfam Name: Plant protein of unknown function Pfam Description: Plant protein of unknown function
  misc_feature (1)..(507): Homolog of NCBI NO: 18406666 NR Description: expressed protein; protein id: At2g44930.1, by cDNA: gi_15810320, supported by cDNA: gi_20465590 [Arabidopsis >gi|15810321|gb|AAL07048.1| unknown protein [Arabidopsis
  misc_feature (1)..(489): Homolog of NCBI NO: 7486946 NR Description: hypothetical protein At2g44930 [imported] -
  misc_feature (60)..(506): Homolog of NCBI NO: 15226899 NR Description: hypothetical protein; protein id: At2g28580.1
  misc_feature (53)..(293): Homolog of NCBI NO: 15232337 NR Description: putative protein; protein id: At3g60470.1
  misc_feature (270)..(493): Homolog of NCBI NO: 15232337 NR Description: putative protein; protein id: At3g60470.1
  misc_feature (77)..(361): Homolog of NCBI NO: 17979379 NR Description: unknown protein [Arabidopsis thaliana]
  misc_feature (318)..(489): Homolog of NCBI NO: 17979379 NR Description: unknown protein [Arabidopsis thaliana]
  misc_feature (77)..(361): Homolog of NCBI NO: 22330443 NR Description: Expressed protein; protein id: At1g65985.1, by cDNA: gi_17979378 [Arabidopsis thaliana]
  misc_feature (318)..(489): Homolog of NCBI NO: 22330443 NR Description: Expressed protein; protein id: At1g65985.1, by cDNA: gi_17979378 [Arabidopsis thaliana]
  misc_feature (77)..(489): Homolog of NCBI NO: 15220363 NR Description: hypothetical protein; protein id: At1g67150.1
MEDLEQGIQLSTRENETGSGKVGRWSEGFRDPLVSKHGTAEKAKIVSVTTKPYKPDSCYESEISGIWPSSFSKEYCCIYRVPNRLRRVNPEAYTPQMLLIGPLQHSKKANALELSKTDLRYLDYMNMELHKKKYLNAIANKYGDQIIEVFKEIIETSEKFVRESYAESTDWIKPQDFVDMILLDSVFILGVFIQAETTQNIKKKEEILFHEEDIIFQEPCLITTILEDLILLENQLPYVLLEKLSKPFFANLKTKETFRDIILRAFRLKGEIKEGTNFRHFTDLFRRVRVETLCLTKEQIKSAKDKPPEIIKSLHNADKLDSAGVDFVRLERKNDLSLVITFERGILEIPCFLADDNTERIMRNLMALEQCHYPLTAYVCNYIAFLDFLIDTDQDVDLLVKKGVIKNWLGHQASVAEMVNKLCLGLVDFGSHYYGIADRLNKHYESRRNRSIATLRRVYFKDLWTGTATIAAAVILVLTLIGTVASVLQVTQKDNNSPPPPAMFRGP

SEQ ID NO: 96349 - protein, 411 aa, Arabidopsis thaliana
  peptide (1)..(411): Ceres Seq. ID no. 12732940
  misc_feature (1)..(384): Pfam Name: Plant protein of unknown function Pfam Description: Plant protein of unknown function
  misc_feature (1)..(411): Homolog of NCBI NO: 18406666 NR Description: expressed protein; protein id: At2g44930.1, by cDNA: gi_15810320, supported by cDNA: gi_20465590 [Arabidopsis >gi|15810321|gb|AAL07048.1| unknown protein [Arabidopsis
  misc_feature (1)..(393): Homolog of NCBI NO: 7486946 NR Description: hypothetical protein At2g44930 [imported] -
  misc_feature (1)..(410): Homolog of NCBI NO: 15226899 NR Description: hypothetical protein; protein id: At2g28580.1
  misc_feature (1)..(197): Homolog of NCBI NO: 15232337 NR Description: putative protein; protein id: At3g60470.1
  misc_feature (174)..(397): Homolog of NCBI NO: 15232337 NR Description: putative protein; protein id: At3g60470.1
  misc_feature (1)..(265): Homolog of NCBI NO: 17979379 NR Description: unknown protein [Arabidopsis thaliana]
  misc_feature (222)..(393): Homolog of NCBI NO: 17979379 NR Description: unknown protein [Arabidopsis thaliana]
  misc_feature (1)..(265): Homolog of NCBI NO: 22330443 NR Description: Expressed protein; protein id: At1g65985.1, by cDNA: gi_17979378 [Arabidopsis thaliana]
  misc_feature (222)..(393): Homolog of NCBI NO: 22330443 NR Description: Expressed protein; protein id: At1g65985.1, by cDNA: gi_17979378 [Arabidopsis thaliana]
  misc_feature (1)..(393): Homolog of NCBI NO: 15220363 NR Description: hypothetical protein; protein id: At1g67150.1
MLLIGPLQHSKKANALELSKTDLRYLDYMNMELHKKKYLNAIANKYGDQIIEVFKEIIETSEKFVRESYAESTDWIKPQDFVDMILLDSVFILGVFIQAETTQNIKKKEEILFHEEDIIFQEPCLITTILEDLILLENQLPYVLLEKLSKPFFANLKTKETFRDIILRAFRLKGEIKEGTNFRHFTDLFRRVRVETLCLTKEQIKSAKDKPPEIIKSLHNADKLDSAGVDFVRLERKNDLSLVITFERGILEIPCFLADDNTERIMRNLMALEQCHYPLTAYVCNYIAFLDFLIDTDQDVDLLVKKGVIKNWLGHQASVAEMVNKLCLGLVDFGSHYYGIADRLNKHYESRRNRSIATLRRVYFKDLWTGTATIAAAVILVLTLIGTVASVLQVTQKDNNSPPPPAMFRGP

SEQ ID NO: 96350 - DNA, 1030 bp, Arabidopsis thaliana
  misc_feature (1)..(1030): Ceres Seq. ID no. 12732944
  misc_feature: MA Experiment ID: 20000180 Result: Up-regulated in Transcription
  misc_feature: MA Experiment 20000180 PARAMETER Experiment Name: At_Germinating_Seeds_P Parameter: Age (hr) Value: 24 vs. 0
  misc_feature: MA Experiment 20000180 PARAMETER Experiment Name: At_Germinating_Seeds_P Parameter: Tissue Value: Germinating Seeds
  misc_feature: MA Experiment ID: 20000184 Result: Up-regulated in Transcription
  misc_feature: MA Experiment 20000184 PARAMETER Experiment Name: At_Shoots__P Parameter: Age (day) Value: 7
  misc_feature: MA Experiment 20000184 PARAMETER Experiment Name: At_Shoots__P Parameter: Tissue Value: Shoots vs. Whole Plant
  misc_feature: MA Experiment ID: 20000185 Result: Up-regulated in Transcription
  misc_feature: MA Experiment 20000185 PARAMETER Experiment Name: At_Roots__P Parameter: Age (day) Value: 7 vs. 21
  misc_feature: MA Experiment 20000185 PARAMETER Experiment Name: At_Roots__P Parameter: Organism Value: A. thaliana
  misc_feature: MA Experiment 20000185 PARAMETER Experiment Name: At_Roots__P Parameter: Tissue Value: Roots vs. Whole Plant
  misc_feature: MA Experiment ID: 20000227 Result: Up-regulated in Transcription
  misc_feature: MA Experiment 20000227 PARAMETER Experiment Name: At_Root-Tips-vs-Tops_P Parameter: Tissue Value: Root Tips vs. Root Tops
  misc_feature: MA Experiment ID: 20000265 Result: Up-regulated in Transcription
  misc_feature: MA Experiment 20000265 PARAMETER Experiment Name: At_Open_Flower_P Parameter: Age (day) Value: 21
  misc_feature: MA Experiment 20000265 PARAMETER Experiment Name: At_Open_Flower_P Parameter: Plant Line Value: WS
  misc_feature: MA Experiment 20000265 PARAMETER Experiment Name: At_Open_Flower_P Parameter: Tissue Value: Closed Flower vs. Whole Plant
  misc_feature: MA Experiment ID: 20000438 Result: Up-regulated in Transcription
  misc_feature: MA Experiment 20000438 PARAMETER Experiment Name: At_Shoots__P Parameter: Age (day) Value: 14
  misc_feature: MA Experiment 20000438 PARAMETER Experiment Name: At_Shoots__P Parameter: Tissue Value: Shoots vs. Whole Plant
  misc_feature: MA Experiment ID: 20000439 Result: Up-regulated in Transcription
  misc_feature: MA Experiment 20000439 PARAMETER Experiment Name: At_Roots__P Parameter: Age (day) Value: 14 vs. 21
  misc_feature: MA Experiment 20000439 PARAMETER Experiment Name: At_Roots__P Parameter: Organism Value: A. thaliana
  misc_feature: MA Experiment 20000439 PARAMETER Experiment Name: At_Roots__P Parameter: Tissue Value: Roots vs. Whole Plant
  misc_feature: MA Experiment ID: 20000495 Result: Up-regulated in Transcription
  misc_feature: MA Experiment 20000495 PARAMETER Experiment Name: At_Guard_Cells_P Parameter: Harvest Date Value: 8/2/2002
  misc_feature: MA Experiment 20000495 PARAMETER Experiment Name: At_Guard_Cells_P Parameter: Organism Value: A. thaliana
  misc_feature: MA Experiment 20000495 PARAMETER Experiment Name: At_Guard_Cells_P Parameter: Tissue Value: Guard Cells vs. Leaves
  misc_feature: MA Experiment ID: 20000576 Result: Up-regulated in Transcription
  misc_feature: MA Experiment 20000576 PARAMETER Experiment Name: At_100uM_ABA_Mutants__P Parameter: Organism Value: A. thaliana
  misc_feature: MA Experiment 20000576 PARAMETER Experiment Name: At_100uM_ABA_Mutants__P Parameter: Plant Line Value: CS23
  misc_feature: MA Experiment 20000576 PARAMETER Experiment Name: At_100uM_ABA_Mutants__P Parameter: Timepoint (hr) Value: 6
  misc_feature: MA Experiment 20000576 PARAMETER Experiment Name: At_100uM_ABA_Mutants__P Parameter: Tissue Value: Whole Plant
  misc_feature: MA Experiment 20000576 PARAMETER Experiment Name: At_100uM_ABA_Mutants__P Parameter: Treatment Value: 1uM ABA vs. No Treatment
  misc_feature: MA Experiment ID: 20001247 Result: Up-regulated in Transcription
  misc_feature: MA Experiment 20001247 PARAMETER Experiment Name: At_Far-red-induction_P Parameter: Age (day) Value: 7
  misc_feature: MA Experiment 20001247 PARAMETER Experiment Name: At_Far-red-induction_P Parameter: Light Value: Far-red vs. White
  misc_feature: MA Experiment 20001247 PARAMETER Experiment Name: At_Far-red-induction_P Parameter: Organism Value: A. thaliana
  misc_feature: MA Experiment 20001247 PARAMETER Experiment Name: At_Far-red-induction_P Parameter: Plant Line Value: Columbia
  misc_feature: MA Experiment 20001247 PARAMETER Experiment Name: At_Far-red-induction_P Parameter: Timepoint (hr) Value: 1
  misc_feature: MA Experiment 20001247 PARAMETER Experiment Name: At_Far-red-induction_P Parameter: Tissue Value: Whole Plant
  misc_feature: MA Experiment ID: 20001248 Result: Up-regulated in Transcription
  misc_feature: MA Experiment 20001248 PARAMETER Experiment Name: At_Far-red-induction_P Parameter: Age (day) Value: 7
  misc_feature: MA Experiment 20001248 PARAMETER Experiment Name: At_Far-red-induction_P Parameter: Light Value: Far-red vs. White
  misc_feature: MA Experiment 20001248 PARAMETER Experiment Name: At_Far-red-induction_P Parameter: Organism Value: A. thaliana
  misc_feature: MA Experiment 20001248 PARAMETER Experiment Name: At_Far-red-induction_P Parameter: Plant Line Value: Columbia
  misc_feature: MA Experiment 20001248 PARAMETER Experiment Name: At_Far-red-induction_P Parameter: Timepoint (hr) Value: 4
  misc_feature: MA Experiment 20001248 PARAMETER Experiment Name: At_Far-red-induction_P Parameter: Tissue Value: Whole Plant
  misc_feature: MA Experiment ID: 20001450 Result: Up-regulated in Transcription
  misc_feature: MA Experiment 20001450 PARAMETER Experiment Name: At_Far-red-induction_P Parameter: Age (day) Value: 7
  misc_feature: MA Experiment 20001450 PARAMETER Experiment Name: At_Far-red-induction_P Parameter: Light Value: Far-red vs. White
  misc_feature: MA Experiment 20001450 PARAMETER Experiment Name: At_Far-red-induction_P Parameter: Organism Value: A. thaliana
  misc_feature: MA Experiment 20001450 PARAMETER Experiment Name: At_Far-red-induction_P Parameter: Plant Line Value: Columbia
  misc_feature: MA Experiment 20001450 PARAMETER Experiment Name: At_Far-red-induction_P Parameter: Timepoint (hr) Value: 8
  misc_feature: MA Experiment 20001450 PARAMETER Experiment Name: At_Far-red-induction_P Parameter: Tissue Value: Whole Plant
  misc_feature: MA Experiment ID: 20001451 Result: Up-regulated in Transcription
  misc_feature: MA Experiment 20001451 PARAMETER Experiment Name: At_Far-red-induction_P Parameter: Age (day) Value: 7
  misc_feature: MA Experiment 20001451 PARAMETER Experiment Name: At_Far-red-induction_P Parameter: Light Value: Far-red vs. White
  misc_feature: MA Experiment 20001451 PARAMETER Experiment Name: At_Far-red-induction_P Parameter: Organism Value: A. thaliana
  misc_feature: MA Experiment 20001451 PARAMETER Experiment Name: At_Far-red-induction_P Parameter: Plant Line Value: Columbia
  misc_feature: MA Experiment 20001451 PARAMETER Experiment Name: At_Far-red-induction_P Parameter: Timepoint (hr) Value: 24
  misc_feature: MA Experiment 20001451 PARAMETER Experiment Name: At_Far-red-induction_P Parameter: Tissue Value: Whole Plant
  misc_feature: MA Experiment ID: 20001911 Result: Down-regulated in Transcription
  misc_feature: MA Experiment 20001911 PARAMETER Experiment Name: At_Drought_Reproduction_P Parameter: Age (day) Value: 40
  misc_feature: MA Experiment 20001911 PARAMETER Experiment Name: At_Drought_Reproduction_P Parameter: Organism Value: A. thaliana
  misc_feature: MA Experiment 20001911 PARAMETER Experiment Name: At_Drought_Reproduction_P Parameter: Plant Line Value: WS
  misc_feature: MA Experiment 20001911 PARAMETER Experiment Name: At_Drought_Reproduction_P Parameter: Timepoint (day) Value: 10
  misc_feature: MA Experiment 20001911 PARAMETER Experiment Name: At_Drought_Reproduction_P Parameter: Tissue Value: Flowers
  misc_feature: MA Experiment 20001911 PARAMETER Experiment Name: At_Drought_Reproduction_P Parameter: Treatment Value: Drought vs. No Drought
caagagagaacaataccactcaatcataatctataacaatggacgtctatggcttatcttcaccagacttacttcgaatcgacgaccttcttgatttctccaacgaagacatcttctccgcttcttcttccggtggttccaccgccgctacttcctcttcttctttccctcctcctcaaaaccctagtttccaccaccaccatctcccttcctccgccgatcatcactccttcctccacgacatttgcgttcccagtgatgacgcagctcatcttgaatggctttcgcaattcgtggacgattctttcgctgattttccggcgaatccattaggaggaactatgacttctgtcaaaactgaaacttcctttccggggaaaccaagaagcaaacgatcaagagctcctgctcctttcgccggaacatggtctccgatgccactggaatccgagcatcagcagcttcactccgccgccaaattcaagccaaagaaagaacaatccggcggaggaggaggaggaggaggaagacatcagtcatcgtcatcggagactacggaaggaggaggaatgaggagatgtactcactgtgcatcggagaaaacgccacagtggaggacaggaccacttggacctaaaacactatgtaacgcttgtggagtccggtttaaatccggtagacttgtaccggaatatagaccggcttcgagtcctacttttgttttgactcagcattcaaactctcaccggaaagtgatggagcttcgacggcagaaagaagttatgagacaaccacaacaagttcaacttcatcaccaccaccacccgttttagttttcacttttcactgcctcgtccgtcgtcactcttttttttgtttttctttttggttcttggggttgggttttgggtaacgtcacgtgatgatgacgtgtcgcgatcctagcggcgttaatcacgtgaccgacgacgacgggagcctaaaatttttagtgaacgttggaaaatcaaacctcatttaattgttaatt

SEQ ID NO: 96351 - protein, 264 aa, Arabidopsis thaliana
  peptide (1)..(264): Ceres Seq. ID no. 12732945
  misc_feature (1)..(264): Homolog of NCBI NO: 15225399 NR Description: GATA zinc finger protein; protein id: At2g45050.1
  misc_feature (1)..(261): Homolog of NCBI NO: 37572447 NR Description: AG-motif binding protein-3 [Nicotiana tabacum]
  misc_feature (95)..(249): Homolog of NCBI NO: 37536778 NR Description: putative transcription factor [Oryza sativa
  misc_feature (10)..(94): Homolog of NCBI NO: 37536778 NR Description: putative transcription factor [Oryza sativa
  misc_feature (90)..(247): Homolog of NCBI NO: 15232355 NR Description: GATA zinc finger protein; protein id: supported by cDNA: gi_14190406, supported by cDNA: gi_14517394, by cDNA: gi_15215890 [Arabidopsis thaliana]
  misc_feature (1)..(173): Homolog of NCBI NO: 15232355 NR Description: GATA zinc finger protein; protein id: supported by cDNA: gi_14190406, supported by cDNA: gi_14517394, by cDNA: gi_15215890 [Arabidopsis thaliana]
  misc_feature (1)..(170): Homolog of NCBI NO: 15239343 NR Description: GATA zinc finger protein; protein id: At5g66320.1
  misc_feature (164)..(247): Homolog of NCBI NO: 15239343 NR Description: GATA zinc finger protein; protein id: At5g66320.1
  misc_feature (3)..(93): Homolog of NCBI NO: 37572449 NR Description: AG-motif binding protein-4 [Nicotiana tabacum]
  misc_feature (172)..(247): Homolog of NCBI NO: 37572449 NR Description: AG-motif binding protein-4 [Nicotiana tabacum]
MDVYGLSSPDLLRIDDLLDFSNEDIFSASSSGGSTAATSSSSFPPPQNPSFHHHHLPSSADHHSFLHDICVPSDDAAHLEWLSQFVDDSFADFPANPLGGTMTSVKTETSFPGKPRSKRSRAPAPFAGTWSPMPLESEHQQLHSAAKFKPKKEQSGGGGGGGGRHQSSSSETTEGGGMRRCTHCASEKTPQWRTGPLGPKTLCNACGVRFKSGRLVPEYRPASSPTFVLTQHSNSHRKVMELRRQKEVMRQPQQVQLHHHHHPF

SEQ ID NO: 96352 - protein, 163 aa, Arabidopsis thaliana; identical to SEQ ID NO: 85496
  peptide (1)..(163): Ceres Seq. ID no. 12732946
  misc_feature (1)..(163): Homolog of NCBI NO: 15225399 NR Description: GATA zinc finger protein; protein id: At2g45050.1
  misc_feature (1)..(160): Homolog of NCBI NO: 37572447 NR Description: AG-motif binding protein-3 [Nicotiana tabacum]
  misc_feature (1)..(148): Homolog of NCBI NO: 37536778 NR Description: putative transcription factor [Oryza sativa
  misc_feature (1)..(146): Homolog of NCBI NO: 15232355 NR Description: GATA zinc finger protein; protein id: supported by cDNA: gi_14190406, supported by cDNA: gi_14517394, by cDNA: gi_15215890 [Arabidopsis thaliana]
  misc_feature (1)..(72): Homolog of NCBI NO: 15232355 NR Description: GATA zinc finger protein; protein id: supported by cDNA: gi_14190406, supported by cDNA: gi_14517394, by cDNA: gi_15215890 [Arabidopsis thaliana]
  misc_feature (1)..(69): Homolog of NCBI NO: 15239343 NR Description: GATA zinc finger protein; protein id: At5g66320.1
  misc_feature (63)..(146): Homolog of NCBI NO: 15239343 NR Description: GATA zinc finger protein; protein id: At5g66320.1
  misc_feature (71)..(146): Homolog of NCBI NO: 37572449 NR Description: AG-motif binding protein-4 [Nicotiana tabacum]
  misc_feature (1)..(163): Homolog of NCBI NO: 15239503 NR Description: GATA zinc finger protein; protein id: At5g25830.1
  misc_feature (1)..(147): Homolog of NCBI NO: 15233971 NR Description: GATA zinc finger protein; protein id: At4g32890.1

SEQ ID NO: 96353 - protein, 132 aa, Arabidopsis thaliana; identical to SEQ ID NO: 85497
  peptide (1)..(132): Ceres Seq. ID no. 12732947
  misc_feature (1)..(132): Homolog of NCBI NO: 15225399 NR Description: GATA zinc finger protein; protein id: At2g45050.1
  misc_feature (1)..(129): Homolog of NCBI NO: 37572447 NR Description: AG-motif binding protein-3 [Nicotiana tabacum]
  misc_feature (1)..(117): Homolog of NCBI NO: 37536778 NR Description: putative transcription factor [Oryza sativa
  misc_feature (1)..(115): Homolog of NCBI NO: 15232355 NR Description: GATA zinc finger protein; protein id: supported by cDNA: gi_14190406, supported by cDNA: gi_14517394, by cDNA: gi_15215890 [Arabidopsis thaliana]
  misc_feature (1)..(41): Homolog of NCBI NO: 15232355 NR Description: GATA zinc finger protein; protein id: supported by cDNA: gi_14190406, supported by cDNA: gi_14517394, by cDNA: gi_15215890 [Arabidopsis thaliana]
  misc_feature (1)..(38): Homolog of NCBI NO: 15239343 NR Description: GATA zinc finger protein; protein id: At5g66320.1
  misc_feature (32)..(115): Homolog of NCBI NO: 15239343 NR Description: GATA zinc finger protein; protein id: At5g66320.1
  misc_feature (40)..(115): Homolog of NCBI NO: 37572449 NR Description: AG-motif binding protein-4 [Nicotiana tabacum]
  misc_feature (1)..(132): Homolog of NCBI NO: 15239503 NR Description: GATA zinc finger protein; protein id: At5g25830.1
  misc_feature (1)..(116): Homolog of NCBI NO: 15233971 NR Description: GATA zinc finger protein; protein id: At4g32890.1

SEQ ID NO: 96354 - DNA, 1774 bp, Arabidopsis thaliana
  misc_feature (1)..(1774): Ceres Seq. ID no. 12732964
  misc_feature: MA Experiment ID: 20000169 Result: Up-regulated in Transcription
  misc_feature: MA Experiment 20000169 PARAMETER Experiment Name: At_100uM_ABA_P Parameter: Age (day) Value: 14
  misc_feature: MA Experiment 20000169 PARAMETER Experiment Name: At_100uM_ABA_P Parameter: Organism Value: A. thaliana
  misc_feature: MA Experiment 20000169 PARAMETER Experiment Name: At_100uM_ABA_P Parameter: Plant Line Value: WS
  misc_feature: MA Experiment 20000169 PARAMETER Experiment Name: At_100uM_ABA_P Parameter: Timepoint (hr) Value: 6
  misc_feature: MA Experiment 20000169 PARAMETER Experiment Name: At_100uM_ABA_P Parameter: Tissue Value: Aerial
  misc_feature: MA Experiment 20000169 PARAMETER Experiment Name: At_100uM_ABA_P Parameter: Treatment Value: 100uM ABA vs. No Treatment
  misc_feature: MA Experiment ID: 20000171 Result: Up-regulated in Transcription
  misc_feature: MA Experiment 20000171 PARAMETER Experiment Name: At_42deg_Heat_P Parameter: Age (day) Value: 14
  misc_feature: MA Experiment 20000171 PARAMETER Experiment Name: At_42deg_Heat_P Parameter: Organism Value: A. thaliana
  misc_feature: MA Experiment 20000171 PARAMETER Experiment Name: At_42deg_Heat_P Parameter: Plant Line Value: WS
  misc_feature: MA Experiment 20000171 PARAMETER Experiment Name: At_42deg_Heat_P Parameter: Temperature (deg C) Value: 42 vs. 22
  misc_feature: MA Experiment 20000171 PARAMETER Experiment Name: At_42deg_Heat_P Parameter: Timepoint (hr) Value: 1
  misc_feature: MA Experiment 20000171 PARAMETER Experiment Name: At_42deg_Heat_P Parameter: Tissue Value: Aerial
  misc_feature: MA Experiment ID: 20000182 Result: Up-regulated in Transcription
  misc_feature: MA Experiment 20000182 PARAMETER Experiment Name: At_2mM_SA_P Parameter: Age (day) Value: 14
  misc_feature: MA Experiment 20000182 PARAMETER Experiment Name: At_2mM_SA_P Parameter: Organism Value: A. thaliana
  misc_feature: MA Experiment 20000182 PARAMETER Experiment Name: At_2mM_SA_P Parameter: Plant Line Value: WS
  misc_feature: MA Experiment 20000182 PARAMETER Experiment Name: At_2mM_SA_P Parameter: Timepoint (hr) Value: 6
  misc_feature: MA Experiment 20000182 PARAMETER Experiment Name: At_2mM_SA_P Parameter: Tissue Value: Aerial
  misc_feature: MA Experiment 20000182 PARAMETER Experiment Name: At_2mM_SA_P Parameter: Treatment Value: 2mM SA vs. No Treatment
  misc_feature: MA Experiment ID: 20000184 Result: Down-regulated in Transcription
  misc_feature: MA Experiment 20000184 PARAMETER Experiment Name: At_Shoots__P Parameter: Age (day) Value: 7
  misc_feature: MA Experiment 20000184 PARAMETER Experiment Name: At_Shoots__P Parameter: Tissue Value: Shoots vs. Whole Plant
  misc_feature: MA Experiment ID: 20000234 Result: Down-regulated in Transcription
  misc_feature: MA Experiment 20000234 PARAMETER Experiment Name: At_Siliques_P Parameter: Age (day) Value: 21
  misc_feature: MA Experiment 20000234 PARAMETER Experiment Name: At_Siliques_P Parameter: Organism Value: A. thaliana
  misc_feature: MA Experiment 20000234 PARAMETER Experiment Name: At_Siliques_P Parameter: Plant Line Value: WS
  misc_feature: MA Experiment 20000234 PARAMETER Experiment Name: At_Siliques_P Parameter: Tissue Value: Less Than 5mm Siliques vs. Whole Plant
  misc_feature: MA Experiment ID: 20000235 Result: Down-regulated in Transcription
  misc_feature: MA Experiment 20000235 PARAMETER Experiment Name: At_Siliques_P Parameter: Age (day) Value: 21
  misc_feature: MA Experiment 20000235 PARAMETER Experiment Name: At_Siliques_P Parameter: Organism Value: A. thaliana
  misc_feature: MA Experiment 20000235 PARAMETER Experiment Name: At_Siliques_P Parameter: Plant Line Value: WS
  misc_feature: MA Experiment 20000235 PARAMETER Experiment Name: At_Siliques_P Parameter: Tissue Value: 5-10mm Siliques vs. Whole Plant
  misc_feature: MA Experiment ID: 20000264 Result: Down-regulated in Transcription
  misc_feature: MA Experiment 20000264 PARAMETER Experiment Name: At_Open_Flower_P Parameter: Age (day) Value: 21
  misc_feature: MA Experiment 20000264 PARAMETER Experiment Name: At_Open_Flower_P Parameter: Plant Line Value: WS
  misc_feature: MA Experiment 20000264 PARAMETER Experiment Name: At_Open_Flower_P Parameter: Tissue Value: Open Flower vs. Whole Plant
  misc_feature: MA Experiment ID: 20000265 Result: Down-regulated in Transcription
  misc_feature: MA Experiment 20000265 PARAMETER Experiment Name: At_Open_Flower_P Parameter: Age (day) Value: 21
  misc_feature: MA Experiment 20000265 PARAMETER Experiment Name: At_Open_Flower_P Parameter: Plant Line Value: WS
  misc_feature: MA Experiment 20000265 PARAMETER Experiment Name: At_Open_Flower_P Parameter: Tissue Value: Closed Flower vs. Whole Plant
  misc_feature: MA Experiment ID: 20000286 Result: Down-regulated in Transcription
  misc_feature: MA Experiment 20000286 PARAMETER Experiment Name: At_Open_Flower_P Parameter: Age (day) Value: 21
  misc_feature: MA Experiment 20000286 PARAMETER Experiment Name: At_Open_Flower_P Parameter: Plant Line Value: WS
  misc_feature: MA Experiment 20000286 PARAMETER Experiment Name: At_Open_Flower_P Parameter: Tissue Value: Half Open vs. Whole Plant
  misc_feature: MA Experiment ID: 20000438 Result: Down-regulated in Transcription
  misc_feature: MA Experiment 20000438 PARAMETER Experiment Name: At_Shoots__P Parameter: Age (day) Value: 14
  misc_feature: MA Experiment 20000438 PARAMETER Experiment Name: At_Shoots__P Parameter: Tissue Value: Shoots vs. Whole Plant
  misc_feature: MA Experiment ID: 20000453 Result: Up-regulated in Transcription
  misc_feature: MA Experiment 20000453 PARAMETER Experiment Name: At_100uM_ABA_P Parameter: Age (day) Value: 15
  misc_feature: MA Experiment 20000453 PARAMETER Experiment Name: At_100uM_ABA_P Parameter: Organism Value: A. thaliana
  misc_feature: MA Experiment 20000453 PARAMETER Experiment Name: At_100uM_ABA_P Parameter: Plant Line Value: WS
  misc_feature: MA Experiment 20000453 PARAMETER Experiment Name: At_100uM_ABA_P Parameter: Timepoint (hr) Value: 24
  misc_feature: MA Experiment 20000453 PARAMETER Experiment Name: At_100uM_ABA_P Parameter: Tissue Value: Aerial
  misc_feature: MA Experiment 20000453 PARAMETER Experiment Name: At_100uM_ABA_P Parameter: Treatment Value: 100uM ABA vs. No Treatment
  misc_feature: MA Experiment ID: 20000455 Result: Up-regulated in Transcription
  misc_feature: MA Experiment 20000455 PARAMETER Experiment Name: At_100uM_ABA_P Parameter: Age (day) Value: 16
  misc_feature: MA Experiment 20000455 PARAMETER Experiment Name: At_100uM_ABA_P Parameter: Organism Value: A. thaliana
  misc_feature: MA Experiment 20000455 PARAMETER Experiment Name: At_100uM_ABA_P Parameter: Plant Line Value: WS
  misc_feature: MA Experiment 20000455 PARAMETER Experiment Name: At_100uM_ABA_P Parameter: Timepoint (hr) Value: 48
  misc_feature: MA Experiment 20000455 PARAMETER Experiment Name: At_100uM_ABA_P Parameter: Tissue Value: Aerial
  misc_feature: MA Experiment 20000455 PARAMETER Experiment Name: At_100uM_ABA_P Parameter: Treatment Value: 100uM ABA vs. No Treatment
  misc_feature: MA Experiment ID: 20000495 Result: Down-regulated in Transcription
  misc_feature: MA Experiment 20000495 PARAMETER Experiment Name: At_Guard_Cells_P Parameter: Harvest Date Value: 8/2/2002
  misc_feature: MA Experiment 20000495 PARAMETER Experiment Name: At_Guard_Cells_P Parameter: Organism Value: A. thaliana
  misc_feature: MA Experiment 20000495 PARAMETER Experiment Name: At_Guard_Cells_P Parameter: Tissue Value: Guard Cells vs. Leaves
  misc_feature: MA Experiment ID: 20000527 Result: Down-regulated in Transcription
  misc_feature: MA Experiment 20000527 PARAMETER Experiment Name: At_10percent_PEG_P Parameter: Age (day) Value: 20
  misc_feature: MA Experiment 20000527 PARAMETER Experiment Name: At_10percent_PEG_P Parameter: Organism Value: A. thaliana
  misc_feature: MA Experiment 20000527 PARAMETER Experiment Name: At_10percent_PEG_P Parameter: Plant Line Value: WS
  misc_feature: MA Experiment 20000527 PARAMETER Experiment Name: At_10percent_PEG_P Parameter: Timepoint (day) Value: 20
  misc_feature: MA Experiment 20000527 PARAMETER Experiment Name: At_10percent_PEG_P Parameter: Tissue Value: Whole Plant
  misc_feature: MA Experiment 20000527 PARAMETER Experiment Name: At_10percent_PEG_P Parameter: Treatment Value: 10percent PEG vs. No Treatment
  misc_feature: MA Experiment ID: 20000794 Result: Down-regulated in Transcription
  misc_feature: MA Experiment 20000794 PARAMETER Experiment Name: At_Petals_P Parameter: Age (day) Value: 23-25 days
  misc_feature: MA Experiment 20000794 PARAMETER Experiment Name: At_Petals_P Parameter: Plant Line Value: WS
  misc_feature: MA Experiment 20000794 PARAMETER Experiment Name: At_Petals_P Parameter: Tissue Value: Petals vs. Whole plant
  misc_feature: MA Experiment ID: 20001458 Result: Down-regulated in Transcription
  misc_feature: MA Experiment 20001458 PARAMETER Experiment Name: At_50mM_NH4NO3_L-to-H_P Parameter: Age (day) Value: Undefined
  misc_feature: MA Experiment 20001458 PARAMETER Experiment Name: At_50mM_NH4NO3_L-to-H_P Parameter: Organism Value: Undefined
  misc_feature: MA Experiment 20001458 PARAMETER Experiment Name: At_50mM_NH4NO3_L-to-H_P Parameter: Plant Line Value: Undefined
  misc_feature: MA Experiment 20001458 PARAMETER Experiment Name: At_50mM_NH4NO3_L-to-H_P Parameter: Timepoint (hr) Value: 2
  misc_feature: MA Experiment 20001458 PARAMETER Experiment Name: At_50mM_NH4NO3_L-to-H_P Parameter: Tissue Value: Siliques
  misc_feature: MA Experiment 20001458 PARAMETER Experiment Name: At_50mM_NH4NO3_L-to-H_P Parameter: Treatment Value: 50mM NH4NO3 vs. 100mM Manitol
  misc_feature: MA Experiment ID: 20001560 Result: Down-regulated in Transcription
  misc_feature: MA Experiment 20001560 PARAMETER Experiment Name: At_Drought_Soil_Dry_P Parameter: Age (day) Value: 28
  misc_feature: MA Experiment 20001560 PARAMETER Experiment Name: At_Drought_Soil_Dry_P Parameter: Organism Value: A. thaliana
  misc_feature: MA Experiment 20001560 PARAMETER Experiment Name: At_Drought_Soil_Dry_P Parameter: Plant Line Value: WS
  misc_feature: MA Experiment 20001560 PARAMETER Experiment Name: At_Drought_Soil_Dry_P Parameter: Post Timepoint (hr) Value: None
  misc_feature: MA Experiment 20001560 PARAMETER Experiment Name: At_Drought_Soil_Dry_P Parameter: Post-Treatment Value: None
  misc_feature: MA Experiment 20001560 PARAMETER Experiment Name: At_Drought_Soil_Dry_P Parameter: Timepoint (day) Value: 14
  misc_feature: MA Experiment 20001560 PARAMETER Experiment Name: At_Drought_Soil_Dry_P Parameter: Treatment Value: Drought vs. No Drought
  misc_feature: MA Experiment ID: 20001757 Result: Up-regulated in Transcription
  misc_feature: MA Experiment 20001757 PARAMETER Experiment Name: At_50mM_NH4NO3_L-to-H_P Parameter: Timepoint (hr) Value: 6
  misc_feature: MA Experiment 20001757 PARAMETER Experiment Name: At_50mM_NH4NO3_L-to-H_P Parameter: Tissue Value: Leaf
  misc_feature: MA Experiment 20001757 PARAMETER Experiment Name: At_50mM_NH4NO3_L-to-H_P Parameter: Treatment Value: 50mM NH4NO3 vs 100mM Mannitol
  misc_feature: MA Experiment ID: 20001905 Result: Up-regulated in Transcription
  misc_feature: MA Experiment 20001905 PARAMETER Experiment Name: At_Drought_Reproduction_P Parameter: Age (day) Value: 40
  misc_feature: MA Experiment 20001905 PARAMETER Experiment Name: At_Drought_Reproduction_P Parameter: Organism Value: A. thaliana
  misc_feature: MA Experiment 20001905 PARAMETER Experiment Name: At_Drought_Reproduction_P Parameter: Plant Line Value: WS
  misc_feature: MA Experiment 20001905 PARAMETER Experiment Name: At_Drought_Reproduction_P Parameter: Timepoint (day) Value: 10
  misc_feature: MA Experiment 20001905 PARAMETER Experiment Name: At_Drought_Reproduction_P Parameter: Tissue Value: Rosettes
  misc_feature: MA Experiment 20001905 PARAMETER Experiment Name: At_Drought_Reproduction_P Parameter: Treatment Value: Drought vs. No Drought
  misc_feature: MA Experiment ID: 20001908 Result: Down-regulated in Transcription
  misc_feature: MA Experiment 20001908 PARAMETER Experiment Name: At_Drought_Reproduction_P Parameter: Age (day) Value: 40
  misc_feature: MA Experiment 20001908 PARAMETER Experiment Name: At_Drought_Reproduction_P Parameter: Organism Value: A. thaliana
  misc_feature: MA Experiment 20001908 PARAMETER Experiment Name: At_Drought_Reproduction_P Parameter: Plant Line Value: WS
  misc_feature: MA Experiment 20001908 PARAMETER Experiment Name: At_Drought_Reproduction_P Parameter: Timepoint (day) Value: 10
  misc_feature: MA Experiment 20001908 PARAMETER Experiment Name: At_Drought_Reproduction_P Parameter: Tissue Value: Siliques
  misc_feature: MA Experiment 20001908 PARAMETER Experiment Name: At_Drought_Reproduction_P Parameter: Treatment Value: Drought vs. No Drought
atcaatcaaaatcttcaaacacaaacttctcgtttctcaaaacatttggtcttatgatggcttttcgagcttatattattaactttgtgatcttatgcattctcgtggcatcgaccgtttccgggtacaaccagaaagacgtgaaagcatggtgcagccaaactccaaaccctaaaccttgcgagtatttcttaacccataactcaaacaatgaacccataaagtctgaatccgagtttctcaaaatctcaatgaaactcgtattagaccgagccatcctcgccaaaacccacgcgttcacactaggaccaaagtgccgtgacacacgtgaaaaagcagcgtgggaagattgtatcaagctctacgacctcaccgtctctaaaatcaacgagacaatggacccaaacgtgaagtgctcaaaactcgacgcgcaaacatggctaagcacggctctaaccaatcttgacacatgtcgagctgggttcttagagcttggtgttaccgatattgtccttcctttgatgtcaaacaacgtctcgaatcttctatgcaacacactcgccattaacaaagttcctttcaactacaccccacccgagaaagacgggttcccttcgtgggtcaaacctggtgaccggaaacttttgcaaagctcgacgccaaaagataacgcagtggtggcgaaagacggatctggcaattttaagacgataaaagaagcgattgatgctgcttcggggagtggtaggttcgttatatatgtgaagcaaggcgtttacagtgagaaccttgagattcggaaaaagaatgtcatgttgagaggtgatggtatagggaagacgattattaccggaagcaaaagtgttggaggaggaacgacaacctttaactcagctactgtcgcggcggtcggagacgggtttatagctcgtgggatcacgtttcgaaacacggcgggtgcaagcaacgaacaagcggtagctctaagatccgggtcggatctgtcagttttttaccaatgcagtttcgaagcttaccaagacacactctacgttcactccaaccgtcagttttaccgcgattgcgacgtttatggaactgtcgattttatcttcggaaacgcagccgcggttctccagaactgcaacattttcgcacgtcgtcctcgtagtaagaccaacacaatcacagctcaaggaagatccgacccgaatcaaaacacggggattattatccacaactctcgggtcacggccgcttcggatcttcgacccgttttgggatccacaaagacttatttgggtagaccttggagacaatattctaggacggtttttatgaagacttctcttgatagtttgattgatccacgtggctggctcgagtgggatggtaatttcgctttgaagactttgttctatgctgagtttcaaaatacgggtccgggtgcttcaacttcgggtcgggtcacatggccagggtttcgggtccttggttctgcttcagaggcttccaagtttactgttggtactttcctcgccggtggctcttggattccatctagcgtgccgttcacttctggtctctagtgaatatatggtatgatgcaaagttgtatatacaacgcaattgattcgtctattacaaagaataaatattgtttgttacattatagaaactattgtataattttatgtattacaatcatttatgcaatttcatttttctgtaaagatattgtattctttctcatctgaaatataatgtcatatga

SEQ ID NO: 96355 - protein, 528 aa, Arabidopsis thaliana
  peptide (1)..(528): Ceres Seq. ID no. 12732965
  misc_feature (223)..(516): Pfam Name: Pectinesterase Pfam Description: Pectinesterase
  misc_feature (18)..(528): Homolog of NCBI NO: 18406733 NR Description: pectinesterase family; protein id: At2g45220.1, by cDNA: gi_13605695 [Arabidopsis thaliana] At2g45220/F4L23.27 [Arabidopsis thaliana]
  misc_feature (19)..(528): Homolog of NCBI NO: 25313433 NR Description: probable pectinesterase [imported] - Arabidopsis
  misc_feature (19)..(528): Homolog of NCBI NO: 6174914 NR Description: Pectinesterase 2.1 precursor (Pectin
  misc_feature (19)..(528): Homolog of NCBI NO: 7447381 NR Description: pectinesterase (EC 3.1.1.11) PECS-c2 - sweet
  misc_feature (51)..(528): Homolog of NCBI NO: 15236734 NR Description: pectinesterase family; protein id: At4g00190.1
  misc_feature (24)..(528): Homolog of NCBI NO: 15242109 NR Description: pectinesterase family; protein id: At5g51490.1 thaliana] >gi|9758191|dbj|BAB08665.1| pectinesterase [Arabidopsis
  misc_feature (137)..(528): Homolog of NCBI NO: 15242110 NR Description: pectinesterase family; protein id: At5g51500.1 thaliana] >gi|9758192|dbj|BAB08666.1| pectinesterase [Arabidopsis
  misc_feature (201)..(528): Homolog of NCBI NO: 2098711 NR Description: pectinesterase [Citrus sinensis]
  misc_feature (201)..(528): Homolog of NCBI NO: 6174912 NR Description: Pectinesterase 1.1 precursor (Pectin
  misc_feature (114)..(528): Homolog of NCBI NO: 15232793 NR Description: pectinesterase-like protein; protein id: [Arabidopsis thaliana] >gi|7447382|pir||T12995 pectinesterase
QSKSSNTNFSFLKTFGLMMAFRAYIINFVILCILVASTVSGYNQKDVKAWCSQTPNPKPCEYFLTHNSNNEPIKSESEFLKISMKLVLDRAILAKTHAFTLGPKCRDTREKAAWEDCIKLYDLTVSKINETMDPNVKCSKLDAQTWLSTALTNLDTCRAGFLELGVTDIVLPLMSNNVSNLLCNTLAINKVPFNYTPPEKDGFPSWVKPGDRKLLQSSTPKDNAVVAKDGSGNFKTIKEAIDAASGSGRFVIYVKQGVYSENLEIRKKNVMLRGDGIGKTIITGSKSVGGGTTTFNSATVAAVGDGFIARGITFRNTAGASNEQAVALRSGSDLSVFYQCSFEAYQDTLYVHSNRQFYRDCDVYGTVDFIFGNAAAVLQNCNIFARRPRSKTNTITAQGRSDPNQNTGIIIHNSRVTAASDLRPVLGSTKTYLGRPWRQYSRTVFMKTSLDSLIDPRGWLEWDGNFALKTLFYAEFQNTGPGASTSGRVTWPGFRVLGSASEASKFTVGTFLAGGSWIPSSVPFTSGL

SEQ ID NO: 96356 - protein, 511 aa, Arabidopsis thaliana
  peptide (1)..(511): Ceres Seq. ID no. 12732966
  misc_feature (206)..(499): Pfam Name: Pectinesterase Pfam Description: Pectinesterase
  misc_feature (1)..(511): Homolog of NCBI NO: 18406733 NR Description: pectinesterase family; protein id: At2g45220.1, by cDNA: gi_13605695 [Arabidopsis thaliana] At2g45220/F4L23.27 [Arabidopsis thaliana]
  misc_feature (2)..(511): Homolog of NCBI NO: 25313433 NR Description: probable pectinesterase [imported] - Arabidopsis
  misc_feature (2)..(511): Homolog of NCBI NO: 6174914 NR Description: Pectinesterase 2.1 precursor (Pectin
  misc_feature (2)..(511): Homolog of NCBI NO: 7447381 NR Description: pectinesterase (EC 3.1.1.11) PECS-c2 - sweet
  misc_feature (34)..(511): Homolog of NCBI NO: 15236734 NR Description: pectinesterase family; protein id: At4g00190.1
  misc_feature (7)..(511): Homolog of NCBI NO: 15242109 NR Description: pectinesterase family; protein id: At5g51490.1 thaliana] >gi|9758191|dbj|BAB08665.1| pectinesterase [Arabidopsis
  misc_feature (120)..(511): Homolog of NCBI NO: 15242110 NR Description: pectinesterase family; protein id: At5g51500.1 thaliana] >gi|9758192|dbj|BAB08666.1| pectinesterase [Arabidopsis
  misc_feature (184)..(511): Homolog of NCBI NO: 2098711 NR Description: pectinesterase [Citrus sinensis]
  misc_feature (184)..(511): Homolog of NCBI NO: 6174912 NR Description: Pectinesterase 1.1 precursor (Pectin
  misc_feature (97)..(511): Homolog of NCBI NO: 15232793 NR Description: pectinesterase-like protein; protein id: [Arabidopsis thaliana] >gi|7447382|pir||T12995 pectinesterase
MMAFRAYIINFVILCILVASTVSGYNQKDVKAWCSQTPNPKPCEYFLTHNSNNEPIKSESEFLKISMKLVLDRAILAKTHAFTLGPKCRDTREKAAWEDCIKLYDLTVSKINETMDPNVKCSKLDAQTWLSTALTNLDTCRAGFLELGVTDIVLPLMSNNVSNLLCNTLAINKVPFNYTPPEKDGFPSWVKPGDRKLLQSSTPKDNAVVAKDGSGNFKTIKEAIDAASGSGRFVIYVKQGVYSENLEIRKKNVMLRGDGIGKTIITGSKSVGGGTTTFNSATVAAVGDGFIARGITFRNTAGASNEQAVALRSGSDLSVFYQCSFEAYQDTLYVHSNRQFYRDCDVYGTVDFIFGNAAAVLQNCNIFARRPRSKTNTITAQGRSDPNQNTGIIIHNSRVTAASDLRPVLGSTKTYLGRPWRQYSRTVFMKTSLDSLIDPRGWLEWDGNFALKTLFYAEFQNTGPGASTSGRVTWPGFRVLGSASEASKFTVGTFLAGGSWIPSSVPFTSGL

SEQ ID NO: 96357 - protein, 510 aa, Arabidopsis thaliana
  peptide (1)..(510): Ceres Seq. ID no. 12732967
  misc_feature (205)..(498): Pfam Name: Pectinesterase Pfam Description: Pectinesterase
  misc_feature (1)..(510): Homolog of NCBI NO: 18406733 NR Description: pectinesterase family; protein id: At2g45220.1, by cDNA: gi_13605695 [Arabidopsis thaliana] At2g45220/F4L23.27 [Arabidopsis thaliana]
  misc_feature (1)..(510): Homolog of NCBI NO: 25313433 NR Description: probable pectinesterase [imported] - Arabidopsis
  misc_feature (1)..(510): Homolog of NCBI NO: 6174914 NR Description: Pectinesterase 2.1 precursor (Pectin
  misc_feature (1)..(510): Homolog of NCBI NO: 7447381 NR Description: pectinesterase (EC 3.1.1.11) PECS-c2 - sweet
  misc_feature (33)..(510): Homolog of NCBI NO: 15236734 NR Description: pectinesterase family; protein id: At4g00190.1
  misc_feature (6)..(510): Homolog of NCBI NO: 15242109 NR Description: pectinesterase family; protein id: At5g51490.1 thaliana] >gi|9758191|dbj|BAB08665.1| pectinesterase [Arabidopsis
  misc_feature (119)..(510): Homolog of NCBI NO: 15242110 NR Description: pectinesterase family; protein id: At5g51500.1 thaliana] >gi|9758192|dbj|BAB08666.1| pectinesterase [Arabidopsis
  misc_feature (183)..(510): Homolog of NCBI NO: 2098711 NR Description: pectinesterase [Citrus sinensis]
  misc_feature (183)..(510): Homolog of NCBI NO: 6174912 NR Description: Pectinesterase 1.1 precursor (Pectin
  misc_feature (96)..(510): Homolog of NCBI NO: 15232793 NR Description: pectinesterase-like protein; protein id: [Arabidopsis thaliana] >gi|7447382|pir||T12995 pectinesterase
MAFRAYIINFVILCILVASTVSGYNQKDVKAWCSQTPNPKPCEYFLTHNSNNEPIKSESEFLKISMKLVLDRAILAKTHAFTLGPKCRDTREKAAWEDCIKLYDLTVSKINETMDPNVKCSKLDAQTWLSTALTNLDTCRAGFLELGVTDIVLPLMSNNVSNLLCNTLAINKVPFNYTPPEKDGFPSWVKPGDRKLLQSSTPKDNAVVAKDGSGNFKTIKEAIDAASGSGRFVIYVKQGVYSENLEIRKKNVMLRGDGIGKTIITGSKSVGGGTTTFNSATVAAVGDGFIARGITFRNTAGASNEQAVALRSGSDLSVFYQCSFEAYQDTLYVHSNRQFYRDCDVYGTVDFIFGNAAAVLQNCNIFARRPRSKTNTITAQGRSDPNQNTGIIIHNSRVTAASDLRPVLGSTKTYLGRPWRQYSRTVFMKTSLDSLIDPRGWLEWDGNFALKTLFYAEFQNTGPGASTSGRVTWPGFRVLGSASEASKFTVGTFLAGGSWIPSSVPFTSGL

SEQ ID NO: 96358 - DNA, 954 bp, Arabidopsis thaliana
  misc_feature (1)..(954): Ceres Seq. ID no. 12733000
  misc_feature: MA Experiment ID: 20000184 Result: Up-regulated in Transcription
  misc_feature: MA Experiment 20000184 PARAMETER Experiment Name: At_Shoots__P Parameter: Age (day) Value: 7
  misc_feature: MA Experiment 20000184 PARAMETER Experiment Name: At_Shoots__P Parameter: Tissue Value: Shoots vs. Whole Plant
  misc_feature: MA Experiment ID: 20000438 Result: Up-regulated in Transcription
  misc_feature: MA Experiment 20000438 PARAMETER Experiment Name: At_Shoots__P Parameter: Age (day) Value: 14
  misc_feature: MA Experiment 20000438 PARAMETER Experiment Name: At_Shoots__P Parameter: Tissue Value: Shoots vs. Whole Plant
  misc_feature: MA Experiment ID: 20000439 Result: Up-regulated in Transcription
  misc_feature: MA Experiment 20000439 PARAMETER Experiment Name: At_Roots__P Parameter: Age (day) Value: 14 vs. 21
  misc_feature: MA Experiment 20000439 PARAMETER Experiment Name: At_Roots__P Parameter: Organism Value: A. thaliana
  misc_feature: MA Experiment 20000439 PARAMETER Experiment Name: At_Roots__P Parameter: Tissue Value: Roots vs. Whole Plant
atggatcaggtctctcgctctcttcctccaccttttctctcaagagatctccatcttcacccacaccatcaattccagcatcagcagcagcagcagcaacagaatcacggccacgatatagaccagcaccgaatcggtgggctaaaacgtgaccgagatgctgatatcgatcccaacgagcactcttcagccggaaaagatcaaagtactcctggctccggtggagaaagcggcggcggaggaggaggagataatcacatcacgagaaggccacgtggcagaccagcgggatctaagaacaaaccaaaaccgccaatcatcatcactcgagacagcgcaaacgctctcaaatctcatgtcatggaagtagcaaacggatgtgacgtcatggaaagtgtcaccgtcttcgctcgccgtcgccaacgtggcatctgcgttttgagcggaaacggcgccgttaccaacgttaccataagacaaccagcttcagtacctggtggtggctcatctgtcgttaacttacacggacgtttcgagattctttctctctcgggatcattccttcctcctccggctccaccagctgcgtcaggtctaacgatttacttagccggtggtcagggacaggttgttggaggaagcgtggttggtccactcatggcttcaggacctgtagtgattatggcagcttcgtttggaaacgctgcgtatgagagactgccgttggaggaagacgatcaagaagagcaaacagctggagcggttgctaataatatcgatggaaacgcaacaatgggtggtggaacgcaaacgcaaactcagacgcagcagcaacagcaacaacagttgatgcaagatccgacgtcgtttatacaagggttgcctccgaatcttatgaattctgttcaattgccagctgaagcttattggggaactccgagaccatctttctaa

SEQ ID NO: 96359 - protein, 317 aa, Arabidopsis thaliana
  peptide (1)..(317): Ceres Seq. ID no. 12733001
  misc_feature (1)..(317): Homolog of NCBI NO: 15225475 NR Description: putative AT-hook DNA-binding protein; protein id:
  misc_feature (7)..(317): Homolog of NCBI NO: 15235815 NR Description: putative DNA binding protein; protein id:
  misc_feature (19)..(317): Homolog of NCBI NO: 15234404 NR Description: putative DNA-binding protein; protein id:
  misc_feature (38)..(317): Homolog of NCBI NO: 15232970 NR Description: putative protein; protein id: At3g60870.1
  misc_feature (18)..(267): Homolog of NCBI NO: 38346718 NR Description: OSJNBa0086O06.16 [Oryza sativa (japonica
  misc_feature (55)..(297): Homolog of NCBI NO: 15236657 NR Description: hypothetical protein; protein id: At4g17800.1, by cDNA: gi_17933298, supported by cDNA: gi_20453386 [Arabidopsis
  misc_feature (59)..(268): Homolog of NCBI NO: 15226945 NR Description: putative AT-hook DNA-binding protein; protein id:
  misc_feature (65)..(267): Homolog of NCBI NO: 34905212 NR Description: P0672D01.8 [Oryza sativa (japonica
  misc_feature (88)..(269): Homolog of NCBI NO: 18396925 NR Description: expressed protein; protein id: At3g04570.1, by cDNA: 15781. [Arabidopsis thaliana] hypothetical protein [Arabidopsis thaliana]
  misc_feature (17)..(248): Homolog of NCBI NO: 15218067 NR Description: putative DNA-binding protein; protein id:
MDQVSRSLPPPFLSRDLHLHPHHQFQHQQQQQQQNHGHDIDQHRIGGLKRDRDADIDPNEHSSAGKDQSTPGSGGESGGGGGGDNHITRRPRGRPAGSKNKPKPPIIITRDSANALKSHVMEVANGCDVMESVTVFARRRQRGICVLSGNGAVTNVTIRQPASVPGGGSSVVNLHGRFEILSLSGSFLPPPAPPAASGLTIYLAGGQGQVVGGSVVGPLMASGPVVIMAASFGNAAYERLPLEEDDQEEQTAGAVANNIDGNATMGGGTQTQTQTQQQQQQQLMQDPTSFIQGLPPNLMNSVQLPAEAYWGTPRPSF

SEQ ID NO: 96360 - protein, 197 aa, Arabidopsis thaliana
  peptide (1)..(197): Ceres Seq. ID no. 12733002
  misc_feature (1)..(197): Homolog of NCBI NO: 15225475 NR Description: putative AT-hook DNA-binding protein; protein id:
  misc_feature (1)..(197): Homolog of NCBI NO: 15235815 NR Description: putative DNA binding protein; protein id:
  misc_feature (1)..(197): Homolog of NCBI NO: 15234404 NR Description: putative DNA-binding protein; protein id:
  misc_feature (1)..(197): Homolog of NCBI NO: 15232970 NR Description: putative protein; protein id: At3g60870.1
  misc_feature (1)..(147): Homolog of NCBI NO: 38346718 NR Description: OSJNBa0086O06.16 [Oryza sativa (japonica
  misc_feature (1)..(177): Homolog of NCBI NO: 15236657 NR Description: hypothetical protein; protein id: At4g17800.1, by cDNA: gi_17933298, supported by cDNA: gi_20453386 [Arabidopsis
  misc_feature (1)..(148): Homolog of NCBI NO: 15226945 NR Description: putative AT-hook DNA-binding protein; protein id:
  misc_feature (1)..(147): Homolog of NCBI NO: 34905212 NR Description: P0672D01.8 [Oryza sativa (japonica
  misc_feature (1)..(149): Homolog of NCBI NO: 18396925 NR Description: expressed protein; protein id: At3g04570.1, by cDNA: 15781. [Arabidopsis thaliana] hypothetical protein [Arabidopsis thaliana]
  misc_feature (1)..(128): Homolog of NCBI NO: 15218067 NR Description: putative DNA-binding protein; protein id:
MEVANGCDVMESVTVFARRRQRGICVLSGNGAVTNVTIRQPASVPGGGSSVVNLHGRFEILSLSGSFLPPPAPPAASGLTIYLAGGQGQVVGGSVVGPLMASGPVVIMAASFGNAAYERLPLEEDDQEEQTAGAVANNIDGNATMGGGTQTQTQTQQQQQQQLMQDPTSFIQGLPPNLMNSVQLPAEAYWGTPRPSF

SEQ ID NO: 96361 - protein, 188 aa, Arabidopsis thaliana
  peptide (1)..(188): Ceres Seq. ID no. 12733003
  misc_feature (1)..(188): Homolog of NCBI NO: 15225475 NR Description: putative AT-hook DNA-binding protein; protein id:
  misc_feature (1)..(188): Homolog of NCBI NO: 15235815 NR Description: putative DNA binding protein; protein id:
  misc_feature (1)..(188): Homolog of NCBI NO: 15234404 NR Description: putative DNA-binding protein; protein id:
  misc_feature (1)..(188): Homolog of NCBI NO: 15232970 NR Description: putative protein; protein id: At3g60870.1
  misc_feature (1)..(138): Homolog of NCBI NO: 38346718 NR Description: OSJNBa0086O06.16 [Oryza sativa (japonica
  misc_feature (1)..(168): Homolog of NCBI NO: 15236657 NR Description: hypothetical protein; protein id: At4g17800.1, by cDNA: gi_17933298, supported by cDNA: gi_20453386 [Arabidopsis
  misc_feature (1)..(139): Homolog of NCBI NO: 15226945 NR Description: putative AT-hook DNA-binding protein; protein id:
  misc_feature (1)..(138): Homolog of NCBI NO: 34905212 NR Description: P0672D01.8 [Oryza sativa (japonica
  misc_feature (1)..(140): Homolog of NCBI NO: 18396925 NR Description: expressed protein; protein id: At3g04570.1, by cDNA: 15781. [Arabidopsis thaliana] hypothetical protein [Arabidopsis thaliana]
  misc_feature (1)..(119): Homolog of NCBI NO: 15218067 NR Description: putative DNA-binding protein; protein id:
MESVTVFARRRQRGICVLSGNGAVTNVTIRQPASVPGGGSSVVNLHGRFEILSLSGSFLPPPAPPAASGLTIYLAGGQGQVVGGSVVGPLMASGPVVIMAASFGNAAYERLPLEEDDQEEQTAGAVANNIDGNATMGGGTQTQTQTQQQQQQQLMQDPTSFIQGLPPNLMNSVQLPAEAYWGTPRPSF

SEQ ID NO: 96362 - DNA, 1693 bp, Arabidopsis thaliana
  misc_feature (1)..(1693): Ceres Seq. ID no. 12733016
  misc_feature: MA Experiment ID: 20000169 Result: Up-regulated in Transcription
  misc_feature: MA Experiment 20000169 PARAMETER Experiment Name: At_100uM_ABA_P Parameter: Age (day) Value: 14
  misc_feature: MA Experiment 20000169 PARAMETER Experiment Name: At_100uM_ABA_P Parameter: Organism Value: A. thaliana
  misc_feature: MA Experiment 20000169 PARAMETER Experiment Name: At_100uM_ABA_P Parameter: Plant Line Value: WS
  misc_feature: MA Experiment 20000169 PARAMETER Experiment Name: At_100uM_ABA_P Parameter: Timepoint (hr) Value: 6
  misc_feature: MA Experiment 20000169 PARAMETER Experiment Name: At_100uM_ABA_P Parameter: Tissue Value: Aerial
  misc_feature: MA Experiment 20000169 PARAMETER Experiment Name: At_100uM_ABA_P Parameter: Treatment Value: 100uM ABA vs. No Treatment
  misc_feature: MA Experiment ID: 20000173 Result: Down-regulated in Transcription
  misc_feature: MA Experiment 20000173 PARAMETER Experiment Name: At_42deg_Heat_P Parameter: Age (day) Value: 14
  misc_feature: MA Experiment 20000173 PARAMETER Experiment Name: At_42deg_Heat_P Parameter: Organism Value: A. thaliana
  misc_feature: MA Experiment 20000173 PARAMETER Experiment Name: At_42deg_Heat_P Parameter: Plant Line Value: WS
  misc_feature: MA Experiment 20000173 PARAMETER Experiment Name: At_42deg_Heat_P Parameter: Temperature (deg C) Value: 42 vs. 22
  misc_feature: MA Experiment 20000173 PARAMETER Experiment Name: At_42deg_Heat_P Parameter: Timepoint (hr) Value: 6
  misc_feature: MA Experiment 20000173 PARAMETER Experiment Name: At_42deg_Heat_P Parameter: Tissue Value: Aerial
  misc_feature: MA Experiment ID: 20000185 Result: Down-regulated in Transcription
  misc_feature: MA Experiment 20000185 PARAMETER Experiment Name: At_Roots__P Parameter: Age (day) Value: 7 vs. 21
  misc_feature: MA Experiment 20000185 PARAMETER Experiment Name: At_Roots__P Parameter: Organism Value: A. thaliana
  misc_feature: MA Experiment 20000185 PARAMETER Experiment Name: At_Roots__P Parameter: Tissue Value: Roots vs. Whole Plant
  misc_feature: MA Experiment ID: 20000264 Result: Up-regulated in Transcription
  misc_feature: MA Experiment 20000264 PARAMETER Experiment Name: At_Open_Flower_P Parameter: Age (day) Value: 21
  misc_feature: MA Experiment 20000264 PARAMETER Experiment Name: At_Open_Flower_P Parameter: Plant Line Value: WS
  misc_feature: MA Experiment 20000264 PARAMETER Experiment Name: At_Open_Flower_P Parameter: Tissue Value: Open Flower vs. Whole Plant
  misc_feature: MA Experiment ID: 20000286 Result: Up-regulated in Transcription
  misc_feature: MA Experiment 20000286 PARAMETER Experiment Name: At_Open_Flower_P Parameter: Age (day) Value: 21
  misc_feature: MA Experiment 20000286 PARAMETER Experiment Name: At_Open_Flower_P Parameter: Plant Line Value: WS
  misc_feature: MA Experiment 20000286 PARAMETER Experiment Name: At_Open_Flower_P Parameter: Tissue Value: Half Open vs. Whole Plant
  misc_feature: MA Experiment ID: 20000436 Result: Up-regulated in Transcription
  misc_feature: MA Experiment 20000436 PARAMETER Experiment Name: At_Drought_P Parameter: Age (day) Value: 7
  misc_feature: MA Experiment 20000436 PARAMETER Experiment Name: At_Drought_P Parameter: Organism Value: A. thaliana
  misc_feature: MA Experiment 20000436 PARAMETER Experiment Name: At_Drought_P Parameter: Plant Line Value: WS
  misc_feature: MA Experiment 20000436 PARAMETER Experiment Name: At_Drought_P Parameter: Timepoint (hr) Value: 12
  misc_feature: MA Experiment 20000436 PARAMETER Experiment Name: At_Drought_P Parameter: Tissue Value: Whole Plant
  misc_feature: MA Experiment 20000436 PARAMETER Experiment Name: At_Drought_P Parameter: Treatment Value: Drought vs. No Drought
  misc_feature: MA Experiment ID: 20000437 Result: Up-regulated in Transcription
  misc_feature: MA Experiment 20000437 PARAMETER Experiment Name: At_Drought_P Parameter: Age (day) Value: 8
  misc_feature: MA Experiment 20000437 PARAMETER Experiment Name: At_Drought_P Parameter: Organism Value: A. thaliana
  misc_feature: MA Experiment 20000437 PARAMETER Experiment Name: At_Drought_P Parameter: Plant Line Value: WS
  misc_feature: MA Experiment 20000437 PARAMETER Experiment Name: At_Drought_P Parameter: Timepoint (hr) Value: 24
  misc_feature: MA Experiment 20000437 PARAMETER Experiment Name: At_Drought_P Parameter: Tissue Value: Whole Plant
  misc_feature: MA Experiment 20000437 PARAMETER Experiment Name: At_Drought_P Parameter: Treatment Value: Drought vs. No Drought
  misc_feature: MA Experiment ID: 20000439 Result: Down-regulated in Transcription
  misc_feature: MA Experiment 20000439 PARAMETER Experiment Name: At_Roots__P Parameter: Age (day) Value: 14 vs. 21
  misc_feature: MA Experiment 20000439 PARAMETER Experiment Name: At_Roots__P Parameter: Organism Value: A. thaliana
  misc_feature: MA Experiment 20000439 PARAMETER Experiment Name: At_Roots__P Parameter: Tissue Value: Roots vs. Whole Plant
  misc_feature: MA Experiment ID: 20000453 Result: Up-regulated in Transcription
  misc_feature: MA Experiment 20000453 PARAMETER Experiment Name: At_100uM_ABA_P Parameter: Age (day) Value: 15
  misc_feature: MA Experiment 20000453 PARAMETER Experiment Name: At_100uM_ABA_P Parameter: Organism Value: A. thaliana
  misc_feature: MA Experiment 20000453 PARAMETER Experiment Name: At_100uM_ABA_P Parameter: Plant Line Value: WS
  misc_feature: MA Experiment 20000453 PARAMETER Experiment Name: At_100uM_ABA_P Parameter: Timepoint (hr) Value: 24
  misc_feature: MA Experiment 20000453 PARAMETER Experiment Name: At_100uM_ABA_P Parameter: Tissue Value: Aerial
  misc_feature: MA Experiment 20000453 PARAMETER Experiment Name: At_100uM_ABA_P Parameter: Treatment Value: 100uM ABA vs. No Treatment
  misc_feature: MA Experiment ID: 20000455 Result: Up-regulated in Transcription
  misc_feature: MA Experiment 20000455 PARAMETER Experiment Name: At_100uM_ABA_P Parameter: Age (day) Value: 16
  misc_feature: MA Experiment 20000455 PARAMETER Experiment Name: At_100uM_ABA_P Parameter: Organism Value: A. thaliana
  misc_feature: MA Experiment 20000455 PARAMETER Experiment Name: At_100uM_ABA_P Parameter: Plant Line Value: WS
  misc_feature: MA Experiment 20000455 PARAMETER Experiment Name: At_100uM_ABA_P Parameter: Timepoint (hr) Value: 48
  misc_feature: MA Experiment 20000455 PARAMETER Experiment Name: At_100uM_ABA_P Parameter: Tissue Value: Aerial
  misc_feature: MA Experiment 20000455 PARAMETER Experiment Name: At_100uM_ABA_P Parameter: Treatment Value: 100uM ABA vs. No Treatment
  misc_feature: MA Experiment ID: 20000794 Result: Up-regulated in Transcription
  misc_feature: MA Experiment 20000794 PARAMETER Experiment Name: At_Petals_P Parameter: Age (day) Value: 23-25 days
  misc_feature: MA Experiment 20000794 PARAMETER Experiment Name: At_Petals_P Parameter: Plant Line Value: WS
  misc_feature: MA Experiment 20000794 PARAMETER Experiment Name: At_Petals_P Parameter: Tissue Value: Petals vs. Whole plant
  misc_feature: MA Experiment ID: 20001247 Result: Down-regulated in Transcription
  misc_feature: MA Experiment 20001247 PARAMETER Experiment Name: At_Far-red-induction_P Parameter: Age (day) Value: 7
  misc_feature: MA Experiment 20001247 PARAMETER Experiment Name: At_Far-red-induction_P Parameter: Light Value: Far-red vs. White
  misc_feature: MA Experiment 20001247 PARAMETER Experiment Name: At_Far-red-induction_P Parameter: Organism Value: A. thaliana
  misc_feature: MA Experiment 20001247 PARAMETER Experiment Name: At_Far-red-induction_P Parameter: Plant Line Value: Columbia
  misc_feature: MA Experiment 20001247 PARAMETER Experiment Name: At_Far-red-induction_P Parameter: Timepoint (hr) Value: 1
  misc_feature: MA Experiment 20001247 PARAMETER Experiment Name: At_Far-red-induction_P Parameter: Tissue Value: Whole Plant
  misc_feature: MA Experiment ID: 20001248 Result: Down-regulated in Transcription
  misc_feature: MA Experiment 20001248 PARAMETER Experiment Name: At_Far-red-induction_P Parameter: Age (day) Value: 7
  misc_feature: MA Experiment 20001248 PARAMETER Experiment Name: At_Far-red-induction_P Parameter: Light Value: Far-red vs. White
  misc_feature: MA Experiment 20001248 PARAMETER Experiment Name: At_Far-red-induction_P Parameter: Organism Value: A. thaliana
  misc_feature: MA Experiment 20001248 PARAMETER Experiment Name: At_Far-red-induction_P Parameter: Plant Line Value: Columbia
  misc_feature: MA Experiment 20001248 PARAMETER Experiment Name: At_Far-red-induction_P Parameter: Timepoint (hr) Value: 4
  misc_feature: MA Experiment 20001248 PARAMETER Experiment Name: At_Far-red-induction_P Parameter: Tissue Value: Whole Plant
  misc_feature: MA Experiment ID: 20001904 Result: Up-regulated in Transcription
  misc_feature: MA Experiment 20001904 PARAMETER Experiment Name: At_Drought_Reproduction_P Parameter: Age (day) Value: 37
  misc_feature: MA Experiment 20001904 PARAMETER Experiment Name: At_Drought_Reproduction_P Parameter: Organism Value: A. thaliana
  misc_feature: MA Experiment 20001904 PARAMETER Experiment Name: At_Drought_Reproduction_P Parameter: Plant Line Value: WS
  misc_feature: MA Experiment 20001904 PARAMETER Experiment Name: At_Drought_Reproduction_P Parameter: Timepoint (day) Value: 7
  misc_feature: MA Experiment 20001904 PARAMETER Experiment Name: At_Drought_Reproduction_P Parameter: Tissue Value: Rosettes
  misc_feature: MA Experiment 20001904 PARAMETER Experiment Name: At_Drought_Reproduction_P Parameter: Treatment Value: Drought vs. No Drought
  misc_feature: MA Experiment ID: 20001905 Result: Up-regulated in Transcription
  misc_feature: MA Experiment 20001905 PARAMETER Experiment Name: At_Drought_Reproduction_P Parameter: Age (day) Value: 40
  misc_feature: MA Experiment 20001905 PARAMETER Experiment Name: At_Drought_Reproduction_P Parameter: Organism Value: A. thaliana
  misc_feature: MA Experiment 20001905 PARAMETER Experiment Name: At_Drought_Reproduction_P Parameter: Plant Line Value: WS
  misc_feature: MA Experiment 20001905 PARAMETER Experiment Name: At_Drought_Reproduction_P Parameter: Timepoint (day) Value: 10
  misc_feature: MA Experiment 20001905 PARAMETER Experiment Name: At_Drought_Reproduction_P Parameter: Tissue Value: Rosettes
  misc_feature: MA Experiment 20001905 PARAMETER Experiment Name: At_Drought_Reproduction_P Parameter: Treatment Value: Drought vs. No Drought
  misc_feature: MA Experiment ID: 20001906 Result: Up-regulated in Transcription
  misc_feature: MA Experiment 20001906 PARAMETER Experiment Name: At_Drought_Reproduction_P Parameter: Age (day) Value: 35
  misc_feature: MA Experiment 20001906 PARAMETER Experiment Name: At_Drought_Reproduction_P Parameter: Organism Value: A. thaliana
  misc_feature: MA Experiment 20001906 PARAMETER Experiment Name: At_Drought_Reproduction_P Parameter: Plant Line Value: WS
  misc_feature: MA Experiment 20001906 PARAMETER Experiment Name: At_Drought_Reproduction_P Parameter: Timepoint (day) Value: 5
  misc_feature: MA Experiment 20001906 PARAMETER Experiment Name: At_Drought_Reproduction_P Parameter: Tissue Value: Siliques
  misc_feature: MA Experiment 20001906 PARAMETER Experiment Name: At_Drought_Reproduction_P Parameter: Treatment Value: Drought vs. No Drought
  misc_feature: MA Experiment ID: 20001908 Result: Up-regulated in Transcription
  misc_feature: MA Experiment 20001908 PARAMETER Experiment Name: At_Drought_Reproduction_P Parameter: Age (day) Value: 40
  misc_feature: MA Experiment 20001908 PARAMETER Experiment Name: At_Drought_Reproduction_P Parameter: Organism Value: A. thaliana
  misc_feature: MA Experiment 20001908 PARAMETER Experiment Name: At_Drought_Reproduction_P Parameter: Plant Line Value: WS
  misc_feature: MA Experiment 20001908 PARAMETER Experiment Name: At_Drought_Reproduction_P Parameter: Timepoint (day) Value: 10
  misc_feature: MA Experiment 20001908 PARAMETER Experiment Name: At_Drought_Reproduction_P Parameter: Tissue Value: Siliques
  misc_feature: MA Experiment 20001908 PARAMETER Experiment Name: At_Drought_Reproduction_P Parameter: Treatment Value: Drought vs. No Drought
  misc_feature: MA Experiment ID: 20001911 Result: Up-regulated in Transcription
  misc_feature: MA Experiment 20001911 PARAMETER Experiment Name: At_Drought_Reproduction_P Parameter: Age (day) Value: 40
  misc_feature: MA Experiment 20001911 PARAMETER Experiment Name: At_Drought_Reproduction_P Parameter: Organism Value: A. thaliana
  misc_feature: MA Experiment 20001911 PARAMETER Experiment Name: At_Drought_Reproduction_P Parameter: Plant Line Value: WS
  misc_feature: MA Experiment 20001911 PARAMETER Experiment Name: At_Drought_Reproduction_P Parameter: Timepoint (day) Value: 10
  misc_feature: MA Experiment 20001911 PARAMETER Experiment Name: At_Drought_Reproduction_P Parameter: Tissue Value: Flowers
  misc_feature: MA Experiment 20001911 PARAMETER Experiment Name: At_Drought_Reproduction_P Parameter: Treatment Value: Drought vs. No Drought
actcatttgaaagaaaatatcacttgagaaaaaattatggatatcatctttgaacaagctttgttccctctattttgctttgtcttatcatttttcataatcttcttcactacaacaagaccccggagctctcgcaaggtcgttccatctccgccgggacctccgcgactgcccatcatcggaaacattcaccttgtcggtagaaacccacaccattcattcgctgacctctcaaaaacatatggaccaatcatgagccttaaatttggaagtttaaacacagtggtcgtaacttcacctgaggctgcaagagaggttctaagaacatacgaccaaatcctctctagccgtacccccactaactcgatacggtccattaatcacgacaaggtttccgttgtctggcttccaccatcgtcgtctcgttggagacttttgagaaaactgtcggcgactcagctcttctcgcctcagcgtatcgaagccacgaaaacgttgagggagaacaaggtgaaggaactcgtgagcttcatgagtgaaagcagcgagagagaagaagctgttgatatatctcgtgctaccttcatcactgctcttaatatcatatcaaacattctgttttctgtcgatctcggtaactacgactcgaataaatccggtgtgtttcaagacacggtgattggtgtcatggaagctgtcgggaatccagacgctgctaacttctttccatttctggggttccttgatctgcaaggtaatagaaagactctgaaggcttgttccgagagattgtttaaggttttccgtgggttcattgatgctaaattagcggaaaaatcattgcgggatactaactctaaagatgtccgggagagagattttgtggatgtgcttctcgatcttaccgaaggagatgaagcagagctcaacactaacgatattgtacaccttctcttggacctgtttggagcgggcacagacacaaactctagtaccgtggaatgggcaatggcagagttacttcgaaaccctgaaacaatggtgaaagctcaggctgagatcgactgtgtgattggtcagaaaggtgttgttgaagagtctgatatctcggcacttccctatctacaagcagtggtgaaggaaactttccggttacatccggctgctccgctactagtcccccgaaaagctgaatcagatgtggaggttcttgggttcatggtgcctaaagacactcaggtatttgtgaacgtgtgggccataggaagagacccgaacgtgtgggagaattcgtcccggtttaagccagagaggtttttagggaaagatatcgacctgagaggtagagattatgagcttacaccattcggagccggacgtagaatatgcccgggattgcctttggctgtgaaaacagtgcctcttatgcttgcttctcttctttattcatttgactggaagcttccaaacggtgtcggttcagaggatttggacatggacgagactttcggtctcacattgcacaagaccaacccgttacatgccgtacccgtcaagaaacgtggccgtaattagccatttagtataagttttctttaaagtacaaatatgcttttcttatcggttgacataagatgcaatttcatgctctgattttacgattctattcttcagattctatagttcgtttacc

SEQ ID NO: 96363 - protein, 512 aa, Arabidopsis thaliana
  peptide (1)..(512): Ceres Seq. ID no. 12733017
  misc_feature (39)..(504): Pfam Name: Cytochrome P450 Pfam Description: Cytochrome P450
  misc_feature (1)..(512): Homolog of NCBI NO: 15225512 NR Description: cytochrome p450 family; protein id: At2g45570.1, by cDNA: gi_17065047 [Arabidopsis thaliana] Cytochrome P450 76C2 >gi|7430675|pir||T00870 probable cytochrome
  misc_feature (1)..(512): Homolog of NCBI NO: 15225510 NR Description: cytochrome p450 family; protein id: At2g45550.1
  misc_feature (1)..(483): Homolog of NCBI NO: 25282599 NR Description: cytochrome P450 monooxygenase [imported] - thaliana >gi|3164130|dbj|BAA28540.1| cytochrome P450
  misc_feature (1)..(512): Homolog of NCBI NO: 15217636 NR Description: cytochrome P450 monooxygenase; protein id: [Arabidopsis thaliana] >gi|25282568|pir||F86460 probable
  misc_feature (1)..(503): Homolog of NCBI NO: 25282569 NR Description: probable cytochrome P450 [imported] - Arabidopsis >gi|9665096|gb|AAF97287.1|AC010164_9 Putative cytochrome P450
  misc_feature (1)..(508): Homolog of NCBI NO: 26451374 NR Description: putative cytochrome P450 [Arabidopsis thaliana]
  misc_feature (1)..(509): Homolog of NCBI NO: 15233027 NR Description: cytochrome p450 family; protein id: At3g61040.1
  misc_feature (137)..(503): Homolog of NCBI NO: 15217637 NR Description: cytochrome p450 family; protein id: At1g33730.1
  misc_feature (12)..(508): Homolog of NCBI NO: 33320161 NR Description: cytochrome P450 [Pastinaca sativa]
  misc_feature (16)..(504): Homolog of NCBI NO: 37531412 NR Description: putative cytochrome P450 [Oryza sativa (japonica group)] >gi|21672008|gb|AAM74370.1| Putative cytochrome P450
MDIIFEQALFPLFCFVLSFFIIFFTTTRPRSSRKVVPSPPGPPRLPIIGNIHLVGRNPHHSFADLSKTYGPIMSLKFGSLNTVVVTSPEAAREVLRTYDQILSSRTPTNSIRSINHDKVSVVWLPPSSSRWRLLRKLSATQLFSPQRIEATKTLRENKVKELVSFMSESSEREEAVDISRATFITALNIISNILFSVDLGNYDSNKSGVFQDTVIGVMEAVGNPDAANFFPFLGFLDLQGNRKTLKACSERLFKVFRGFIDAKLAEKSLRDTNSKDVRERDFVDVLLDLTEGDEAELNTNDIVHLLLDLFGAGTDTNSSTVEWAMAELLRNPETMVKAQAEIDCVIGQKGVVEESDISALPYLQAVVKETFRLHPAAPLLVPRKAESDVEVLGFMVPKDTQVFVNVWAIGRDPNVWENSSRFKPERFLGKDIDLRGRDYELTPFGAGRRICPGLPLAVKTVPLMLASLLYSFDWKLPNGVGSEDLDMDETFGLTLHKTNPLHAVPVKKRGRN

SEQ ID NO: 96364 - protein, 440 aa, Arabidopsis thaliana
  peptide (1)..(440): Ceres Seq. ID no. 12733018
  misc_feature (1)..(432): Pfam Name: Cytochrome P450 Pfam Description: Cytochrome P450
  misc_feature (1)..(440): Homolog of NCBI NO: 15225512 NR Description: cytochrome p450 family; protein id: At2g45570.1, by cDNA: gi_17065047 [Arabidopsis thaliana] Cytochrome P450 76C2 >gi|7430675|pir||T00870 probable cytochrome
  misc_feature (1)..(440): Homolog of NCBI NO: 15225510 NR Description: cytochrome p450 family; protein id: At2g45550.1
  misc_feature (1)..(411): Homolog of NCBI NO: 25282599 NR Description: cytochrome P450 monooxygenase [imported] - thaliana >gi|3164130|dbj|BAA28540.1| cytochrome P450
  misc_feature (1)..(440): Homolog of NCBI NO: 15217636 NR Description: cytochrome P450 monooxygenase; protein id: [Arabidopsis thaliana] >gi|25282568|pir||F86460 probable
  misc_feature (1)..(431): Homolog of NCBI NO: 25282569 NR Description: probable cytochrome P450 [imported] - Arabidopsis >gi|9665096|gb|AAF97287.1|AC010164_9 Putative cytochrome P450
  misc_feature (1)..(436): Homolog of NCBI NO: 26451374 NR Description: putative cytochrome P450 [Arabidopsis thaliana]
  misc_feature (1)..(437): Homolog of NCBI NO: 15233027 NR Description: cytochrome p450 family; protein id: At3g61040.1
  misc_feature (65)..(431): Homolog of NCBI NO: 15217637 NR Description: cytochrome p450 family; protein id: At1g33730.1
  misc_feature (1)..(436): Homolog of NCBI NO: 33320161 NR Description: cytochrome P450 [Pastinaca sativa]
  misc_feature (1)..(432): Homolog of NCBI NO: 37531412 NR Description: putative cytochrome P450 [Oryza sativa (japonica group)] >gi|21672008|gb|AAM74370.1| Putative cytochrome P450
MSLKFGSLNTVVVTSPEAAREVLRTYDQILSSRTPTNSIRSINHDKVSVVWLPPSSSRWRLLRKLSATQLFSPQRIEATKTLRENKVKELVSFMSESSEREEAVDISRATFITALNIISNILFSVDLGNYDSNKSGVFQDTVIGVMEAVGNPDAANFFPFLGFLDLQGNRKTLKACSERLFKVFRGFIDAKLAEKSLRDTNSKDVRERDFVDVLLDLTEGDEAELNTNDIVHLLLDLFGAGTDTNSSTVEWAMAELLRNPETMVKAQAEIDCVIGQKGVVEESDISALPYLQAVVKETFRLHPAAPLLVPRKAESDVEVLGFMVPKDTQVFVNVWAIGRDPNVWENSSRFKPERFLGKDIDLRGRDYELTPFGAGRRICPGLPLAVKTVPLMLASLLYSFDWKLPNGVGSEDLDMDETFGLTLHKTNPLHAVPVKKRGRN

SEQ ID NO: 96365 - protein, 347 aa, Arabidopsis thaliana
  peptide (1)..(347): Ceres Seq. ID no. 12733019
  misc_feature (1)..(339): Pfam Name: Cytochrome P450 Pfam Description: Cytochrome P450
  misc_feature (1)..(347): Homolog of NCBI NO: 15225512 NR Description: cytochrome p450 family; protein id: At2g45570.1, by cDNA: gi_17065047 [Arabidopsis thaliana] Cytochrome P450 76C2 >gi|7430675|pir||T00870 probable cytochrome
  misc_feature (1)..(347): Homolog of NCBI NO: 15225510 NR Description: cytochrome p450 family; protein id: At2g45550.1
  misc_feature (1)..(318): Homolog of NCBI NO: 25282599 NR Description: cytochrome P450 monooxygenase [imported] - thaliana >gi|3164130|dbj|BAA28540.1| cytochrome P450
  misc_feature (1)..(347): Homolog of NCBI NO: 15217636 NR Description: cytochrome P450 monooxygenase; protein id: [Arabidopsis thaliana] >gi|25282568|pir||F86460 probable
  misc_feature (1)..(338): Homolog of NCBI NO: 25282569 NR Description: probable cytochrome P450 [imported] - Arabidopsis >gi|9665096|gb|AAF97287.1|AC010164_9 Putative cytochrome P450
  misc_feature (1)..(343): Homolog of NCBI NO: 26451374 NR Description: putative cytochrome P450 [Arabidopsis thaliana]
  misc_feature (1)..(344): Homolog of NCBI NO: 15233027 NR Description: cytochrome p450 family; protein id: At3g61040.1
  misc_feature (1)..(338): Homolog of NCBI NO: 15217637 NR Description: cytochrome p450 family; protein id: At1g33730.1
  misc_feature (1)..(343): Homolog of NCBI NO: 33320161 NR Description: cytochrome P450 [Pastinaca sativa]
  misc_feature (1)..(339): Homolog of NCBI NO: 37531412 NR Description: putative cytochrome P450 [Oryza sativa (japonica group)] >gi|21672008|gb|AAM74370.1| Putative cytochrome P450
MSESSEREEAVDISRATFITALNIISNILFSVDLGNYDSNKSGVFQDTVIGVMEAVGNPDAANFFPFLGFLDLQGNRKTLKACSERLFKVFRGFIDAKLAEKSLRDTNSKDVRERDFVDVLLDLTEGDEAELNTNDIVHLLLDLFGAGTDTNSSTVEWAMAELLRNPETMVKAQAEIDCVIGQKGVVEESDISALPYLQAVVKETFRLHPAAPLLVPRKAESDVEVLGFMVPKDTQVFVNVWAIGRDPNVWENSSRFKPERFLGKDIDLRGRDYELTPFGAGRRICPGLPLAVKTVPLMLASLLYSFDWKLPNGVGSEDLDMDETFGLTLHKTNPLHAVPVKKRGRN

SEQ ID NO: 96366 - DNA, 975 bp, Arabidopsis thaliana
  misc_feature (1)..(975): Ceres Seq. ID no. 12733020
  misc_feature: MA Experiment ID: 20000184 Result: Up-regulated in Transcription
  misc_feature: MA Experiment 20000184 PARAMETER Experiment Name: At_Shoots__P Parameter: Age (day) Value: 7
  misc_feature: MA Experiment 20000184 PARAMETER Experiment Name: At_Shoots__P Parameter: Tissue Value: Shoots vs. Whole Plant
  misc_feature: MA Experiment ID: 20001910 Result: Up-regulated in Transcription
  misc_feature: MA Experiment 20001910 PARAMETER Experiment Name: At_Drought_Reproduction_P Parameter: Age (day) Value: 37
  misc_feature: MA Experiment 20001910 PARAMETER Experiment Name: At_Drought_Reproduction_P Parameter: Organism Value: A. thaliana
  misc_feature: MA Experiment 20001910 PARAMETER Experiment Name: At_Drought_Reproduction_P Parameter: Plant Line Value: WS
  misc_feature: MA Experiment 20001910 PARAMETER Experiment Name: At_Drought_Reproduction_P Parameter: Timepoint (day) Value: 7
  misc_feature: MA Experiment 20001910 PARAMETER Experiment Name: At_Drought_Reproduction_P Parameter: Tissue Value: Flowers
  misc_feature: MA Experiment 20001910 PARAMETER Experiment Name: At_Drought_Reproduction_P Parameter: Treatment Value: Drought vs. No Drought
atgtcacgtgactctcctcccgcatttgatccatacaaacacctcaacataacaatcaaccccaacggctcttgcacgcgccatttcgtttggccgagggttgaacccgacccggatccatgccccggcaagctcgccgcttccaaagacgtaaccattaaccacgaaaccggcgtgtccgtacgtattttccgaccaactaatctaccatccaatgataacgccgtggctcgtctcccaatcatcatccatctccacggctccggttggatcctttacccggccaattctgccgcaaatgaccgttgttgctctcaaatggccagtgagttaacagtgattgttgtctccgtacactatcgtttgcctccggagcatagactcccagctcaatacgacgacgcattagatgctctgctttgggtcaaacaacaagtcgttgactcaaccaacggcgagccgtggcttaaggactacgccgatttctcacggtgttacatatgcggttcgagtaacggcgctaacatcgctttccaattggcactgagatcgttagaccacgatttaacgccgttacaaatcgacggttgcgtgttttaccaaccgctttttggcggtaaaacgaggacaaaatcggagcttaagaatttcgccgacccggtaatgccggttcctgcggttgacgccatgtgggaactatctttgccggtaggtgttgatcgggatcataggtactgtaatccattgggttacttgccgcaaaaggagaaagttggacggcttggacggtgtttggtgatcggttacggcggagacacgtcgttggatcgacaacaagatttcgtgaatttgttggttgcagctggagttagggttgaagcaaggtttgacgacgccggtttccatagcatcgagctggtcgatccacgacgagccgtcgctcttcttaatatgattagagattttataagttga

SEQ ID NO: 96367 - protein, 324 aa, Arabidopsis thaliana
  peptide (1)..(324): Ceres Seq. ID no. 12733021
  misc_feature (70)..(124): Pfam Name: Carboxylesterase Pfam Description: Carboxylesterase
  misc_feature (1)..(324): Homolog of NCBI NO: 15225521 NR Description: unknown protein; protein id: At2g45610.1
  misc_feature (6)..(323): Homolog of NCBI NO: 18406834 NR Description: expressed protein; protein id: At2g45600.1, by cDNA: 36855., supported by cDNA: gi_16604486 [Arabidopsis
  misc_feature (6)..(323): Homolog of NCBI NO: 21593183 NR Description: unknown [Arabidopsis thaliana]
  misc_feature (1)..(323): Homolog of NCBI NO: 15241725 NR Description: putative protein; protein id: At5g62180.1
  misc_feature (6)..(323): Homolog of NCBI NO: 8574455 NR Description: pepper esterase [Capsicum annuum]
  misc_feature (16)..(323): Homolog of NCBI NO: 27819508 NR Description: putative esterase [Oryza sativa (japonica
  misc_feature (46)..(316): Homolog of NCBI NO: 5487873 NR Description: PrMC3 [Pinus radiata]
  misc_feature (39)..(309): Homolog of NCBI NO: 34895936 NR Description: P0030H07.39 [Oryza sativa (japonica
  misc_feature (28)..(323): Homolog of NCBI NO: 34393714 NR Description: putative esterase [Oryza sativa (japonica
  misc_feature (7)..(323): Homolog of NCBI NO: 34899924 NR Description: OJ1714_H10.46 [Oryza sativa (japonica >gi|22831101|dbj|BAC15963.1| putative cell death associated
MSRDSPPAFDPYKHLNITINPNGSCTRHFVWPRVEPDPDPCPGKLAASKDVTINHETGVSVRIFRPTNLPSNDNAVARLPIIIHLHGSGWILYPANSAANDRCCSQMASELTVIVVSVHYRLPPEHRLPAQYDDALDALLWVKQQVVDSTNGEPWLKDYADFSRCYICGSSNGANIAFQLALRSLDHDLTPLQIDGCVFYQPLFGGKTRTKSELKNFADPVMPVPAVDAMWELSLPVGVDRDHRYCNPLGYLPQKEKVGRLGRCLVIGYGGDTSLDRQQDFVNLLVAAGVRVEARFDDAGFHSIELVDPRRAVALLNMIRDFIS

SEQ ID NO: 96368 - protein, 218 aa, Arabidopsis thaliana
  peptide (1)..(218): Ceres Seq. ID no. 12733022
  misc_feature (1)..(218): Homolog of NCBI NO: 15225521 NR Description: unknown protein; protein id: At2g45610.1
  misc_feature (1)..(217): Homolog of NCBI NO: 18406834 NR Description: expressed protein; protein id: At2g45600.1, by cDNA: 36855., supported by cDNA: gi_16604486 [Arabidopsis
  misc_feature (1)..(217): Homolog of NCBI NO: 21593183 NR Description: unknown [Arabidopsis thaliana]
  misc_feature (1)..(217): Homolog of NCBI NO: 15241725 NR Description: putative protein; protein id: At5g62180.1
  misc_feature (1)..(217): Homolog of NCBI NO: 8574455 NR Description: pepper esterase [Capsicum annuum]
  misc_feature (1)..(217): Homolog of NCBI NO: 27819508 NR Description: putative esterase [Oryza sativa (japonica
  misc_feature (1)..(210): Homolog of NCBI NO: 5487873 NR Description: PrMC3 [Pinus radiata]
  misc_feature (1)..(203): Homolog of NCBI NO: 34895936 NR Description: P0030H07.39 [Oryza sativa (japonica
  misc_feature (1)..(217): Homolog of NCBI NO: 34393714 NR Description: putative esterase [Oryza sativa (japonica
  misc_feature (1)..(217): Homolog of NCBI NO: 34899924 NR Description: OJ1714_H10.46 [Oryza sativa (japonica >gi|22831101|dbj|BAC15963.1| putative cell death associated
MASELTVIVVSVHYRLPPEHRLPAQYDDALDALLWVKQQVVDSTNGEPWLKDYADFSRCYICGSSNGANIAFQLALRSLDHDLTPLQIDGCVFYQPLFGGKTRTKSELKNFADPVMPVPAVDAMWELSLPVGVDRDHRYCNPLGYLPQKEKVGRLGRCLVIGYGGDTSLDRQQDFVNLLVAAGVRVEARFDDAGFHSIELVDPRRAVALLNMIRDFIS

SEQ ID NO: 96369 - DNA, 1463 bp, Arabidopsis thaliana
  misc_feature (1)..(1463): Ceres Seq. ID no. 12733027
  misc_feature: MA Experiment ID: 20000794 Result: Up-regulated in Transcription
  misc_feature: MA Experiment 20000794 PARAMETER Experiment Name: At_Petals_P Parameter: Age (day) Value: 23-25 days
  misc_feature: MA Experiment 20000794 PARAMETER Experiment Name: At_Petals_P Parameter: Plant Line Value: WS
  misc_feature: MA Experiment 20000794 PARAMETER Experiment Name: At_Petals_P Parameter: Tissue Value: Petals vs. Whole plant
attgcaaccaggaagagaaagaaaatcagagattgatttaacgtgaatggaattttgttgtttcccaatttcttctgagaaatagcaaagttcagttttgtttctctctatctgaagctcaatggaagcttataagcaatgggtttggagaaatagagagtatgtacaatcctttggatcctttgccaacggattgacatggctgcttcctgagaagttttctgcttcagagattggaccagaagcagtaacggcttttttgggcatattctcaacgataaatgaacacataattgaaaatgctccaacacctcgtggccatgttggatcttccgggaatgatccatccctttcttatccactactcatcgccatcctcaaggatttggaaactgttgtggaagtggcagctgaacacttctatggagacaaaaaatggaactacattattctcactgaagctatgaaggctgtcattaggttagccttgttccggaatagtgggtataagatgcttcttcaaggaggggaaacacctaatgaggagaaagattctaaccaatccgagtcgcaaaatagagctggtaattcgggtagaaatctcgggcctcatggtcttggaaaccaaaatcatcataatccatggaacttggaaggacgggcgatgtctgctttaagttcatttggtcagaatgcaagaacaacaacatcttctacccccggttggtctcgaagaattcaacatcagcaagcagttatagagcctccaatgatcaaggagaggcgaagaacgatgtccgagctacttactgagaagggtgttaatggagcgttgtttgcgattggtgaggttctttacataacgagaccgctcatttacgttcttttcatcagaaaatatggagtccgatcttggattccttgggctatatcgctttctgtggacacactggggatgggtcttcttgcaaattcgaagtggtggggagagaagagcaagcaagtccatttctcaggacctgaaaaggatgagctgaggagacgaaaactgatatgggcattgtacctcatgagagatccattcttcaccaagtacacaaggcagaagctggaaagctctcaaaagaagctggaactaattccattgatcggattcctcacagagaaaattgtggagcttttggagggagctcagtcacggtacacttacatatcgggatcgtgaggttaagcgttttacttatggtttatatgcaacggaagaatattgccattgttggaatgctttttcagatcatcaaaggctcctacagatttcttagggaatggtttcaggcttttgttagaaattgtgtttattgcaacaggtagagaacataaccatagacagatgtatctgaagagataagcttctctatgtctaaagaaatggaccgatacgaataaaacaagcatcattaaag

SEQ ID NO: 96370 - protein, 367 aa, Arabidopsis thaliana
  peptide (1)..(367): Ceres Seq. ID no. 12733028
  misc_feature (1)..(367): Homolog of NCBI NO: 18406863 NR Description: expressed protein; protein id: At2g45690.1, by cDNA: gi_4837732 [Arabidopsis thaliana]
  misc_feature (1)..(367): Homolog of NCBI NO: 4837733 NR Description: shrunken seed protein [Arabidopsis thaliana]
  misc_feature (24)..(367): Homolog of NCBI NO: 7485633 NR Description: hypothetical protein At2g45690 [imported] -
  misc_feature (1)..(127): Homolog of NCBI NO: 21355481 NR Description: CG3947-PA [Drosophila melanogaster]
  misc_feature (243)..(364): Homolog of NCBI NO: 21355481 NR Description: CG3947-PA [Drosophila melanogaster]
  misc_feature (109)..(367): Homolog of NCBI NO: 28829898 NR Description: similar to Mus musculus (Mouse). Adult male
  misc_feature (221)..(366): Homolog of NCBI NO: 34856558 NR Description: similar to peroxisome biogenesis factor 16
  misc_feature (221)..(366): Homolog of NCBI NO: 21553069 NR Description: peroxisome biogenesis factor 16; peroxin-16 [Mus >gi|14789912|gb|AAH10822.1| Similar to peroxisomal biogenesis
  misc_feature (172)..(366): Homolog of NCBI NO: 4758898 NR Description: peroxisomal biogenesis factor 16 isoform 1;
  misc_feature (172)..(347): Homolog of NCBI NO: 12653395 NR Description: Similar to peroxisomal biogenesis factor 16 [Homo
MEAYKQWVWRNREYVQSFGSFANGLTWLLPEKFSASEIGPEAVTAFLGIFSTINEHIIENAPTPRGHVGSSGNDPSLSYPLLIAILKDLETVVEVAAEHFYGDKKWNYIILTEAMKAVIRLALFRNSGYKMLLQGGETPNEEKDSNQSESQNRAGNSGRNLGPHGLGNQNHHNPWNLEGRAMSALSSFGQNARTTTSSTPGWSRRIQHQQAVIEPPMIKERRRTMSELLTEKGVNGALFAIGEVLYITRPLIYVLFIRKYGVRSWIPWAISLSVDTLGMGLLANSKWWGEKSKQVHFSGPEKDELRRRKLIWALYLMRDPFFTKYTRQKLESSQKKLELIPLIGFLTEKIVELLEGAQSRYTYISGS

SEQ ID NO: 96371 - protein, 253 aa, Arabidopsis thaliana
  peptide (1)..(253): Ceres Seq. ID no. 12733029
  misc_feature (1)..(253): Homolog of NCBI NO: 18406863 NR Description: expressed protein; protein id: At2g45690.1, by cDNA: gi_4837732 [Arabidopsis thaliana]
  misc_feature (1)..(253): Homolog of NCBI NO: 4837733 NR Description: shrunken seed protein [Arabidopsis thaliana]
  misc_feature (1)..(253): Homolog of NCBI NO: 7485633 NR Description: hypothetical protein At2g45690 [imported] -
  misc_feature (1)..(13): Homolog of NCBI NO: 21355481 NR Description: CG3947-PA [Drosophila melanogaster]
  misc_feature (129)..(250): Homolog of NCBI NO: 21355481 NR Description: CG3947-PA [Drosophila melanogaster]
  misc_feature (1)..(253): Homolog of NCBI NO: 28829898 NR Description: similar to Mus musculus (Mouse). Adult male
  misc_feature (107)..(252): Homolog of NCBI NO: 34856558 NR Description: similar to peroxisome biogenesis factor 16
  misc_feature (107)..(252): Homolog of NCBI NO: 21553069 NR Description: peroxisome biogenesis factor 16; peroxin-16 [Mus >gi|14789912|gb|AAH10822.1| Similar to peroxisomal biogenesis
  misc_feature (58)..(252): Homolog of NCBI NO: 4758898 NR Description: peroxisomal biogenesis factor 16 isoform 1;
  misc_feature (58)..(233): Homolog of NCBI NO: 12653395 NR Description: Similar to peroxisomal biogenesis factor 16 [Homo
MKAVIRLALFRNSGYKMLLQGGETPNEEKDSNQSESQNRAGNSGRNLGPHGLGNQNHHNPWNLEGRAMSALSSFGQNARTTTSSTPGWSRRIQHQQAVIEPPMIKERRRTMSELLTEKGVNGALFAIGEVLYITRPLIYVLFIRKYGVRSWIPWAISLSVDTLGMGLLANSKWWGEKSKQVHFSGPEKDELRRRKLIWALYLMRDPFFTKYTRQKLESSQKKLELIPLIGFLTEKIVELLEGAQSRYTYISGS

SEQ ID NO: 96372 - protein, 237 aa, Arabidopsis thaliana
  peptide (1)..(237): Ceres Seq. ID no. 12733030
  misc_feature (1)..(237): Homolog of NCBI NO: 18406863 NR Description: expressed protein; protein id: At2g45690.1, by cDNA: gi_4837732 [Arabidopsis thaliana]
  misc_feature (1)..(237): Homolog of NCBI NO: 4837733 NR Description: shrunken seed protein [Arabidopsis thaliana]
  misc_feature (1)..(237): Homolog of NCBI NO: 7485633 NR Description: hypothetical protein At2g45690 [imported] -
  misc_feature (113)..(234): Homolog of NCBI NO: 21355481 NR Description: CG3947-PA [Drosophila melanogaster]
  misc_feature (1)..(237): Homolog of NCBI NO: 28829898 NR Description: similar to Mus musculus (Mouse). Adult male
  misc_feature (91)..(236): Homolog of NCBI NO: 34856558 NR Description: similar to peroxisome biogenesis factor 16
  misc_feature (91)..(236): Homolog of NCBI NO: 21553069 NR Description: peroxisome biogenesis factor 16; peroxin-16 [Mus >gi|14789912|gb|AAH10822.1| Similar to peroxisomal biogenesis
  misc_feature (42)..(236): Homolog of NCBI NO: 4758898 NR Description: peroxisomal biogenesis factor 16 isoform 1;
  misc_feature (42)..(217): Homolog of NCBI NO: 12653395 NR Description: Similar to peroxisomal biogenesis factor 16 [Homo
  misc_feature (42)..(217): Homolog of NCBI NO: 17136080 NR Description: peroxisomal biogenesis factor 16 isoform 2;
MLLQGGETPNEEKDSNQSESQNRAGNSGRNLGPHGLGNQNHHNPWNLEGRAMSALSSFGQNARTTTSSTPGWSRRIQHQQAVIEPPMIKERRRTMSELLTEKGVNGALFAIGEVLYITRPLIYVLFIRKYGVRSWIPWAISLSVDTLGMGLLANSKWWGEKSKQVHFSGPEKDELRRRKLIWALYLMRDPFFTKYTRQKLESSQKKLELIPLIGFLTEKIVELLEGAQSRYTYISGS

SEQ ID NO: 96373 - DNA, 1896 bp, Arabidopsis thaliana
  misc_feature (1)..(1896): Ceres Seq. ID no. 12733035
  misc_feature: MA Experiment ID: 20000180 Result: Up-regulated in Transcription
  misc_feature: MA Experiment 20000180 PARAMETER Experiment Name: At_Germinating_Seeds_P Parameter: Age (hr) Value: 24 vs. 0
  misc_feature: MA Experiment 20000180 PARAMETER Experiment Name: At_Germinating_Seeds_P Parameter: Tissue Value: Germinating Seeds
  misc_feature: MA Experiment ID: 20000185 Result: Up-regulated in Transcription
  misc_feature: MA Experiment 20000185 PARAMETER Experiment Name: At_Roots__P Parameter: Age (day) Value: 7 vs. 21
  misc_feature: MA Experiment 20000185 PARAMETER Experiment Name: At_Roots__P Parameter: Organism Value: A. thaliana
  misc_feature: MA Experiment 20000185 PARAMETER Experiment Name: At_Roots__P Parameter: Tissue Value: Roots vs. Whole Plant
  misc_feature: MA Experiment ID: 20000234 Result: Up-regulated in Transcription
  misc_feature: MA Experiment 20000234 PARAMETER Experiment Name: At_Siliques_P Parameter: Age (day) Value: 21
  misc_feature: MA Experiment 20000234 PARAMETER Experiment Name: At_Siliques_P Parameter: Organism Value: A. thaliana
  misc_feature: MA Experiment 20000234 PARAMETER Experiment Name: At_Siliques_P Parameter: Plant Line Value: WS
  misc_feature: MA Experiment 20000234 PARAMETER Experiment Name: At_Siliques_P Parameter: Tissue Value: Less Than 5mm Siliques vs. Whole Plant
  misc_feature: MA Experiment ID: 20000235 Result: Up-regulated in Transcription
  misc_feature: MA Experiment 20000235 PARAMETER Experiment Name: At_Siliques_P Parameter: Age (day) Value: 21
  misc_feature: MA Experiment 20000235 PARAMETER Experiment Name: At_Siliques_P Parameter: Organism Value: A. thaliana
  misc_feature: MA Experiment 20000235 PARAMETER Experiment Name: At_Siliques_P Parameter: Plant Line Value: WS
  misc_feature: MA Experiment 20000235 PARAMETER Experiment Name: At_Siliques_P Parameter: Tissue Value: 5-10mm Siliques vs. Whole Plant
  misc_feature: MA Experiment ID: 20000439 Result: Up-regulated in Transcription
  misc_feature: MA Experiment 20000439 PARAMETER Experiment Name: At_Roots__P Parameter: Age (day) Value: 14 vs. 21
  misc_feature: MA Experiment 20000439 PARAMETER Experiment Name: At_Roots__P Parameter: Organism Value: A. thaliana
  misc_feature: MA Experiment 20000439 PARAMETER Experiment Name: At_Roots__P Parameter: Tissue Value: Roots vs. Whole Plant
  misc_feature: MA Experiment ID: 20000496 Result: Down-regulated in Transcription
  misc_feature: MA Experiment 20000496 PARAMETER Experiment Name: At_Guard_Cells_P Parameter: Harvest Date Value: 7/19/2002
  misc_feature: MA Experiment 20000496 PARAMETER Experiment Name: At_Guard_Cells_P Parameter: Organism Value: Canola
  misc_feature: MA Experiment 20000496 PARAMETER Experiment Name: At_Guard_Cells_P Parameter: Tissue Value: Guard Cells vs. Leaves
  misc_feature: MA Experiment ID: 20001906 Result: Down-regulated in Transcription
  misc_feature: MA Experiment 20001906 PARAMETER Experiment Name: At_Drought_Reproduction_P Parameter: Age (day) Value: 35
  misc_feature: MA Experiment 20001906 PARAMETER Experiment Name: At_Drought_Reproduction_P Parameter: Organism Value: A. thaliana
  misc_feature: MA Experiment 20001906 PARAMETER Experiment Name: At_Drought_Reproduction_P Parameter: Plant Line Value: WS
  misc_feature: MA Experiment 20001906 PARAMETER Experiment Name: At_Drought_Reproduction_P Parameter: Timepoint (day) Value: 5
  misc_feature: MA Experiment 20001906 PARAMETER Experiment Name: At_Drought_Reproduction_P Parameter: Tissue Value: Siliques
  misc_feature: MA Experiment 20001906 PARAMETER Experiment Name: At_Drought_Reproduction_P Parameter: Treatment Value: Drought vs. No Drought
atgaatttatttacaagaatctcatctcggactaagaaggccaatctttactacgtaaccctagttgctcttctctgcatcgctagctaccttctcggtatttggcaaaacacggcggttaatccacgcgccgccttcgatgattcagacggtacaccgtgcgagggattcaccagacctaattctacgaaagatctcgacttcgacgcgcatcacaacattcaagatccacctccggtgacggaaaccgccgttagtttcccgtcgtgtgccgccgcgttgagcgagcacacgccatgcgaagacgcgaagcgatcgttgaaattctcgagggagagattggagtataggcaaaggcattgtcccgagagagaagaaatcttgaagtgcagaattccggcgccgtacggttacaaaacgccgttccgatggccggcgagtcgtgacgtggcgtggttcgctaatgtgcctcacacggagcttacggttgagaaaaagaatcagaattgggtccggtacgagaatgatcggttttggttccctggtggaggtacgatgtttccacgtggcgctgatgcttacattgatgatatcggacggttgattgatctcagcgacggctctatccgtacagccatcgataccggttgcggggtggctagcttcggtgcatatcttttatcaagaaacattacaacgatgtcatttgcaccaagagacacacacgaagctcaagtccagttcgcactcgagcgtggtgtgccggcgatgatcggaatcatggctacaatccgcctaccgtacccttctagagcctttgatttagcacattgctctcgttgccttattccgtggggccaaaacgatggggcttacttgatggaggtggatagggttttaagaccaggagggtactggatactttctggaccgccgattaattggcagaaacggtggaaagggtgggaacggaccatggatgatttgaatgcagagcagactcagatcgagcaggtcgcgagaagcttgtgttggaagaaagttgttcaaagagatgatcttgctatttggcaaaaaccctttaaccacattgactgtaagaaaaccagagaggttttgaaaaatccggagttttgtcgtcatgatcaagatcccgacatggcctggtatacgaagatggattcttgtttgacaccattacctgaagttgatgacgctgaggatctaaagacggtggccggagggaaggtagaaaagtggccggctagattaaacgcgattcctccgagagtaaacaaaggcgctctcgaggaaatcacacctgaagctttcttggagaacacgaaactgtggaaacagagagtttcttattacaagaagttagattaccagttgggtgaaaccgggagatacagaaacttagtcgacatgaacgcttacctcggtggattcgcggcggctctagcggatgatccggtctgggtcatgaacgttgtcccggtcgaggctaagctcaatacgctcggtgtcatctacgagcgtggtctaatcggaacgtatcaaaactggtgtgaagccatgtcgacgtatccaagaacgtatgattttatccatgctgactcggttttcacattgtaccaaggtcaatgtgaaccggaggagatattgttggagatggaccgaattcttagaccgggtggtggtgtgattataagagatgacgtggacgttttgatcaaggttaaggaattaaccaaaggattagaatgggaaggtagaattgctgaccacgagaagggtcctcatgaaagagagaagatttactatgcggtgaaacagtattggaccgttcctgcgcctgatgaagataaaaacaacactagtgctctctcctga

SEQ ID NO: 96374 - protein, 631 aa, Arabidopsis thaliana
  peptide (1)..(631): Ceres Seq. ID no. 12733036
  misc_feature (96)..(612): Pfam Name: Putative methyltransferase Pfam Description: Putative methyltransferase
  misc_feature (5)..(625): Homolog of NCBI NO: 15236921 NR Description: hypothetical protein; protein id: At4g00750.1
  misc_feature (11)..(622): Homolog of NCBI NO: 37535962 NR Description: unknown protein [Oryza sativa (japonica
  misc_feature (9)..(628): Homolog of NCBI NO: 15235080 NR Description: putative protein; protein id: At4g10440.1
  misc_feature (25)..(616): Homolog of NCBI NO: 24413975 NR Description: hypothetical protein~similar to Oryza sativa
  misc_feature (65)..(619): Homolog of NCBI NO: 18398763 NR Description: unknown protein; protein id: At1g33170.1
  misc_feature (65)..(619): Homolog of NCBI NO: 9665165 NR Description: Unknown Protein [Arabidopsis thaliana]
  misc_feature (9)..(617): Homolog of NCBI NO: 18071395 NR Description: hypothetical protein [Oryza sativa]
  misc_feature (8)..(615): Homolog of NCBI NO: 18396075 NR Description: expressed protein; protein id: At1g26850.1, by cDNA: gi_14335101 [Arabidopsis thaliana] At1g26850/T2P11_4 [Arabidopsis thaliana]
  misc_feature (77)..(592): Homolog of NCBI NO: 15224241 NR Description: hypothetical protein; protein id: At2g43200.1
  misc_feature (77)..(592): Homolog of NCBI NO: 20197632 NR Description: hypothetical protein [Arabidopsis thaliana]
MNLFTRISSRTKKANLYYVTLVALLCIASYLLGIWQNTAVNPRAAFDDSDGTPCEGFTRPNSTKDLDFDAHHNIQDPPPVTETAVSFPSCAAALSEHTPCEDAKRSLKFSRERLEYRQRHCPEREEILKCRIPAPYGYKTPFRWPASRDVAWFANVPHTELTVEKKNQNWVRYENDRFWFPGGGTMFPRGADAYIDDIGRLIDLSDGSIRTAIDTGCGVASFGAYLLSRNITTMSFAPRDTHEAQVQFALERGVPAMIGIMATIRLPYPSRAFDLAHCSRCLIPWGQNDGAYLMEVDRVLRPGGYWILSGPPINWQKRWKGWERTMDDLNAEQTQIEQVARSLCWKKVVQRDDLAIWQKPFNHIDCKKTREVLKNPEFCRHDQDPDMAWYTKMDSCLTPLPEVDDAEDLKTVAGGKVEKWPARLNAIPPRVNKGALEEITPEAFLENTKLWKQRVSYYKKLDYQLGETGRYRNLVDMNAYLGGFAAALADDPVWVMNVVPVEAKLNTLGVIYERGLIGTYQNWCEAMSTYPRTYDFIHADSVFTLYQGQCEPEEILLEMDRILRPGGGVIIRDDVDVLIKVKELTKGLEWEGRIADHEKGPHEREKIYYAVKQYWTVPAPDEDKNNTSALS

SEQ ID NO: 96375 - protein, 446 aa, Arabidopsis thaliana
  peptide (1)..(446): Ceres Seq. ID no. 12733037
  misc_feature (1)..(427): Pfam Name: Putative methyltransferase Pfam Description: Putative methyltransferase
  misc_feature (1)..(440): Homolog of NCBI NO: 15236921 NR Description: hypothetical protein; protein id: At4g00750.1
  misc_feature (1)..(437): Homolog of NCBI NO: 37535962 NR Description: unknown protein [Oryza sativa (japonica
  misc_feature (1)..(443): Homolog of NCBI NO: 15235080 NR Description: putative protein; protein id: At4g10440.1
  misc_feature (1)..(431): Homolog of NCBI NO: 24413975 NR Description: hypothetical protein~similar to Oryza sativa
  misc_feature (1)..(434): Homolog of NCBI NO: 18398763 NR Description: unknown protein; protein id: At1g33170.1
  misc_feature (1)..(434): Homolog of NCBI NO: 9665165 NR Description: Unknown Protein [Arabidopsis thaliana]
  misc_feature (1)..(432): Homolog of NCBI NO: 18071395 NR Description: hypothetical protein [Oryza sativa]
  misc_feature (1)..(430): Homolog of NCBI NO: 18396075 NR Description: expressed protein; protein id: At1g26850.1, by cDNA: gi_14335101 [Arabidopsis thaliana] At1g26850/T2P11_4 [Arabidopsis thaliana]
  misc_feature (1)..(407): Homolog of NCBI NO: 15224241 NR Description: hypothetical protein; protein id: At2g43200.1
  misc_feature (1)..(407): Homolog of NCBI NO: 20197632 NR Description: hypothetical protein [Arabidopsis thaliana]
MFPRGADAYIDDIGRLIDLSDGSIRTAIDTGCGVASFGAYLLSRNITTMSFAPRDTHEAQVQFALERGVPAMIGIMATIRLPYPSRAFDLAHCSRCLIPWGQNDGAYLMEVDRVLRPGGYWILSGPPINWQKRWKGWERTMDDLNAEQTQIEQVARSLCWKKVVQRDDLAIWQKPFNHIDCKKTREVLKNPEFCRHDQDPDMAWYTKMDSCLTPLPEVDDAEDLKTVAGGKVEKWPARLNAIPPRVNKGALEEITPEAFLENTKLWKQRVSYYKKLDYQLGETGRYRNLVDMNAYLGGFAAALADDPVWVMNVVPVEAKLNTLGVIYERGLIGTYQNWCEAMSTYPRTYDFIHADSVFTLYQGQCEPEEILLEMDRILRPGGGVIIRDDVDVLIKVKELTKGLEWEGRIADHEKGPHEREKIYYAVKQYWTVPAPDEDKNNTSALS

SEQ ID NO: 96376 - protein, 398 aa, Arabidopsis thaliana
  peptide (1)..(398): Ceres Seq. ID no. 12733038
  misc_feature (1)..(379): Pfam Name: Putative methyltransferase Pfam Description: Putative methyltransferase
  misc_feature (1)..(392): Homolog of NCBI NO: 15236921 NR Description: hypothetical protein; protein id: At4g00750.1
  misc_feature (1)..(389): Homolog of NCBI NO: 37535962 NR Description: unknown protein [Oryza sativa (japonica
  misc_feature (1)..(395): Homolog of NCBI NO: 15235080 NR Description: putative protein; protein id: At4g10440.1
  misc_feature (1)..(383): Homolog of NCBI NO: 24413975 NR Description: hypothetical protein~similar to Oryza sativa
  misc_feature (1)..(386): Homolog of NCBI NO: 18398763 NR Description: unknown protein; protein id: At1g33170.1
  misc_feature (1)..(386): Homolog of NCBI NO: 9665165 NR Description: Unknown Protein [Arabidopsis thaliana]
  misc_feature (1)..(384): Homolog of NCBI NO: 18071395 NR Description: hypothetical protein [Oryza sativa]
  misc_feature (1)..(382): Homolog of NCBI NO: 18396075 NR Description: expressed protein; protein id: At1g26850.1, by cDNA: gi_14335101 [Arabidopsis thaliana] At1g26850/T2P11_4 [Arabidopsis thaliana]
  misc_feature (1)..(359): Homolog of NCBI NO: 15224241 NR Description: hypothetical protein; protein id: At2g43200.1
  misc_feature (1)..(359): Homolog of NCBI NO: 20197632 NR Description: hypothetical protein [Arabidopsis thaliana]
MSFAPRDTHEAQVQFALERGVPAMIGIMATIRLPYPSRAFDLAHCSRCLIPWGQNDGAYLMEVDRVLRPGGYWILSGPPINWQKRWKGWERTMDDLNAEQTQIEQVARSLCWKKVVQRDDLAIWQKPFNHIDCKKTREVLKNPEFCRHDQDPDMAWYTKMDSCLTPLPEVDDAEDLKTVAGGKVEKWPARLNAIPPRVNKGALEEITPEAFLENTKLWKQRVSYYKKLDYQLGETGRYRNLVDMNAYLGGFAAALADDPVWVMNVVPVEAKLNTLGVIYERGLIGTYQNWCEAMSTYPRTYDFIHADSVFTLYQGQCEPEEILLEMDRILRPGGGVIIRDDVDVLIKVKELTKGLEWEGRIADHEKGPHEREKIYYAVKQYWTVPAPDEDKNNTSALS

SEQ ID NO: 96377 - DNA, 1554 bp, Arabidopsis thaliana
  misc_feature (1)..(1554): Ceres Seq. ID no. 12733039
  misc_feature: MA Experiment ID: 20000179 Result: Up-regulated in Transcription
  misc_feature: MA Experiment 20000179 PARAMETER Experiment Name: At_Germinating_Seeds_P Parameter: Age (hr) Value: 6 vs. 0
  misc_feature: MA Experiment 20000179 PARAMETER Experiment Name: At_Germinating_Seeds_P Parameter: Tissue Value: Germinating Seeds
  misc_feature: MA Experiment ID: 20000185 Result: Up-regulated in Transcription
  misc_feature: MA Experiment 20000185 PARAMETER Experiment Name: At_Roots__P Parameter: Age (day) Value: 7 vs. 21
  misc_feature: MA Experiment 20000185 PARAMETER Experiment Name: At_Roots__P Parameter: Organism Value: A. thaliana
  misc_feature: MA Experiment 20000185 PARAMETER Experiment Name: At_Roots__P Parameter: Tissue Value: Roots vs. Whole Plant
  misc_feature: MA Experiment ID: 20000234 Result: Down-regulated in Transcription
  misc_feature: MA Experiment 20000234 PARAMETER Experiment Name: At_Siliques_P Parameter: Age (day) Value: 21
  misc_feature: MA Experiment 20000234 PARAMETER Experiment Name: At_Siliques_P Parameter: Organism Value: A. thaliana
  misc_feature: MA Experiment 20000234 PARAMETER Experiment Name: At_Siliques_P Parameter: Plant Line Value: WS
  misc_feature: MA Experiment 20000234 PARAMETER Experiment Name: At_Siliques_P Parameter: Tissue Value: Less Than 5mm Siliques vs. Whole Plant
  misc_feature: MA Experiment ID: 20000235 Result: Down-regulated in Transcription
  misc_feature: MA Experiment 20000235 PARAMETER Experiment Name: At_Siliques_P Parameter: Age (day) Value: 21
  misc_feature: MA Experiment 20000235 PARAMETER Experiment Name: At_Siliques_P Parameter: Organism Value: A. thaliana
  misc_feature: MA Experiment 20000235 PARAMETER Experiment Name: At_Siliques_P Parameter: Plant Line Value: WS
  misc_feature: MA Experiment 20000235 PARAMETER Experiment Name: At_Siliques_P Parameter: Tissue Value: 5-10mm Siliques vs. Whole Plant
  misc_feature: MA Experiment ID: 20000264 Result: Down-regulated in Transcription
  misc_feature: MA Experiment 20000264 PARAMETER Experiment Name: At_Open_Flower_P Parameter: Age (day) Value: 21
  misc_feature: MA Experiment 20000264 PARAMETER Experiment Name: At_Open_Flower_P Parameter: Plant Line Value: WS
  misc_feature: MA Experiment 20000264 PARAMETER Experiment Name: At_Open_Flower_P Parameter: Tissue Value: Open Flower vs. Whole Plant
  misc_feature: MA Experiment ID: 20000265 Result: Down-regulated in Transcription
  misc_feature: MA Experiment 20000265 PARAMETER Experiment Name: At_Open_Flower_P Parameter: Age (day) Value: 21
  misc_feature: MA Experiment 20000265 PARAMETER Experiment Name: At_Open_Flower_P Parameter: Plant Line Value: WS
  misc_feature: MA Experiment 20000265 PARAMETER Experiment Name: At_Open_Flower_P Parameter: Tissue Value: Closed Flower vs. Whole Plant
  misc_feature: MA Experiment ID: 20000286 Result: Down-regulated in Transcription
  misc_feature: MA Experiment 20000286 PARAMETER Experiment Name: At_Open_Flower_P Parameter: Age (day) Value: 21
  misc_feature: MA Experiment 20000286 PARAMETER Experiment Name: At_Open_Flower_P Parameter: Plant Line Value: WS
  misc_feature: MA Experiment 20000286 PARAMETER Experiment Name: At_Open_Flower_P Parameter: Tissue Value: Half Open vs. Whole Plant
  misc_feature: MA Experiment ID: 20000439 Result: Up-regulated in Transcription
  misc_feature: MA Experiment 20000439 PARAMETER Experiment Name: At_Roots__P Parameter: Age (day) Value: 14 vs. 21
  misc_feature: MA Experiment 20000439 PARAMETER Experiment Name: At_Roots__P Parameter: Organism Value: A. thaliana
  misc_feature: MA Experiment 20000439 PARAMETER Experiment Name: At_Roots__P Parameter: Tissue Value: Roots vs. Whole Plant
  misc_feature: MA Experiment ID: 20001451 Result: Up-regulated in Transcription
  misc_feature: MA Experiment 20001451 PARAMETER Experiment Name: At_Far-red-induction_P Parameter: Age (day) Value: 7
  misc_feature: MA Experiment 20001451 PARAMETER Experiment Name: At_Far-red-induction_P Parameter: Light Value: Far-red vs. White
  misc_feature: MA Experiment 20001451 PARAMETER Experiment Name: At_Far-red-induction_P Parameter: Organism Value: A. thaliana
  misc_feature: MA Experiment 20001451 PARAMETER Experiment Name: At_Far-red-induction_P Parameter: Plant Line Value: Columbia
  misc_feature: MA Experiment 20001451 PARAMETER Experiment Name: At_Far-red-induction_P Parameter: Timepoint (hr) Value: 24
  misc_feature: MA Experiment 20001451 PARAMETER Experiment Name: At_Far-red-induction_P Parameter: Tissue Value: Whole Plant
  misc_feature: MA Experiment ID: 20001557 Result: Down-regulated in Transcription
  misc_feature: MA Experiment 20001557 PARAMETER Experiment Name: At_Drought_Soil_Dry_P Parameter: Age (day) Value: 27
  misc_feature: MA Experiment 20001557 PARAMETER Experiment Name: At_Drought_Soil_Dry_P Parameter: Organism Value: A. thaliana
  misc_feature: MA Experiment 20001557 PARAMETER Experiment Name: At_Drought_Soil_Dry_P Parameter: Plant Line Value: WS
  misc_feature: MA Experiment 20001557 PARAMETER Experiment Name: At_Drought_Soil_Dry_P Parameter: Post Timepoint (hr) Value: 3
  misc_feature: MA Experiment 20001557 PARAMETER Experiment Name: At_Drought_Soil_Dry_P Parameter: Post-Treatment Value: Re-Water vs. No Drought
  misc_feature: MA Experiment 20001557 PARAMETER Experiment Name: At_Drought_Soil_Dry_P Parameter: Timepoint (day) Value: 13
  misc_feature: MA Experiment 20001557 PARAMETER Experiment Name: At_Drought_Soil_Dry_P Parameter: Treatment Value: Drought vs. No Drought
  misc_feature: MA Experiment ID: 20001558 Result: Down-regulated in Transcription
  misc_feature: MA Experiment 20001558 PARAMETER Experiment Name: At_Drought_Soil_Dry_P Parameter: Age (day) Value: 27
  misc_feature: MA Experiment 20001558 PARAMETER Experiment Name: At_Drought_Soil_Dry_P Parameter: Organism Value: A. thaliana
  misc_feature: MA Experiment 20001558 PARAMETER Experiment Name: At_Drought_Soil_Dry_P Parameter: Plant Line Value: WS
  misc_feature: MA Experiment 20001558 PARAMETER Experiment Name: At_Drought_Soil_Dry_P Parameter: Post Timepoint (hr) Value: 6
  misc_feature: MA Experiment 20001558 PARAMETER Experiment Name: At_Drought_Soil_Dry_P Parameter: Post-Treatment Value: Re-Water vs. No Drought
  misc_feature: MA Experiment 20001558 PARAMETER Experiment Name: At_Drought_Soil_Dry_P Parameter: Timepoint (day) Value: 13
  misc_feature: MA Experiment 20001558 PARAMETER Experiment Name: At_Drought_Soil_Dry_P Parameter: Treatment Value: Drought vs. No Drought
  misc_feature: MA Experiment ID: 20001560 Result: Down-regulated in Transcription
  misc_feature: MA Experiment 20001560 PARAMETER Experiment Name: At_Drought_Soil_Dry_P Parameter: Age (day) Value: 28
  misc_feature: MA Experiment 20001560 PARAMETER Experiment Name: At_Drought_Soil_Dry_P Parameter: Organism Value: A. thaliana
  misc_feature: MA Experiment 20001560 PARAMETER Experiment Name: At_Drought_Soil_Dry_P Parameter: Plant Line Value: WS
  misc_feature: MA Experiment 20001560 PARAMETER Experiment Name: At_Drought_Soil_Dry_P Parameter: Post Timepoint (hr) Value: None
  misc_feature: MA Experiment 20001560 PARAMETER Experiment Name: At_Drought_Soil_Dry_P Parameter: Post-Treatment Value: None
  misc_feature: MA Experiment 20001560 PARAMETER Experiment Name: At_Drought_Soil_Dry_P Parameter: Timepoint (day) Value: 14
  misc_feature: MA Experiment 20001560 PARAMETER Experiment Name: At_Drought_Soil_Dry_P Parameter: Treatment Value: Drought vs. No Drought
  misc_feature: MA Experiment ID: 20001905 Result: Down-regulated in Transcription
  misc_feature: MA Experiment 20001905 PARAMETER Experiment Name: At_Drought_Reproduction_P Parameter: Age (day) Value: 40
  misc_feature: MA Experiment 20001905 PARAMETER Experiment Name: At_Drought_Reproduction_P Parameter: Organism Value: A. thaliana
  misc_feature: MA Experiment 20001905 PARAMETER Experiment Name: At_Drought_Reproduction_P Parameter: Plant Line Value: WS
  misc_feature: MA Experiment 20001905 PARAMETER Experiment Name: At_Drought_Reproduction_P Parameter: Timepoint (day) Value: 10
  misc_feature: MA Experiment 20001905 PARAMETER Experiment Name: At_Drought_Reproduction_P Parameter: Tissue Value: Rosettes
  misc_feature: MA Experiment 20001905 PARAMETER Experiment Name: At_Drought_Reproduction_P Parameter: Treatment Value: Drought vs. No Drought
  misc_feature: MA Experiment ID: 20001906 Result: Up-regulated in Transcription
  misc_feature: MA Experiment 20001906 PARAMETER Experiment Name: At_Drought_Reproduction_P Parameter: Age (day) Value: 35
  misc_feature: MA Experiment 20001906 PARAMETER Experiment Name: At_Drought_Reproduction_P Parameter: Organism Value: A. thaliana
  misc_feature: MA Experiment 20001906 PARAMETER Experiment Name: At_Drought_Reproduction_P Parameter: Plant Line Value: WS
  misc_feature: MA Experiment 20001906 PARAMETER Experiment Name: At_Drought_Reproduction_P Parameter: Timepoint (day) Value: 5
  misc_feature: MA Experiment 20001906 PARAMETER Experiment Name: At_Drought_Reproduction_P Parameter: Tissue Value: Siliques
  misc_feature: MA Experiment 20001906 PARAMETER Experiment Name: At_Drought_Reproduction_P Parameter: Treatment Value: Drought vs. No Drought
  misc_feature: MA Experiment ID: 20001908 Result: Up-regulated in Transcription
  misc_feature: MA Experiment 20001908 PARAMETER Experiment Name: At_Drought_Reproduction_P Parameter: Age (day) Value: 40
  misc_feature: MA Experiment 20001908 PARAMETER Experiment Name: At_Drought_Reproduction_P Parameter: Organism Value: A. thaliana
  misc_feature: MA Experiment 20001908 PARAMETER Experiment Name: At_Drought_Reproduction_P Parameter: Plant Line Value: WS
  misc_feature: MA Experiment 20001908 PARAMETER Experiment Name: At_Drought_Reproduction_P Parameter: Timepoint (day) Value: 10
  misc_feature: MA Experiment 20001908 PARAMETER Experiment Name: At_Drought_Reproduction_P Parameter: Tissue Value: Siliques
  misc_feature: MA Experiment 20001908 PARAMETER Experiment Name: At_Drought_Reproduction_P Parameter: Treatment Value: Drought vs. No Drought
atgaagaggaacaacaacaatcttctaacgaacaagaataagtatgtctatcttaaaacggcgtcgcatccagcaaaaagcatcgctaaagctactctgttcctcgtcacctctctcttcatatctgctggtctcttagacttattgggttgtttcgatttcacaacttttacaggtctgaagcaggtaacaactagtatcagaaaatcaccaatcacaagccaaagattccctaaccaatgcggcgtcgttcagaaccaaactcaattatttccccaaaatggctcctcgagaaacaacgacaaacccagaagcagccattcaagaatatccacgtgtccttcttacttccgttggatccacgaagatctacggccatggaaagagacaggtgtaacgagagggatgcttgagaaagccaggaggacggcgcatttcagagtagtaatcctcgacgggagagtgtacgttaagaaatatagaaagtcaatccaaacaagagacgtttttactctgtggggcatcgtacagttactacggtggtacccaggtaggttaccggatcttgagctcatgtttgacccagatgatagaccaaccgtccgatctaaagactttcaaggtcaacaacacccggccccgcctcctttgttccgttattgctctgatgacgccagcttggatattgtcttccctgattggtccttctggggctgggctgaggttaatataaagccttgggataaatcgctagtggcgatagaagaagggaataagatgactcaatggaaagaccgcgtggcgtatgcttattggagaggaaaccctaatgtggctccaactagaagagatcttctcagatgtaatgtctcagctcaagaagattggaacacacgtctctacattcaggattgggatagagagtcaagagaaggattcaagaactctaacctagagaaccaatgcacccacaggtacaagatttatatagaaggatgggcatggtcagtgagtgagaaatatataatggcatgtgattcaatgacattgtacgtgagacctatgttctatgatttttacgtacgaggaatgatgccattacaacattactggccaatcagagacacctctaagtgtacttccctcaaattcgccgtacattgggggaatactcatttggaccaggcgagtaagataggagaagaagggagtaggtttattagagaggaagtgaaaatggaatatgtgtatgactacatgttccatttgatgaacgagtatgcaaaacttttgaagtttaaaccagagattccgtggggagccacggagattacgccggatattatgggctgctcggcgacgggacggtggagagatttcatggaggagtctatggttatgtttcctagtgaagagtctccttgtgagatgccttctccttttaaccctcatgatttaaaagagattcttgagagaaaaactaatttgactcgtcaagttgagtggtgggaagatcaatattttcatgatttagccaatatcaagaagccttga

SEQ ID NO: 96378 - protein, 517 aa, Arabidopsis thaliana
  peptide (1)..(517): Ceres Seq. ID no. 12733040
  misc_feature (108)..(509): Pfam Name: Arabidopsis thaliana protein of unknown function Pfam Description: Arabidopsis thaliana protein of unknown
  misc_feature (1)..(517): Homolog of NCBI NO: 7486461 NR Description: hypothetical protein At2g45830 [imported] - thaliana >gi|3386611|gb|AAC28541.1| unknown protein [Arabidopsis
  misc_feature (136)..(517): Homolog of NCBI NO: 30690136 NR Description: expressed protein [Arabidopsis thaliana]
  misc_feature (11)..(517): Homolog of NCBI NO: 15233070 NR Description: putative protein; protein id: At3g61270.1
  misc_feature (21)..(508): Homolog of NCBI NO: 15229061 NR Description: putative protein; protein id: At3g48980.1
  misc_feature (24)..(508): Homolog of NCBI NO: 15237842 NR Description: putative protein; protein id: At5g23850.1 thaliana] >gi|10176852|dbj|BAB10058.1| contains similarity to
  misc_feature (65)..(508): Homolog of NCBI NO: 15222413 NR Description: hypothetical protein; protein id: At1g63420.1
  misc_feature (65)..(303): Homolog of NCBI NO: 25404907 NR Description: protein F2K11.20 [imported] - Arabidopsis >gi|6633846|gb|AAF19705.1|AC008047_12 F2K11.20 [Arabidopsis
  misc_feature (300)..(508): Homolog of NCBI NO: 25404907 NR Description: protein F2K11.20 [imported] - Arabidopsis >gi|6633846|gb|AAF19705.1|AC008047_12 F2K11.20 [Arabidopsis
  misc_feature (111)..(504): Homolog of NCBI NO: 38346998 NR Description: OSJNBb0039L24.21 [Oryza sativa (japonica
  misc_feature (136)..(504): Homolog of NCBI NO: 21742339 NR Description: OSJNBb0020O11.18 [Oryza sativa (japonica
MKRNNNNLLTNKNKYVYLKTASHPAKSIAKATLFLVTSLFISAGLLDLLGCFDFTTFTGLKQVTTSIRKSPITSQRFPNQCGVVQNQTQLFPQNGSSRNNDKPRSSHSRISTCPSYFRWIHEDLRPWKETGVTRGMLEKARRTAHFRVVILDGRVYVKKYRKSIQTRDVFTLWGIVQLLRWYPGRLPDLELMFDPDDRPTVRSKDFQGQQHPAPPPLFRYCSDDASLDIVFPDWSFWGWAEVNIKPWDKSLVAIEEGNKMTQWKDRVAYAYWRGNPNVAPTRRDLLRCNVSAQEDWNTRLYIQDWDRESREGFKNSNLENQCTHRYKIYIEGWAWSVSEKYIMACDSMTLYVRPMFYDFYVRGMMPLQHYWPIRDTSKCTSLKFAVHWGNTHLDQASKIGEEGSRFIREEVKMEYVYDYMFHLMNEYAKLLKFKPEIPWGATEITPDIMGCSATGRWRDFMEESMVMFPSEESPCEMPSPFNPHDLKEILERKTNLTRQVEWWEDQYFHDLANIKKP

SEQ ID NO: 96379 - protein, 382 aa, Arabidopsis thaliana
  peptide (1)..(382): Ceres Seq. ID no. 12733041
  misc_feature (1)..(374): Pfam Name: Arabidopsis thaliana protein of unknown function Pfam Description: Arabidopsis thaliana protein of unknown
  misc_feature (1)..(382): Homolog of NCBI NO: 7486461 NR Description: hypothetical protein At2g45830 [imported] - thaliana >gi|3386611|gb|AAC28541.1| unknown protein [Arabidopsis
  misc_feature (1)..(382): Homolog of NCBI NO: 30690136 NR Description: expressed protein [Arabidopsis thaliana]
  misc_feature (1)..(382): Homolog of NCBI NO: 15233070 NR Description: putative protein; protein id: At3g61270.1
  misc_feature (1)..(373): Homolog of NCBI NO: 15229061 NR Description: putative protein; protein id: At3g48980.1
  misc_feature (1)..(373): Homolog of NCBI NO: 15237842 NR Description: putative protein; protein id: At5g23850.1 thaliana] >gi|10176852|dbj|BAB10058.1| contains similarity to
  misc_feature (1)..(373): Homolog of NCBI NO: 15222413 NR Description: hypothetical protein; protein id: At1g63420.1
  misc_feature (1)..(168): Homolog of NCBI NO: 25404907 NR Description: protein F2K11.20 [imported] - Arabidopsis >gi|6633846|gb|AAF19705.1|AC008047_12 F2K11.20 [Arabidopsis
  misc_feature (165)..(373): Homolog of NCBI NO: 25404907 NR Description: protein F2K11.20 [imported] - Arabidopsis >gi|6633846|gb|AAF19705.1|AC008047_12 F2K11.20 [Arabidopsis
  misc_feature (1)..(369): Homolog of NCBI NO: 38346998 NR Description: OSJNBb0039L24.21 [Oryza sativa (japonica
  misc_feature (1)..(369): Homolog of NCBI NO: 21742339 NR Description: OSJNBb0020O11.18 [Oryza sativa (japonica
MLEKARRTAHFRVVILDGRVYVKKYRKSIQTRDVFTLWGIVQLLRWYPGRLPDLELMFDPDDRPTVRSKDFQGQQHPAPPPLFRYCSDDASLDIVFPDWSFWGWAEVNIKPWDKSLVAIEEGNKMTQWKDRVAYAYWRGNPNVAPTRRDLLRCNVSAQEDWNTRLYIQDWDRESREGFKNSNLENQCTHRYKIYIEGWAWSVSEKYIMACDSMTLYVRPMFYDFYVRGMMPLQHYWPIRDTSKCTSLKFAVHWGNTHLDQASKIGEEGSRFIREEVKMEYVYDYMFHLMNEYAKLLKFKPEIPWGATEITPDIMGCSATGRWRDFMEESMVMFPSEESPCEMPSPFNPHDLKEILERKTNLTRQVEWWEDQYFHDLANIKKP

SEQ ID NO: 96380 - protein, 326 aa, Arabidopsis thaliana
  peptide (1)..(326): Ceres Seq. ID no. 12733042
  misc_feature (1)..(318): Pfam Name: Arabidopsis thaliana protein of unknown function Pfam Description: Arabidopsis thaliana protein of unknown
  misc_feature (1)..(326): Homolog of NCBI NO: 7486461 NR Description: hypothetical protein At2g45830 [imported] - thaliana >gi|3386611|gb|AAC28541.1| unknown protein [Arabidopsis
  misc_feature (1)..(326): Homolog of NCBI NO: 30690136 NR Description: expressed protein [Arabidopsis thaliana]
  misc_feature (1)..(326): Homolog of NCBI NO: 15233070 NR Description: putative protein; protein id: At3g61270.1
  misc_feature (1)..(317): Homolog of NCBI NO: 15229061 NR Description: putative protein; protein id: At3g48980.1
  misc_feature (1)..(317): Homolog of NCBI NO: 15237842 NR Description: putative protein; protein id: At5g23850.1 thaliana] >gi|10176852|dbj|BAB10058.1| contains similarity to
  misc_feature (1)..(317): Homolog of NCBI NO: 15222413 NR Description: hypothetical protein; protein id: At1g63420.1
  misc_feature (1)..(112): Homolog of NCBI NO: 25404907 NR Description: protein F2K11.20 [imported] - Arabidopsis >gi|6633846|gb|AAF19705.1|AC008047_12 F2K11.20 [Arabidopsis
  misc_feature (109)..(317): Homolog of NCBI NO: 25404907 NR Description: protein F2K11.20 [imported] - Arabidopsis >gi|6633846|gb|AAF19705.1|AC008047_12 F2K11.20 [Arabidopsis
  misc_feature (1)..(313): Homolog of NCBI NO: 38346998 NR Description: OSJNBb0039L24.21 [Oryza sativa (japonica
  misc_feature (1)..(313): Homolog of NCBI NO: 21742339 NR Description: OSJNBb0020O11.18 [Oryza sativa (japonica
MFDPDDRPTVRSKDFQGQQHPAPPPLFRYCSDDASLDIVFPDWSFWGWAEVNIKPWDKSLVAIEEGNKMTQWKDRVAYAYWRGNPNVAPTRRDLLRCNVSAQEDWNTRLYIQDWDRESREGFKNSNLENQCTHRYKIYIEGWAWSVSEKYIMACDSMTLYVRPMFYDFYVRGMMPLQHYWPIRDTSKCTSLKFAVHWGNTHLDQASKIGEEGSRFIREEVKMEYVYDYMFHLMNEYAKLLKFKPEIPWGATEITPDIMGCSATGRWRDFMEESMVMFPSEESPCEMPSPFNPHDLKEILERKTNLTRQVEWWEDQYFHDLANIKKP

SEQ ID NO: 96381 - DNA, 1773 bp, Arabidopsis thaliana
  misc_feature (1)..(1773): Ceres Seq. ID no. 12733071
  misc_feature: MA Experiment ID: 20001451 Result: Up-regulated in Transcription
  misc_feature: MA Experiment 20001451 PARAMETER Experiment Name: At_Far-red-induction_P Parameter: Age (day) Value: 7
  misc_feature: MA Experiment 20001451 PARAMETER Experiment Name: At_Far-red-induction_P Parameter: Light Value: Far-red vs. White
  misc_feature: MA Experiment 20001451 PARAMETER Experiment Name: At_Far-red-induction_P Parameter: Organism Value: A. thaliana
  misc_feature: MA Experiment 20001451 PARAMETER Experiment Name: At_Far-red-induction_P Parameter: Plant Line Value: Columbia
  misc_feature: MA Experiment 20001451 PARAMETER Experiment Name: At_Far-red-induction_P Parameter: Timepoint (hr) Value: 24
  misc_feature: MA Experiment 20001451 PARAMETER Experiment Name: At_Far-red-induction_P Parameter: Tissue Value: Whole Plant
atgcgttttacattcctccgatcaactcggatcttccttgcgaaccatcagaaccacttatcatccttgcaaaacattagaaccattccttcttcttcttcttcacctgtagctatatcctctgtatcgaagttatctgctagcttggatcatctctctgacgtgaaacaagaacatggtttcatggtaaaacaagggatttacaattctctgtttcttcaaaacaagctcttgcaagcttacacgaaaatcagagaattcgatgatgcagataagctcttcgacgaaatgcctttgagaaatattgttacttggaacatactgattcacggggtcattcaacgagacggtgacaccaaccacagagctcatctaggtttttgttatttgagtcggattcttttcactgatgtgagtttggatcatgtgtcgttcatggggttgatacggttgtgtactgattcgaccaatatgaaagctggtatccaattacactgtctgatggtgaaacaaggtcttgaatcgagttgctttccgagtactagtctagttcatttctatgggaaatgtggtctcattgtagaagcaagacgagtttttgaggcggttttggatagagatttagtgctatggaacgctttagtttcgtcgtatgttcttaacggtatgattgatgaagcttttggtttactcaagctgatgggttctgacaaaaacagattcaggggtgattattttactttctcgagtcttctcagtgcatgcaggatcgaacaagggaagcagattcacgccattctcttcaaagtgtcatatcaattcgacattccggtggcgactgcattgctgaatatgtatgctaagagtaaccatttgagtgatgctcgggagtgttttgaatcgatggttgtgagaaatgtagtgtcttggaatgcgatgattgtaggttttgcacaaaatggagaaggaagagaagctatgagactttttggtcaaatgctccttgagaatcttcaaccagatgagcttacctttgcaagtgttctaagttcctgcgccaaattttctgcaatttgggagattaagcaagtgcaagcgatggttactaaaaagggctcagcagattttttgtcggtcgctaattctctgataagttcctactccaggaatggaaatttatctgaagcacttttatgttttcattcgatccgagaacctgatcttgtttcatggacttcagtgataggagctttggcttctcatggattcgcagaagaaagcttgcaaatgtttgaaagtatgctgcagaaacttcaaccagacaagatcacttttttagaggttctgtctgcttgtagccatggaggattagttcaagaagggctccgttgcttcaaacgaatgactgagttttacaagatagaagcagaggatgaacactacacgtgtctgatcgatcttcttggtcgagcaggtttcatcgacgaggcttctgatgttttaaattcaatgcccacagaaccaagcacacatgctttggcagctttcacaggaggatgtaacatccatgagaaaagagaatccatgaaatggggtgcaaagaagcttcttgaaattgaacctaccaaacctgtgaactactccatcctgtcaaacgcttatgtctctgaaggccattggaatcaagcggctctactgcgtaaaagagagaggagaaactgctacaatcccaaaactccaggttgcagttggctaggggactactcaatctag

SEQ ID NO: 96382 - protein, 590 aa, Arabidopsis thaliana
  peptide (1)..(590): Ceres Seq. ID no. 12733072
  misc_feature (545)..(579): Pfam Name: PPR repeat Pfam Description: PPR repeat
  misc_feature (190)..(585): Homolog of NCBI NO: 15221566 NR Description: hypothetical protein; protein id: At1g68930.1
  misc_feature (70)..(237): Homolog of NCBI NO: 15221566 NR Description: hypothetical protein; protein id: At1g68930.1
  misc_feature (164)..(568): Homolog of NCBI NO: 34900940 NR Description: selenium-binding protein-like [Oryza sativa
  misc_feature (40)..(585): Homolog of NCBI NO: 15234006 NR Description: putative protein; protein id: At4g18750.1
  misc_feature (52)..(585): Homolog of NCBI NO: 15232500 NR Description: hypothetical protein; protein id: At3g15130.1
  misc_feature (37)..(567): Homolog of NCBI NO: 15227623 NR Description: unknown protein; protein id: At2g03380.1
  misc_feature (56)..(585): Homolog of NCBI NO: 34915012 NR Description: P0458A05.10 [Oryza sativa (japonica
  misc_feature (70)..(585): Homolog of NCBI NO: 11994503 NR Description: emb|CAB36829.1~gene_id:F4B12.5~strong similarity
  misc_feature (23)..(585): Homolog of NCBI NO: 15226200 NR Description: putative selenium-binding protein; protein id:
  misc_feature (56)..(583): Homolog of NCBI NO: 15220337 NR Description: hypothetical protein; protein id: At1g11290.1
MRFTFLRSTRIFLANHQNHLSSLQNIRTIPSSSSSPVAISSVSKLSASLDHLSDVKQEHGFMVKQGIYNSLFLQNKLLQAYTKIREFDDADKLFDEMPLRNIVTWNILIHGVIQRDGDTNHRAHLGFCYLSRILFTDVSLDHVSFMGLIRLCTDSTNMKAGIQLHCLMVKQGLESSCFPSTSLVHFYGKCGLIVEARRVFEAVLDRDLVLWNALVSSYVLNGMIDEAFGLLKLMGSDKNRFRGDYFTFSSLLSACRIEQGKQIHAILFKVSYQFDIPVATALLNMYAKSNHLSDARECFESMVVRNVVSWNAMIVGFAQNGEGREAMRLFGQMLLENLQPDELTFASVLSSCAKFSAIWEIKQVQAMVTKKGSADFLSVANSLISSYSRNGNLSEALLCFHSIREPDLVSWTSVIGALASHGFAEESLQMFESMLQKLQPDKITFLEVLSACSHGGLVQEGLRCFKRMTEFYKIEAEDEHYTCLIDLLGRAGFIDEASDVLNSMPTEPSTHALAAFTGGCNIHEKRESMKWGAKKLLEIEPTKPVNYSILSNAYVSEGHWNQAALLRKRERRNCYNPKTPGCSWLGDYSI

SEQ ID NO: 96383 - protein, 529 aa, Arabidopsis thaliana
  peptide (1)..(529): Ceres Seq. ID no. 12733073
  misc_feature (484)..(518): Pfam Name: PPR repeat Pfam Description: PPR repeat
  misc_feature (129)..(524): Homolog of NCBI NO: 15221566 NR Description: hypothetical protein; protein id: At1g68930.1
  misc_feature (9)..(176): Homolog of NCBI NO: 15221566 NR Description: hypothetical protein; protein id: At1g68930.1
  misc_feature (103)..(507): Homolog of NCBI NO: 34900940 NR Description: selenium-binding protein-like [Oryza sativa
  misc_feature (1)..(524): Homolog of NCBI NO: 15234006 NR Description: putative protein; protein id: At4g18750.1
  misc_feature (1)..(524): Homolog of NCBI NO: 15232500 NR Description: hypothetical protein; protein id: At3g15130.1
  misc_feature (1)..(506): Homolog of NCBI NO: 15227623 NR Description: unknown protein; protein id: At2g03380.1
  misc_feature (1)..(524): Homolog of NCBI NO: 34915012 NR Description: P0458A05.10 [Oryza sativa (japonica
  misc_feature (9)..(524): Homolog of NCBI NO: 11994503 NR Description: emb|CAB36829.1~gene_id:F4B12.5~strong similarity
  misc_feature (1)..(524): Homolog of NCBI NO: 15226200 NR Description: putative selenium-binding protein; protein id:
  misc_feature (1)..(522): Homolog of NCBI NO: 15220337 NR Description: hypothetical protein; protein id: At1g11290.1
MVKQGIYNSLFLQNKLLQAYTKIREFDDADKLFDEMPLRNIVTWNILIHGVIQRDGDTNHRAHLGFCYLSRILFTDVSLDHVSFMGLIRLCTDSTNMKAGIQLHCLMVKQGLESSCFPSTSLVHFYGKCGLIVEARRVFEAVLDRDLVLWNALVSSYVLNGMIDEAFGLLKLMGSDKNRFRGDYFTFSSLLSACRIEQGKQIHAILFKVSYQFDIPVATALLNMYAKSNHLSDARECFESMVVRNVVSWNAMIVGFAQNGEGREAMRLFGQMLLENLQPDELTFASVLSSCAKFSAIWEIKQVQAMVTKKGSADFLSVANSLISSYSRNGNLSEALLCFHSIREPDLVSWTSVIGALASHGFAEESLQMFESMLQKLQPDKITFLEVLSACSHGGLVQEGLRCFKRMTEFYKIEAEDEHYTCLIDLLGRAGFIDEASDVLNSMPTEPSTHALAAFTGGCNIHEKRESMKWGAKKLLEIEPTKPVNYSILSNAYVSEGHWNQAALLRKRERRNCYNPKTPGCSWLGDYSI

SEQ ID NO: 96384 - protein, 494 aa, Arabidopsis thaliana
  peptide (1)..(494): Ceres Seq. ID no. 12733074
  misc_feature (449)..(483): Pfam Name: PPR repeat Pfam Description: PPR repeat
  misc_feature (94)..(489): Homolog of NCBI NO: 15221566 NR Description: hypothetical protein; protein id: At1g68930.1
  misc_feature (1)..(141): Homolog of NCBI NO: 15221566 NR Description: hypothetical protein; protein id: At1g68930.1
  misc_feature (68)..(472): Homolog of NCBI NO: 34900940 NR Description: selenium-binding protein-like [Oryza sativa
  misc_feature (1)..(489): Homolog of NCBI NO: 15234006 NR Description: putative protein; protein id: At4g18750.1
  misc_feature (1)..(489): Homolog of NCBI NO: 15232500 NR Description: hypothetical protein; protein id: At3g15130.1
  misc_feature (1)..(471): Homolog of NCBI NO: 15227623 NR Description: unknown protein; protein id: At2g03380.1
  misc_feature (1)..(489): Homolog of NCBI NO: 34915012 NR Description: P0458A05.10 [Oryza sativa (japonica
  misc_feature (1)..(489): Homolog of NCBI NO: 11994503 NR Description: emb|CAB36829.1~gene_id:F4B12.5~strong similarity
  misc_feature (1)..(489): Homolog of NCBI NO: 15226200 NR Description: putative selenium-binding protein; protein id:
  misc_feature (1)..(487): Homolog of NCBI NO: 15220337 NR Description: hypothetical protein; protein id: At1g11290.1
MPLRNIVTWNILIHGVIQRDGDTNHRAHLGFCYLSRILFTDVSLDHVSFMGLIRLCTDSTNMKAGIQLHCLMVKQGLESSCFPSTSLVHFYGKCGLIVEARRVFEAVLDRDLVLWNALVSSYVLNGMIDEAFGLLKLMGSDKNRFRGDYFTFSSLLSACRIEQGKQIHAILFKVSYQFDIPVATALLNMYAKSNHLSDARECFESMVVRNVVSWNAMIVGFAQNGEGREAMRLFGQMLLENLQPDELTFASVLSSCAKFSAIWEIKQVQAMVTKKGSADFLSVANSLISSYSRNGNLSEALLCFHSIREPDLVSWTSVIGALASHGFAEESLQMFESMLQKLQPDKITFLEVLSACSHGGLVQEGLRCFKRMTEFYKIEAEDEHYTCLIDLLGRAGFIDEASDVLNSMPTEPSTHALAAFTGGCNIHEKRESMKWGAKKLLEIEPTKPVNYSILSNAYVSEGHWNQAALLRKRERRNCYNPKTPGCSWLGDYSI

SEQ ID NO: 96385 - DNA, 1079 bp, Arabidopsis thaliana
  misc_feature (1)..(1079): Ceres Seq. ID no. 12733091
  misc_feature: MA Experiment ID: 20000314 Result: Down-regulated in Transcription
  misc_feature: MA Experiment 20000314 PARAMETER Experiment Name: At_14day_Shoots-Roots_Sub_P Parameter: Age (day) Value: 14
  misc_feature: MA Experiment 20000314 PARAMETER Experiment Name: At_14day_Shoots-Roots_Sub_P Parameter: Organism Value: A. thaliana
  misc_feature: MA Experiment 20000314 PARAMETER Experiment Name: At_14day_Shoots-Roots_Sub_P Parameter: Plant Line Value: WS
  misc_feature: MA Experiment 20000314 PARAMETER Experiment Name: At_14day_Shoots-Roots_Sub_P Parameter: Tissue Value: Roots vs. Whole Plant
  misc_feature: MA Experiment ID: 20000329 Result: Down-regulated in Transcription
  misc_feature: MA Experiment 20000329 PARAMETER Experiment Name: At_4deg_Cold_Sub_P Parameter: Age (day) Value: 14
  misc_feature: MA Experiment 20000329 PARAMETER Experiment Name: At_4deg_Cold_Sub_P Parameter: Organism Value: A. thaliana
  misc_feature: MA Experiment 20000329 PARAMETER Experiment Name: At_4deg_Cold_Sub_P Parameter: Plant Line Value: WS
  misc_feature: MA Experiment 20000329 PARAMETER Experiment Name: At_4deg_Cold_Sub_P Parameter: Temperature (deg C) Value: 4 vs. 22
  misc_feature: MA Experiment 20000329 PARAMETER Experiment Name: At_4deg_Cold_Sub_P Parameter: Timepoint (hr) Value: 6
  misc_feature: MA Experiment 20000329 PARAMETER Experiment Name: At_4deg_Cold_Sub_P Parameter: Tissue Value: Aerial
  misc_feature: MA Experiment ID: 20000355 Result: Down-regulated in Transcription
  misc_feature: MA Experiment 20000355 PARAMETER Experiment Name: At_Siliques_Sub_P Parameter: Age (day) Value: 21
  misc_feature: MA Experiment 20000355 PARAMETER Experiment Name: At_Siliques_Sub_P Parameter: Organism Value: A. thaliana
  misc_feature: MA Experiment 20000355 PARAMETER Experiment Name: At_Siliques_Sub_P Parameter: Plant Line Value: WS
  misc_feature: MA Experiment 20000355 PARAMETER Experiment Name: At_Siliques_Sub_P Parameter: Tissue Value: Less Than 5mm Siliques vs. Whole Plant
  misc_feature: MA Experiment ID: 20000440 Result: Down-regulated in Transcription
  misc_feature: MA Experiment 20000440 PARAMETER Experiment Name: At_Closed-Flower__Sub_P Parameter: Tissue Value: Closed Flower vs. Whole Plant
  misc_feature: MA Experiment ID: 20001807 Result: Up-regulated in Transcription
  misc_feature: MA Experiment 20001807 PARAMETER Experiment Name: At_50mM_NH4NO3_L-to-H_Sub_P Parameter: Timepoint (hr) Value: 6
  misc_feature: MA Experiment 20001807 PARAMETER Experiment Name: At_50mM_NH4NO3_L-to-H_Sub_P Parameter: Tissue Value: Leaf
  misc_feature: MA Experiment 20001807 PARAMETER Experiment Name: At_50mM_NH4NO3_L-to-H_Sub_P Parameter: Treatment Value: 50mM NH4NO3 vs 100mM Mannitol
ggacttgaaaaattatccttaggagatttttcctgacctatcctcgcgtcgcgccttcttgtcttctctctcaatccagcatattcctacgcaaatcccttatcgttttcatgtttgtcctggtttaaatcttcaatctcctacccggtcttttcatcctccgatggcattccttgttcgttcgccggagatacccaccgtctcggcgagaatcttctccgatgcgaattcgagtgttattagtcatgtgtttatgaggaggaaggctacggtttcggcgattgacgccagagatttgcctggtgttaagaatccgaaatcgagattgtactggcaattctcagctccggtgaaagaagactacaagattagcagagaggaggaagaagaagaagaagaagataagcagagttactacgtgaatatgggtcacgccgttcgtagtatcagagaagagtttcctttgttgttctacaaagagcttaattttgacatttacagggatgatattgttttcaaagaccctatgaacactttcatgggaattgataactacaaatccatatttggggccttacgtttccatggaaggatcttcttcagagcactatgtgtggacattgttagtgtttggcaacccacagagaacactctgatgatacgatggactgttcatggaattcctcgtggtccgtgggagactcgtggtcgattcgatggtacttctgagtataaattcgataagaatggcaagatttatgagcataaagtcgataacatagccattaattcgcctccaaagtttcaaatgctcactgttcaagagcttgttgaagccattagctgcccttcgactcccaagccgacctactttgagttcggagattgattcatcatcatcgtctgaaacatcatgctggtgttatgtatactagtagtcttttgtgtggttataaatagagtggtactgtaatatagatgaagaaggaacgatttaaaataaacccaatagcatgaatacattacacgctttttttgcgtataataatcaataaaacgcctatatgtacataaatttg

SEQ ID NO: 96386 - protein, 241 aa, Arabidopsis thaliana
  peptide (1)..(241): Ceres Seq. ID no. 12733092
  misc_feature (1)..(241): Homolog of NCBI NO: 18407008 NR Description: Expressed protein; protein id: At2g46220.1, by cDNA: gi_13605751, supported by cDNA: gi_15215834, supported cDNA: gi_16226513, supported by cDNA: gi_20147418 [Arabidopsis
  misc_feature (1)..(220): Homolog of NCBI NO: 25408977 NR Description: hypothetical protein At2g46220 [imported] -
  misc_feature (1)..(237): Homolog of NCBI NO: 15219209 NR Description: unknown protein; protein id: At1g16320.1,
  misc_feature (59)..(203): Homolog of NCBI NO: 34904098 NR Description: unnamed protein product [Oryza sativa (japonica group)] >gi|7573630|dbj|BAA94539.1| unnamed protein product
  misc_feature (73)..(240): Homolog of NCBI NO: 18412399 NR Description: expressed protein; protein id: At1g79510.1, by cDNA: 21947., supported by cDNA: gi_13194785, supported by gi_13878082, supported by cDNA: gi_17104752 [Arabidopsis
  misc_feature (77)..(238): Homolog of NCBI NO: 38347356 NR Description: OSJNBa0070C17.17 [Oryza sativa (japonica
  misc_feature (86)..(201): Homolog of NCBI NO: 23126421 NR Description: hypothetical protein [Nostoc punctiforme]
  misc_feature (92)..(201): Homolog of NCBI NO: 23040676 NR Description: hypothetical protein [Trichodesmium erythraeum
  misc_feature (86)..(201): Homolog of NCBI NO: 17228448 NR Description: hypothetical protein [Nostoc sp. PCC 7120]
  misc_feature (103)..(201): Homolog of NCBI NO: 37522054 NR Description: hypothetical protein glr2485 [Gloeobacter
MAFLVRSPEIPTVSARIFSDANSSVISHVFMRRKATVSAIDARDLPGVKNPKSRLYWQFSAPVKEDYKISREEEEEEEEDKQSYYVNMGHAVRSIREEFPLLFYKELNFDIYRDDIVFKDPMNTFMGIDNYKSIFGALRFHGRIFFRALCVDIVSVWQPTENTLMIRWTVHGIPRGPWETRGRFDGTSEYKFDKNGKIYEHKVDNIAINSPPKFQMLTVQELVEAISCPSTPKPTYFEFGD

SEQ ID NO: 96387 - protein, 211 aa, Arabidopsis thaliana
  peptide (1)..(211): Ceres Seq. ID no. 12733093
  misc_feature (1)..(211): Homolog of NCBI NO: 18407008 NR Description: Expressed protein; protein id: At2g46220.1, by cDNA: gi_13605751, supported by cDNA: gi_15215834, supported cDNA: gi_16226513, supported by cDNA: gi_20147418 [Arabidopsis
  misc_feature (1)..(190): Homolog of NCBI NO: 25408977 NR Description: hypothetical protein At2g46220 [imported] -
  misc_feature (1)..(207): Homolog of NCBI NO: 15219209 NR Description: unknown protein; protein id: At1g16320.1,
  misc_feature (29)..(173): Homolog of NCBI NO: 34904098 NR Description: unnamed protein product [Oryza sativa (japonica group)] >gi|7573630|dbj|BAA94539.1| unnamed protein product
  misc_feature (43)..(210): Homolog of NCBI NO: 18412399 NR Description: expressed protein; protein id: At1g79510.1, by cDNA: 21947., supported by cDNA: gi_13194785, supported by gi_13878082, supported by cDNA: gi_17104752 [Arabidopsis
  misc_feature (47)..(208): Homolog of NCBI NO: 38347356 NR Description: OSJNBa0070C17.17 [Oryza sativa (japonica
  misc_feature (56)..(171): Homolog of NCBI NO: 23126421 NR Description: hypothetical protein [Nostoc punctiforme]
  misc_feature (62)..(171): Homolog of NCBI NO: 23040676 NR Description: hypothetical protein [Trichodesmium erythraeum
  misc_feature (56)..(171): Homolog of NCBI NO: 17228448 NR Description: hypothetical protein [Nostoc sp. PCC 7120]
  misc_feature (73)..(171): Homolog of NCBI NO: 37522054 NR Description: hypothetical protein glr2485 [Gloeobacter
MRRKATVSAIDARDLPGVKNPKSRLYWQFSAPVKEDYKISREEEEEEEEDKQSYYVNMGHAVRSIREEFPLLFYKELNFDIYRDDIVFKDPMNTFMGIDNYKSIFGALRFHGRIFFRALCVDIVSVWQPTENTLMIRWTVHGIPRGPWETRGRFDGTSEYKFDKNGKIYEHKVDNIAINSPPKFQMLTVQELVEAISCPSTPKPTYFEFGD

SEQ ID NO: 96388 - protein, 154 aa, Arabidopsis thaliana
  peptide (1)..(154): Ceres Seq. ID no. 12733094
  misc_feature (1)..(154): Homolog of NCBI NO: 18407008 NR Description: Expressed protein; protein id: At2g46220.1, by cDNA: gi_13605751, supported by cDNA: gi_15215834, supported cDNA: gi_16226513, supported by cDNA: gi_20147418 [Arabidopsis
  misc_feature (1)..(133): Homolog of NCBI NO: 25408977 NR Description: hypothetical protein At2g46220 [imported] -
  misc_feature (1)..(150): Homolog of NCBI NO: 15219209 NR Description: unknown protein; protein id: At1g16320.1,
  misc_feature (1)..(116): Homolog of NCBI NO: 34904098 NR Description: unnamed protein product [Oryza sativa (japonica group)] >gi|7573630|dbj|BAA94539.1| unnamed protein product
  misc_feature (1)..(153): Homolog of NCBI NO: 18412399 NR Description: expressed protein; protein id: At1g79510.1, by cDNA: 21947., supported by cDNA: gi_13194785, supported by gi_13878082, supported by cDNA: gi_17104752 [Arabidopsis
  misc_feature (1)..(151): Homolog of NCBI NO: 38347356 NR Description: OSJNBa0070C17.17 [Oryza sativa (japonica
  misc_feature (1)..(114): Homolog of NCBI NO: 23126421 NR Description: hypothetical protein [Nostoc punctiforme]
  misc_feature (5)..(114): Homolog of NCBI NO: 23040676 NR Description: hypothetical protein [Trichodesmium erythraeum
  misc_feature (1)..(114): Homolog of NCBI NO: 17228448 NR Description: hypothetical protein [Nostoc sp. PCC 7120]
  misc_feature (16)..(114): Homolog of NCBI NO: 37522054 NR Description: hypothetical protein glr2485 [Gloeobacter
MGHAVRSIREEFPLLFYKELNFDIYRDDIVFKDPMNTFMGIDNYKSIFGALRFHGRIFFRALCVDIVSVWQPTENTLMIRWTVHGIPRGPWETRGRFDGTSEYKFDKNGKIYEHKVDNIAINSPPKFQMLTVQELVEAISCPSTPKPTYFEFGD

SEQ ID NO: 96389 - DNA, 1122 bp, Arabidopsis thaliana
  misc_feature (1)..(1122): Ceres Seq. ID no. 12733099
  misc_feature: MA Experiment ID: 20000794 Result: Up-regulated in Transcription
  misc_feature: MA Experiment 20000794 PARAMETER Experiment Name: At_Petals_P Parameter: Age (day) Value: 23-25 days
  misc_feature: MA Experiment 20000794 PARAMETER Experiment Name: At_Petals_P Parameter: Plant Line Value: WS
  misc_feature: MA Experiment 20000794 PARAMETER Experiment Name: At_Petals_P Parameter: Tissue Value: Petals vs. Whole plant
ttttttcctgatggtggaagaagcacaattggatcctaaatcgaaatcgattccgaatgagaatttgaaatttggagaaagggctttgtctgccggaggcgccgcttttatatcggcggtcatagtcaatcctctcgatgttgttaagacgagattacaagcacaggctgcaggagttccgtatcaaggctcgtgtcgtcttggttgtttcgacacgaattccacgttggtacatgatttgagaagtaattctgctccagggatgtgtagaattactggctctgcatctgtatgctcagataatcagtacaagggaactcttgatgttttctacaaaattatccgccaggaagggttttctaggctttggagaggtacaaacgcaagtttaactttagccattccgactgttgggatctacatgccttgttatgattattttcgcaacataatggaggagttcacgactgagaagtctccatctttgacggtttatgtccctctagttgctgggacaatagcacgctccttggcttgtatctcttgttaccctgttgagttagcaaggacacggatgcaggcatttaagggaacgcaaagaaatgtgaaactgcctggcgtttggaagacattagttgacgtcgtcaatccagtgaagggctcaaataatggatataggatgttatggactggtcttggtgctcaacttgctagggatgttccattctctgcaatctgctggtcgatacttgagcctacccggagaagcattcagtcggccatgggtgaagaaccaagggcaggcagtataataggtgcaaacttcgctgctggttttgttgcgggtgcagttgctgcagcagctacttgccctctagatgttgcaaagactaggcgtcaaatagagaagaacacagatagagccatgacaatgaccacaagacaaaccttggcagagatttggagggacggagggatgagagggatgtttagtggagcaggggctagagtgggacgagcaggaccatctgtagccattgtggtatcgttttacgaagtggtcaagtacggactgcacaacttccaccaacagtaacacttatactagacagattttgtttt

SEQ ID NO: 96390 - protein, 364 aa, Arabidopsis thaliana
  peptide (1)..(364): Ceres Seq. ID no. 12733100
  misc_feature (4)..(364): Homolog of NCBI NO: 30690323 NR Description: mitochondrial carrier protein family [Arabidopsis
  misc_feature (4)..(364): Homolog of NCBI NO: 19310377 NR Description: At2g46320/F11C10.1 [Arabidopsis thaliana]
  misc_feature (4)..(364): Homolog of NCBI NO: 25408981 NR Description: hypothetical protein At2g46320 [imported] - thaliana >gi|20197376|gb|AAM15049.1| hypothetical protein
  misc_feature (116)..(364): Homolog of NCBI NO: 30690327 NR Description: mitochondrial carrier protein family [Arabidopsis
  misc_feature (19)..(362): Homolog of NCBI NO: 40253478 NR Description: putative mitochondrial carrier protein [Oryza
  misc_feature (2)..(359): Homolog of NCBI NO: 18417093 NR Description: putative protein; protein id: At4g27940.1, by cDNA: 147875., supported by cDNA: gi_16226566 [Arabidopsis >gi|16226567|gb|AAL16202.1|AF428433_1 AT4g27940/T13J8_50
  misc_feature (91)..(364): Homolog of NCBI NO: 34904154 NR Description: P0417G05.20 [Oryza sativa (japonica
  misc_feature (15)..(302): Homolog of NCBI NO: 7486963 NR Description: hypothetical protein T13J8.50 - Arabidopsis >gi|4455353|emb|CAB36763.1| putative protein [Arabidopsis >gi|7269648|emb|CAB79596.1| putative protein [Arabidopsis
  misc_feature (4)..(117): Homolog of NCBI NO: 26449442 NR Description: unknown protein [Arabidopsis thaliana]
  misc_feature (19)..(363): Homolog of NCBI NO: 6321696 NR Description: Hypothetical ORF; Ygr257cp [Saccharomyces >gi|1723767|sp|P53320|YG5F_YEAST PUTATIVE MITOCHONDRIAL CARRIER
FFLMVEEAQLDPKSKSIPNENLKFGERALSAGGAAFISAVIVNPLDVVKTRLQAQAAGVPYQGSCRLGCFDTNSTLVHDLRSNSAPGMCRITGSASVCSDNQYKGTLDVFYKIIRQEGFSRLWRGTNASLTLAIPTVGIYMPCYDYFRNIMEEFTTEKSPSLTVYVPLVAGTIARSLACISCYPVELARTRMQAFKGTQRNVKLPGVWKTLVDVVNPVKGSNNGYRMLWTGLGAQLARDVPFSAICWSILEPTRRSIQSAMGEEPRAGSIIGANFAAGFVAGAVAAAATCPLDVAKTRRQIEKNTDRAMTMTTRQTLAEIWRDGGMRGMFSGAGARVGRAGPSVAIVVSFYEVVKYGLHNFHQQ

SEQ ID NO: 96391 - protein, 361 aa, Arabidopsis thaliana
  peptide (1)..(361): Ceres Seq. ID no. 12733101
  misc_feature (1)..(361): Homolog of NCBI NO: 30690323 NR Description: mitochondrial carrier protein family [Arabidopsis
  misc_feature (1)..(361): Homolog of NCBI NO: 19310377 NR Description: At2g46320/F11C10.1 [Arabidopsis thaliana]
  misc_feature (1)..(361): Homolog of NCBI NO: 25408981 NR Description: hypothetical protein At2g46320 [imported] - thaliana >gi|20197376|gb|AAM15049.1| hypothetical protein
  misc_feature (113)..(361): Homolog of NCBI NO: 30690327 NR Description: mitochondrial carrier protein family [Arabidopsis
  misc_feature (16)..(359): Homolog of NCBI NO: 40253478 NR Description: putative mitochondrial carrier protein [Oryza
  misc_feature (1)..(356): Homolog of NCBI NO: 18417093 NR Description: putative protein; protein id: At4g27940.1, by cDNA: 147875., supported by cDNA: gi_16226566 [Arabidopsis >gi|16226567|gb|AAL16202.1|AF428433_1 AT4g27940/T13J8_50
  misc_feature (88)..(361): Homolog of NCBI NO: 34904154 NR Description: P0417G05.20 [Oryza sativa (japonica
  misc_feature (12)..(299): Homolog of NCBI NO: 7486963 NR Description: hypothetical protein T13J8.50 - Arabidopsis >gi|4455353|emb|CAB36763.1| putative protein [Arabidopsis >gi|7269648|emb|CAB79596.1| putative protein [Arabidopsis
  misc_feature (1)..(114): Homolog of NCBI NO: 26449442 NR Description: unknown protein [Arabidopsis thaliana]
  misc_feature (16)..(360): Homolog of NCBI NO: 6321696 NR Description: Hypothetical ORF; Ygr257cp [Saccharomyces >gi|1723767|sp|P53320|YG5F_YEAST PUTATIVE MITOCHONDRIAL CARRIER
MVEEAQLDPKSKSIPNENLKFGERALSAGGAAFISAVIVNPLDVVKTRLQAQAAGVPYQGSCRLGCFDTNSTLVHDLRSNSAPGMCRITGSASVCSDNQYKGTLDVFYKIIRQEGFSRLWRGTNASLTLAIPTVGIYMPCYDYFRNIMEEFTTEKSPSLTVYVPLVAGTIARSLACISCYPVELARTRMQAFKGTQRNVKLPGVWKTLVDVVNPVKGSNNGYRMLWTGLGAQLARDVPFSAICWSILEPTRRSIQSAMGEEPRAGSIIGANFAAGFVAGAVAAAATCPLDVAKTRRQIEKNTDRAMTMTTRQTLAEIWRDGGMRGMFSGAGARVGRAGPSVAIVVSFYEVVKYGLHNFHQQ

SEQ ID NO: 96392 - protein, 277 aa, Arabidopsis thaliana
  peptide (1)..(277): Ceres Seq. ID no. 12733102
  misc_feature (1)..(277): Homolog of NCBI NO: 30690323 NR Description: mitochondrial carrier protein family [Arabidopsis
  misc_feature (1)..(277): Homolog of NCBI NO: 19310377 NR Description: At2g46320/F11C10.1 [Arabidopsis thaliana]
  misc_feature (1)..(277): Homolog of NCBI NO: 25408981 NR Description: hypothetical protein At2g46320 [imported] - thaliana >gi|20197376|gb|AAM15049.1| hypothetical protein
  misc_feature (29)..(277): Homolog of NCBI NO: 30690327 NR Description: mitochondrial carrier protein family [Arabidopsis
  misc_feature (1)..(275): Homolog of NCBI NO: 40253478 NR Description: putative mitochondrial carrier protein [Oryza
  misc_feature (1)..(272): Homolog of NCBI NO: 18417093 NR Description: putative protein; protein id: At4g27940.1, by cDNA: 147875., supported by cDNA: gi_16226566 [Arabidopsis >gi|16226567|gb|AAL16202.1|AF428433_1 AT4g27940/T13J8_50
  misc_feature (4)..(277): Homolog of NCBI NO: 34904154 NR Description: P0417G05.20 [Oryza sativa (japonica
  misc_feature (1)..(215): Homolog of NCBI NO: 7486963 NR Description: hypothetical protein T13J8.50 - Arabidopsis >gi|4455353|emb|CAB36763.1| putative protein [Arabidopsis >gi|7269648|emb|CAB79596.1| putative protein [Arabidopsis
  misc_feature (1)..(30): Homolog of NCBI NO: 26449442 NR Description: unknown protein [Arabidopsis thaliana]
  misc_feature (1)..(276): Homolog of NCBI NO: 6321696 NR Description: Hypothetical ORF; Ygr257cp [Saccharomyces >gi|1723767|sp|P53320|YG5F_YEAST PUTATIVE MITOCHONDRIAL CARRIER
MCRITGSASVCSDNQYKGTLDVFYKIIRQEGFSRLWRGTNASLTLAIPTVGIYMPCYDYFRNIMEEFTTEKSPSLTVYVPLVAGTIARSLACISCYPVELARTRMQAFKGTQRNVKLPGVWKTLVDVVNPVKGSNNGYRMLWTGLGAQLARDVPFSAICWSILEPTRRSIQSAMGEEPRAGSIIGANFAAGFVAGAVAAAATCPLDVAKTRRQIEKNTDRAMTMTTRQTLAEIWRDGGMRGMFSGAGARVGRAGPSVAIVVSFYEVVKYGLHNFHQQ

SEQ ID NO: 96393 - DNA, 1220 bp, Arabidopsis thaliana
  misc_feature (1)..(1220): Ceres Seq. ID no. 12733103
  misc_feature: MA Experiment ID: 20000182 Result: Up-regulated in Transcription
  misc_feature: MA Experiment 20000182 PARAMETER Experiment Name: At_2mM_SA_P Parameter: Age (day) Value: 14
  misc_feature: MA Experiment 20000182 PARAMETER Experiment Name: At_2mM_SA_P Parameter: Organism Value: A. thaliana
  misc_feature: MA Experiment 20000182 PARAMETER Experiment Name: At_2mM_SA_P Parameter: Plant Line Value: WS
  misc_feature: MA Experiment 20000182 PARAMETER Experiment Name: At_2mM_SA_P Parameter: Timepoint (hr) Value: 6
  misc_feature: MA Experiment 20000182 PARAMETER Experiment Name: At_2mM_SA_P Parameter: Tissue Value: Aerial
  misc_feature: MA Experiment 20000182 PARAMETER Experiment Name: At_2mM_SA_P Parameter: Treatment Value: 2mM SA vs. No Treatment
  misc_feature: MA Experiment ID: 20000185 Result: Down-regulated in Transcription
  misc_feature: MA Experiment 20000185 PARAMETER Experiment Name: At_Roots__P Parameter: Age (day) Value: 7 vs. 21
  misc_feature: MA Experiment 20000185 PARAMETER Experiment Name: At_Roots__P Parameter: Organism Value: A. thaliana
  misc_feature: MA Experiment 20000185 PARAMETER Experiment Name: At_Roots__P Parameter: Tissue Value: Roots vs. Whole Plant
  misc_feature: MA Experiment ID: 20000437 Result: Down-regulated in Transcription
  misc_feature: MA Experiment 20000437 PARAMETER Experiment Name: At_Drought_P Parameter: Age (day) Value: 8
  misc_feature: MA Experiment 20000437 PARAMETER Experiment Name: At_Drought_P Parameter: Organism Value: A. thaliana
  misc_feature: MA Experiment 20000437 PARAMETER Experiment Name: At_Drought_P Parameter: Plant Line Value: WS
  misc_feature: MA Experiment 20000437 PARAMETER Experiment Name: At_Drought_P Parameter: Timepoint (hr) Value: 24
  misc_feature: MA Experiment 20000437 PARAMETER Experiment Name: At_Drought_P Parameter: Tissue Value: Whole Plant
  misc_feature: MA Experiment 20000437 PARAMETER Experiment Name: At_Drought_P Parameter: Treatment Value: Drought vs. No Drought
  misc_feature: MA Experiment ID: 20000438 Result: Down-regulated in Transcription
  misc_feature: MA Experiment 20000438 PARAMETER Experiment Name: At_Shoots__P Parameter: Age (day) Value: 14
  misc_feature: MA Experiment 20000438 PARAMETER Experiment Name: At_Shoots__P Parameter: Tissue Value: Shoots vs. Whole Plant
  misc_feature: MA Experiment ID: 20000439 Result: Down-regulated in Transcription
  misc_feature: MA Experiment 20000439 PARAMETER Experiment Name: At_Roots__P Parameter: Age (day) Value: 14 vs. 21
  misc_feature: MA Experiment 20000439 PARAMETER Experiment Name: At_Roots__P Parameter: Organism Value: A. thaliana
  misc_feature: MA Experiment 20000439 PARAMETER Experiment Name: At_Roots__P Parameter: Tissue Value: Roots vs. Whole Plant
  misc_feature: MA Experiment ID: 20000460 Result: Up-regulated in Transcription
  misc_feature: MA Experiment 20000460 PARAMETER Experiment Name: At_10percent_PEG_P Parameter: Age (day) Value: 12
  misc_feature: MA Experiment 20000460 PARAMETER Experiment Name: At_10percent_PEG_P Parameter: Organism Value: A. thaliana
  misc_feature: MA Experiment 20000460 PARAMETER Experiment Name: At_10percent_PEG_P Parameter: Plant Line Value: WS
  misc_feature: MA Experiment 20000460 PARAMETER Experiment Name: At_10percent_PEG_P Parameter: Timepoint (day) Value: 12
  misc_feature: MA Experiment 20000460 PARAMETER Experiment Name: At_10percent_PEG_P Parameter: Tissue Value: Whole Plant
  misc_feature: MA Experiment 20000460 PARAMETER Experiment Name: At_10percent_PEG_P Parameter: Treatment Value: 10percent PEG vs. No Treatment
  misc_feature: MA Experiment ID: 20000495 Result: Down-regulated in Transcription
  misc_feature: MA Experiment 20000495 PARAMETER Experiment Name: At_Guard_Cells_P Parameter: Harvest Date Value: 8/2/2002
  misc_feature: MA Experiment 20000495 PARAMETER Experiment Name: At_Guard_Cells_P Parameter: Organism Value: A. thaliana
  misc_feature: MA Experiment 20000495 PARAMETER Experiment Name: At_Guard_Cells_P Parameter: Tissue Value: Guard Cells vs. Leaves
  misc_feature: MA Experiment ID: 20000527 Result: Up-regulated in Transcription
  misc_feature: MA Experiment 20000527 PARAMETER Experiment Name: At_10percent_PEG_P Parameter: Age (day) Value: 20
  misc_feature: MA Experiment 20000527 PARAMETER Experiment Name: At_10percent_PEG_P Parameter: Organism Value: A. thaliana
  misc_feature: MA Experiment 20000527 PARAMETER Experiment Name: At_10percent_PEG_P Parameter: Plant Line Value: WS
  misc_feature: MA Experiment 20000527 PARAMETER Experiment Name: At_10percent_PEG_P Parameter: Timepoint (day) Value: 20
  misc_feature: MA Experiment 20000527 PARAMETER Experiment Name: At_10percent_PEG_P Parameter: Tissue Value: Whole Plant
  misc_feature: MA Experiment 20000527 PARAMETER Experiment Name: At_10percent_PEG_P Parameter: Treatment Value: 10percent PEG vs. No Treatment
  misc_feature: MA Experiment ID: 20000794 Result: Down-regulated in Transcription
  misc_feature: MA Experiment 20000794 PARAMETER Experiment Name: At_Petals_P Parameter: Age (day) Value: 23-25 days
  misc_feature: MA Experiment 20000794 PARAMETER Experiment Name: At_Petals_P Parameter: Plant Line Value: WS
  misc_feature: MA Experiment 20000794 PARAMETER Experiment Name: At_Petals_P Parameter: Tissue Value: Petals vs. Whole plant
  misc_feature: MA Experiment ID: 20001905 Result: Down-regulated in Transcription
  misc_feature: MA Experiment 20001905 PARAMETER Experiment Name: At_Drought_Reproduction_P Parameter: Age (day) Value: 40
  misc_feature: MA Experiment 20001905 PARAMETER Experiment Name: At_Drought_Reproduction_P Parameter: Organism Value: A. thaliana
  misc_feature: MA Experiment 20001905 PARAMETER Experiment Name: At_Drought_Reproduction_P Parameter: Plant Line Value: WS
  misc_feature: MA Experiment 20001905 PARAMETER Experiment Name: At_Drought_Reproduction_P Parameter: Timepoint (day) Value: 10
  misc_feature: MA Experiment 20001905 PARAMETER Experiment Name: At_Drought_Reproduction_P Parameter: Tissue Value: Rosettes
  misc_feature: MA Experiment 20001905 PARAMETER Experiment Name: At_Drought_Reproduction_P Parameter: Treatment Value: Drought vs. No Drought
cacatctcccaccaatctcactcaaaagaaaatctaagaaaagattcttaattttctgaagtgaatgcaaagatgatgatggaagagaaacttgtgatcaacgaattggaactagggaaagagcttgctaaccgattgatgaacaatctcaaacacacttcttctgtcgattccaacaaaaccttgatctctgatatcctccgtatttaccagaatgccattttcatgttgagcttcaaccaagacaagaacatccttaagcgaagccttgagatcgatggaaaagattctaaaaacgtcttcaaaaagaggaaagtatcggagaagaacacagagaaagttaaggtttttgttgcaacagaacaagaaaatggctctattgatgatggtcactgctggagaaaatatgggcaaaaagagattcatggatccaaaaatcctagagcatattacagatgcacgcatcgattcacacaagactgtttagcagtgaagcaagttcagaaatcagacacagatccttcccttttcgaagtgaagtatctcggaaaccacacttgtaacaacatcacatccccgaagacgacgacgaacttctctgtttcattgacgaacacgaacatctttgaaggaaacagagtacatgttacagagcaatcggaagacatgaaaccgaccaagtccgaagaagtgatgataagccttgaagatctggagaacaagaagaacattttcagaacgttttctttctctaaccatgagattgagaacggtgtgtggaaaagtaaccttttcttgggaaatttcgtggaagatctttctcctgcaacatcagggtctgcaattaccagcgaggttttatctgcacctgctgctgttgagaattccgaaactgcagattcgtatttctcgtctttggacaatattatcgatttcggacaggattggttgtggtcgtagctttgaataattgatttggtgaatgtaatgtctctctcttaatggcagtaattatagatggtcagtttaatttaagggttattagttattacttattagtatagtaaaaattatttttgccgatggataaaaattggcttataggactaaagttacatgattttggcctttttcattgtttttcagcagggtttatgaattatgatttccctatgaagttggattgtactttatgacaattaataaagaaaggattttat

SEQ ID NO: 96394 - protein, 295 aa, Arabidopsis thaliana; identical to SEQ ID NO: 36841
  peptide (1)..(295): Ceres Seq. ID no. 12733104
  misc_feature (103)..(165): Pfam Name: WRKY DNA -binding domain Pfam Description: WRKY DNA -binding domain
  misc_feature (1)..(295): Homolog of NCBI NO: 15225975 NR Description: WRKY family transcription factor; protein id: supported by cDNA: gi_15430276, supported by cDNA: gi_19423941
  misc_feature (78)..(163): Homolog of NCBI NO: 40253471 NR Description: putative transcription factor WRKY5 [Oryza sativa
  misc_feature (78)..(234): Homolog of NCBI NO: 15236622 NR Description: WRKY family transcription factor; protein id: supported by cDNA: gi_13507100, supported by cDNA: gi_13877710 thaliana] >gi|7486745|pir||T05613 hypothetical protein putative
  misc_feature (78)..(163): Homolog of NCBI NO: 34911952 NR Description: P0694A04.6 [Oryza sativa (japonica
  misc_feature (45)..(190): Homolog of NCBI NO: 15226739 NR Description: WRKY family transcription factor; protein id:
  misc_feature (5)..(173): Homolog of NCBI NO: 15228907 NR Description: WRKY family transcription factor; protein id: supported by cDNA: 34847., supported by cDNA: gi_14532617,
  misc_feature (5)..(173): Homolog of NCBI NO: 21592990 NR Description: DNA-binding protein-like [Arabidopsis thaliana]
  misc_feature (9)..(278): Homolog of NCBI NO: 18420751 NR Description: WRKY family transcription factor; protein id: supported by cDNA: 6469., supported by cDNA: gi_15384218 thaliana] >gi|10178159|dbj|BAB11571.1| gene_id:MLE8.3~unknown
  misc_feature (5)..(172): Homolog of NCBI NO: 11358951 NR Description: DNA-binding protein 4 [imported] - common tobacco
  misc_feature (78)..(184): Homolog of NCBI NO: 15237039 NR Description: WRKY family transcription factor; protein id: supported by cDNA: gi_17064163 [Arabidopsis thaliana]

SEQ ID NO: 96395 - protein, 294 aa, Arabidopsis thaliana; identical to SEQ ID NO: 36842
  peptide (1)..(294): Ceres Seq. ID no. 12733105
  misc_feature (102)..(164): Pfam Name: WRKY DNA -binding domain Pfam Description: WRKY DNA -binding domain
  misc_feature (1)..(294): Homolog of NCBI NO: 15225975 NR Description: WRKY family transcription factor; protein id: supported by cDNA: gi_15430276, supported by cDNA: gi_19423941
  misc_feature (77)..(162): Homolog of NCBI NO: 40253471 NR Description: putative transcription factor WRKY5 [Oryza sativa
  misc_feature (77)..(233): Homolog of NCBI NO: 15236622 NR Description: WRKY family transcription factor; protein id: supported by cDNA: gi_13507100, supported by cDNA: gi_13877710 thaliana] >gi|7486745|pir||T05613 hypothetical protein putative
  misc_feature (77)..(162): Homolog of NCBI NO: 34911952 NR Description: P0694A04.6 [Oryza sativa (japonica
  misc_feature (44)..(189): Homolog of NCBI NO: 15226739 NR Description: WRKY family transcription factor; protein id:
  misc_feature (4)..(172): Homolog of NCBI NO: 15228907 NR Description: WRKY family transcription factor; protein id: supported by cDNA: 34847., supported by cDNA: gi_14532617,
  misc_feature (4)..(172): Homolog of NCBI NO: 21592990 NR Description: DNA-binding protein-like [Arabidopsis thaliana]
  misc_feature (8)..(277): Homolog of NCBI NO: 18420751 NR Description: WRKY family transcription factor; protein id: supported by cDNA: 6469., supported by cDNA: gi_15384218 thaliana] >gi|10178159|dbj|BAB11571.1| gene_id:MLE8.3~unknown
  misc_feature (4)..(171): Homolog of NCBI NO: 11358951 NR Description: DNA-binding protein 4 [imported] - common tobacco
  misc_feature (77)..(183): Homolog of NCBI NO: 15237039 NR Description: WRKY family transcription factor; protein id: supported by cDNA: gi_17064163 [Arabidopsis thaliana]

SEQ ID NO: 96396 - protein, 293 aa, Arabidopsis thaliana; identical to SEQ ID NO: 36843
  peptide (1)..(293): Ceres Seq. ID no. 12733106
  misc_feature (101)..(163): Pfam Name: WRKY DNA -binding domain Pfam Description: WRKY DNA -binding domain
  misc_feature (1)..(293): Homolog of NCBI NO: 15225975 NR Description: WRKY family transcription factor; protein id: supported by cDNA: gi_15430276, supported by cDNA: gi_19423941
  misc_feature (76)..(161): Homolog of NCBI NO: 40253471 NR Description: putative transcription factor WRKY5 [Oryza sativa
  misc_feature (76)..(232): Homolog of NCBI NO: 15236622 NR Description: WRKY family transcription factor; protein id: supported by cDNA: gi_13507100, supported by cDNA: gi_13877710 thaliana] >gi|7486745|pir||T05613 hypothetical protein putative
  misc_feature (76)..(161): Homolog of NCBI NO: 34911952 NR Description: P0694A04.6 [Oryza sativa (japonica
  misc_feature (43)..(188): Homolog of NCBI NO: 15226739 NR Description: WRKY family transcription factor; protein id:
  misc_feature (3)..(171): Homolog of NCBI NO: 15228907 NR Description: WRKY family transcription factor; protein id: supported by cDNA: 34847., supported by cDNA: gi_14532617,
  misc_feature (3)..(171): Homolog of NCBI NO: 21592990 NR Description: DNA-binding protein-like [Arabidopsis thaliana]
  misc_feature (7)..(276): Homolog of NCBI NO: 18420751 NR Description: WRKY family transcription factor; protein id: supported by cDNA: 6469., supported by cDNA: gi_15384218 thaliana] >gi|10178159|dbj|BAB11571.1| gene_id:MLE8.3~unknown
  misc_feature (3)..(170): Homolog of NCBI NO: 11358951 NR Description: DNA-binding protein 4 [imported] - common tobacco
  misc_feature (76)..(182): Homolog of NCBI NO: 15237039 NR Description: WRKY family transcription factor; protein id: supported by cDNA: gi_17064163 [Arabidopsis thaliana]

SEQ ID NO: 96397 - DNA, 2414 bp, Arabidopsis thaliana
  misc_feature (1)..(2414): Ceres Seq. ID no. 12733111
  misc_feature: MA Experiment ID: 20000171 Result: Down-regulated in Transcription
  misc_feature: MA Experiment 20000171 PARAMETER Experiment Name: At_42deg_Heat_P Parameter: Age (day) Value: 14
  misc_feature: MA Experiment 20000171 PARAMETER Experiment Name: At_42deg_Heat_P Parameter: Organism Value: A. thaliana
  misc_feature: MA Experiment 20000171 PARAMETER Experiment Name: At_42deg_Heat_P Parameter: Plant Line Value: WS
  misc_feature: MA Experiment 20000171 PARAMETER Experiment Name: At_42deg_Heat_P Parameter: Temperature (deg C) Value: 42 vs. 22
  misc_feature: MA Experiment 20000171 PARAMETER Experiment Name: At_42deg_Heat_P Parameter: Timepoint (hr) Value: 1
  misc_feature: MA Experiment 20000171 PARAMETER Experiment Name: At_42deg_Heat_P Parameter: Tissue Value: Aerial
  misc_feature: MA Experiment ID: 20000173 Result: Down-regulated in Transcription
  misc_feature: MA Experiment 20000173 PARAMETER Experiment Name: At_42deg_Heat_P Parameter: Age (day) Value: 14
  misc_feature: MA Experiment 20000173 PARAMETER Experiment Name: At_42deg_Heat_P Parameter: Organism Value: A. thaliana
  misc_feature: MA Experiment 20000173 PARAMETER Experiment Name: At_42deg_Heat_P Parameter: Plant Line Value: WS
  misc_feature: MA Experiment 20000173 PARAMETER Experiment Name: At_42deg_Heat_P Parameter: Temperature (deg C) Value: 42 vs. 22
  misc_feature: MA Experiment 20000173 PARAMETER Experiment Name: At_42deg_Heat_P Parameter: Timepoint (hr) Value: 6
  misc_feature: MA Experiment 20000173 PARAMETER Experiment Name: At_42deg_Heat_P Parameter: Tissue Value: Aerial
  misc_feature: MA Experiment ID: 20000182 Result: Up-regulated in Transcription
  misc_feature: MA Experiment 20000182 PARAMETER Experiment Name: At_2mM_SA_P Parameter: Age (day) Value: 14
  misc_feature: MA Experiment 20000182 PARAMETER Experiment Name: At_2mM_SA_P Parameter: Organism Value: A. thaliana
  misc_feature: MA Experiment 20000182 PARAMETER Experiment Name: At_2mM_SA_P Parameter: Plant Line Value: WS
  misc_feature: MA Experiment 20000182 PARAMETER Experiment Name: At_2mM_SA_P Parameter: Timepoint (hr) Value: 6
  misc_feature: MA Experiment 20000182 PARAMETER Experiment Name: At_2mM_SA_P Parameter: Tissue Value: Aerial
  misc_feature: MA Experiment 20000182 PARAMETER Experiment Name: At_2mM_SA_P Parameter: Treatment Value: 2mM SA vs. No Treatment
  misc_feature: MA Experiment ID: 20000184 Result: Down-regulated in Transcription
  misc_feature: MA Experiment 20000184 PARAMETER Experiment Name: At_Shoots__P Parameter: Age (day) Value: 7
  misc_feature: MA Experiment 20000184 PARAMETER Experiment Name: At_Shoots__P Parameter: Tissue Value: Shoots vs. Whole Plant
  misc_feature: MA Experiment ID: 20000185 Result: Down-regulated in Transcription
  misc_feature: MA Experiment 20000185 PARAMETER Experiment Name: At_Roots__P Parameter: Age (day) Value: 7 vs. 21
  misc_feature: MA Experiment 20000185 PARAMETER Experiment Name: At_Roots__P Parameter: Organism Value: A. thaliana
  misc_feature: MA Experiment 20000185 PARAMETER Experiment Name: At_Roots__P Parameter: Tissue Value: Roots vs. Whole Plant
  misc_feature: MA Experiment ID: 20000213 Result: Up-regulated in Transcription
  misc_feature: MA Experiment 20000213 PARAMETER Experiment Name: At_4deg_Cold_P Parameter: Timepoint (hr) Value: 2
  misc_feature: MA Experiment ID: 20000234 Result: Down-regulated in Transcription
  misc_feature: MA Experiment 20000234 PARAMETER Experiment Name: At_Siliques_P Parameter: Age (day) Value: 21
  misc_feature: MA Experiment 20000234 PARAMETER Experiment Name: At_Siliques_P Parameter: Organism Value: A. thaliana
  misc_feature: MA Experiment 20000234 PARAMETER Experiment Name: At_Siliques_P Parameter: Plant Line Value: WS
  misc_feature: MA Experiment 20000234 PARAMETER Experiment Name: At_Siliques_P Parameter: Tissue Value: Less Than 5mm Siliques vs. Whole Plant
  misc_feature: MA Experiment ID: 20000235 Result: Down-regulated in Transcription
  misc_feature: MA Experiment 20000235 PARAMETER Experiment Name: At_Siliques_P Parameter: Age (day) Value: 21
  misc_feature: MA Experiment 20000235 PARAMETER Experiment Name: At_Siliques_P Parameter: Organism Value: A. thaliana
  misc_feature: MA Experiment 20000235 PARAMETER Experiment Name: At_Siliques_P Parameter: Plant Line Value: WS
  misc_feature: MA Experiment 20000235 PARAMETER Experiment Name: At_Siliques_P Parameter: Tissue Value: 5-10mm Siliques vs. Whole Plant
  misc_feature: MA Experiment ID: 20000264 Result: Down-regulated in Transcription
  misc_feature: MA Experiment 20000264 PARAMETER Experiment Name: At_Open_Flower_P Parameter: Age (day) Value: 21
  misc_feature: MA Experiment 20000264 PARAMETER Experiment Name: At_Open_Flower_P Parameter: Plant Line Value: WS
  misc_feature: MA Experiment 20000264 PARAMETER Experiment Name: At_Open_Flower_P Parameter: Tissue Value: Open Flower vs. Whole Plant
  misc_feature: MA Experiment ID: 20000265 Result: Down-regulated in Transcription
  misc_feature: MA Experiment 20000265 PARAMETER Experiment Name: At_Open_Flower_P Parameter: Age (day) Value: 21
  misc_feature: MA Experiment 20000265 PARAMETER Experiment Name: At_Open_Flower_P Parameter: Plant Line Value: WS
  misc_feature: MA Experiment 20000265 PARAMETER Experiment Name: At_Open_Flower_P Parameter: Tissue Value: Closed Flower vs. Whole Plant
  misc_feature: MA Experiment ID: 20000286 Result: Down-regulated in Transcription
  misc_feature: MA Experiment 20000286 PARAMETER Experiment Name: At_Open_Flower_P Parameter: Age (day) Value: 21
  misc_feature: MA Experiment 20000286 PARAMETER Experiment Name: At_Open_Flower_P Parameter: Plant Line Value: WS
  misc_feature: MA Experiment 20000286 PARAMETER Experiment Name: At_Open_Flower_P Parameter: Tissue Value: Half Open vs. Whole Plant
  misc_feature: MA Experiment ID: 20000438 Result: Down-regulated in Transcription
  misc_feature: MA Experiment 20000438 PARAMETER Experiment Name: At_Shoots__P Parameter: Age (day) Value: 14
  misc_feature: MA Experiment 20000438 PARAMETER Experiment Name: At_Shoots__P Parameter: Tissue Value: Shoots vs. Whole Plant
  misc_feature: MA Experiment ID: 20000439 Result: Down-regulated in Transcription
  misc_feature: MA Experiment 20000439 PARAMETER Experiment Name: At_Roots__P Parameter: Age (day) Value: 14 vs. 21
  misc_feature: MA Experiment 20000439 PARAMETER Experiment Name: At_Roots__P Parameter: Organism Value: A. thaliana
  misc_feature: MA Experiment 20000439 PARAMETER Experiment Name: At_Roots__P Parameter: Tissue Value: Roots vs. Whole Plant
  misc_feature: MA Experiment ID: 20000452 Result: Up-regulated in Transcription
  misc_feature: MA Experiment 20000452 PARAMETER Experiment Name: At_CS6879_Shoots-Roots_P Parameter: Age (day) Value: 14
  misc_feature: MA Experiment 20000452 PARAMETER Experiment Name: At_CS6879_Shoots-Roots_P Parameter: Organism Value: A. thaliana
  misc_feature: MA Experiment 20000452 PARAMETER Experiment Name: At_CS6879_Shoots-Roots_P Parameter: Plant Line Value: CS6879 vs. WS
  misc_feature: MA Experiment 20000452 PARAMETER Experiment Name: At_CS6879_Shoots-Roots_P Parameter: Tissue Value: Shoots
  misc_feature: MA Experiment ID: 20000460 Result: Down-regulated in Transcription
  misc_feature: MA Experiment 20000460 PARAMETER Experiment Name: At_10percent_PEG_P Parameter: Age (day) Value: 12
  misc_feature: MA Experiment 20000460 PARAMETER Experiment Name: At_10percent_PEG_P Parameter: Organism Value: A. thaliana
  misc_feature: MA Experiment 20000460 PARAMETER Experiment Name: At_10percent_PEG_P Parameter: Plant Line Value: WS
  misc_feature: MA Experiment 20000460 PARAMETER Experiment Name: At_10percent_PEG_P Parameter: Timepoint (day) Value: 12
  misc_feature: MA Experiment 20000460 PARAMETER Experiment Name: At_10percent_PEG_P Parameter: Tissue Value: Whole Plant
  misc_feature: MA Experiment 20000460 PARAMETER Experiment Name: At_10percent_PEG_P Parameter: Treatment Value: 10percent PEG vs. No Treatment
  misc_feature: MA Experiment ID: 20000527 Result: Down-regulated in Transcription
  misc_feature: MA Experiment 20000527 PARAMETER Experiment Name: At_10percent_PEG_P Parameter: Age (day) Value: 20
  misc_feature: MA Experiment 20000527 PARAMETER Experiment Name: At_10percent_PEG_P Parameter: Organism Value: A. thaliana
  misc_feature: MA Experiment 20000527 PARAMETER Experiment Name: At_10percent_PEG_P Parameter: Plant Line Value: WS
  misc_feature: MA Experiment 20000527 PARAMETER Experiment Name: At_10percent_PEG_P Parameter: Timepoint (day) Value: 20
  misc_feature: MA Experiment 20000527 PARAMETER Experiment Name: At_10percent_PEG_P Parameter: Tissue Value: Whole Plant
  misc_feature: MA Experiment 20000527 PARAMETER Experiment Name: At_10percent_PEG_P Parameter: Treatment Value: 10percent PEG vs. No Treatment
  misc_feature: MA Experiment ID: 20000575 Result: Down-regulated in Transcription
  misc_feature: MA Experiment 20000575 PARAMETER Experiment Name: At_100uM_ABA_Mutants__P Parameter: Organism Value: A. thaliana
  misc_feature: MA Experiment 20000575 PARAMETER Experiment Name: At_100uM_ABA_Mutants__P Parameter: Plant Line Value: CS22
  misc_feature: MA Experiment 20000575 PARAMETER Experiment Name: At_100uM_ABA_Mutants__P Parameter: Timepoint (hr) Value: 6
  misc_feature: MA Experiment 20000575 PARAMETER Experiment Name: At_100uM_ABA_Mutants__P Parameter: Tissue Value: Whole Plant
  misc_feature: MA Experiment 20000575 PARAMETER Experiment Name: At_100uM_ABA_Mutants__P Parameter: Treatment Value: 1uM ABA vs. No Treatment
  misc_feature: MA Experiment ID: 20000709 Result: Down-regulated in Transcription
  misc_feature: MA Experiment 20000709 PARAMETER Experiment Name: At_15mM_NH4NO3_L-to-H_P Parameter: Age (hr) Value: 14
  misc_feature: MA Experiment 20000709 PARAMETER Experiment Name: At_15mM_NH4NO3_L-to-H_P Parameter: Organism Value: A. thaliana
  misc_feature: MA Experiment 20000709 PARAMETER Experiment Name: At_15mM_NH4NO3_L-to-H_P Parameter: Plant Line Value: WS
  misc_feature: MA Experiment 20000709 PARAMETER Experiment Name: At_15mM_NH4NO3_L-to-H_P Parameter: Timepoint (hr) Value: 4
  misc_feature: MA Experiment 20000709 PARAMETER Experiment Name: At_15mM_NH4NO3_L-to-H_P Parameter: Tissue Value: Aerial
  misc_feature: MA Experiment 20000709 PARAMETER Experiment Name: At_15mM_NH4NO3_L-to-H_P Parameter: Treatment Value: 15mM NH4NO3 vs. 30mM Mannitol
  misc_feature: MA Experiment ID: 20000794 Result: Down-regulated in Transcription
  misc_feature: MA Experiment 20000794 PARAMETER Experiment Name: At_Petals_P Parameter: Age (day) Value: 23-25 days
  misc_feature: MA Experiment 20000794 PARAMETER Experiment Name: At_Petals_P Parameter: Plant Line Value: WS
  misc_feature: MA Experiment 20000794 PARAMETER Experiment Name: At_Petals_P Parameter: Tissue Value: Petals vs. Whole plant
  misc_feature: MA Experiment ID: 20001554 Result: Down-regulated in Transcription
  misc_feature: MA Experiment 20001554 PARAMETER Experiment Name: At_Drought_Soil_Dry_P Parameter: Age (day) Value: 21
  misc_feature: MA Experiment 20001554 PARAMETER Experiment Name: At_Drought_Soil_Dry_P Parameter: Organism Value: A. thaliana
  misc_feature: MA Experiment 20001554 PARAMETER Experiment Name: At_Drought_Soil_Dry_P Parameter: Plant Line Value: WS
  misc_feature: MA Experiment 20001554 PARAMETER Experiment Name: At_Drought_Soil_Dry_P Parameter: Post Timepoint (hr) Value: None
  misc_feature: MA Experiment 20001554 PARAMETER Experiment Name: At_Drought_Soil_Dry_P Parameter: Post-Treatment Value: None
  misc_feature: MA Experiment 20001554 PARAMETER Experiment Name: At_Drought_Soil_Dry_P Parameter: Timepoint (day) Value: 7
  misc_feature: MA Experiment 20001554 PARAMETER Experiment Name: At_Drought_Soil_Dry_P Parameter: Treatment Value: Drought vs. No Drought
  misc_feature: MA Experiment ID: 20001555 Result: Down-regulated in Transcription
  misc_feature: MA Experiment 20001555 PARAMETER Experiment Name: At_Drought_Soil_Dry_P Parameter: Age (day) Value: 24
  misc_feature: MA Experiment 20001555 PARAMETER Experiment Name: At_Drought_Soil_Dry_P Parameter: Organism Value: A. thaliana
  misc_feature: MA Experiment 20001555 PARAMETER Experiment Name: At_Drought_Soil_Dry_P Parameter: Plant Line Value: WS
  misc_feature: MA Experiment 20001555 PARAMETER Experiment Name: At_Drought_Soil_Dry_P Parameter: Post Timepoint (hr) Value: None
  misc_feature: MA Experiment 20001555 PARAMETER Experiment Name: At_Drought_Soil_Dry_P Parameter: Post-Treatment Value: None
  misc_feature: MA Experiment 20001555 PARAMETER Experiment Name: At_Drought_Soil_Dry_P Parameter: Timepoint (day) Value: 10
  misc_feature: MA Experiment 20001555 PARAMETER Experiment Name: At_Drought_Soil_Dry_P Parameter: Treatment Value: Drought vs. No Drought
  misc_feature: MA Experiment ID: 20001556 Result: Down-regulated in Transcription
  misc_feature: MA Experiment 20001556 PARAMETER Experiment Name: At_Drought_Soil_Dry_P Parameter: Age (day) Value: 26
  misc_feature: MA Experiment 20001556 PARAMETER Experiment Name: At_Drought_Soil_Dry_P Parameter: Organism Value: A. thaliana
  misc_feature: MA Experiment 20001556 PARAMETER Experiment Name: At_Drought_Soil_Dry_P Parameter: Plant Line Value: WS
  misc_feature: MA Experiment 20001556 PARAMETER Experiment Name: At_Drought_Soil_Dry_P Parameter: Post Timepoint (hr) Value: None
  misc_feature: MA Experiment 20001556 PARAMETER Experiment Name: At_Drought_Soil_Dry_P Parameter: Post-Treatment Value: None
  misc_feature: MA Experiment 20001556 PARAMETER Experiment Name: At_Drought_Soil_Dry_P Parameter: Timepoint (day) Value: 12
  misc_feature: MA Experiment 20001556 PARAMETER Experiment Name: At_Drought_Soil_Dry_P Parameter: Treatment Value: Drought vs. No Drought
  misc_feature: MA Experiment ID: 20001557 Result: Down-regulated in Transcription
  misc_feature: MA Experiment 20001557 PARAMETER Experiment Name: At_Drought_Soil_Dry_P Parameter: Age (day) Value: 27
  misc_feature: MA Experiment 20001557 PARAMETER Experiment Name: At_Drought_Soil_Dry_P Parameter: Organism Value: A. thaliana
  misc_feature: MA Experiment 20001557 PARAMETER Experiment Name: At_Drought_Soil_Dry_P Parameter: Plant Line Value: WS
  misc_feature: MA Experiment 20001557 PARAMETER Experiment Name: At_Drought_Soil_Dry_P Parameter: Post Timepoint (hr) Value: 3
  misc_feature: MA Experiment 20001557 PARAMETER Experiment Name: At_Drought_Soil_Dry_P Parameter: Post-Treatment Value: Re-Water vs. No Drought
  misc_feature: MA Experiment 20001557 PARAMETER Experiment Name: At_Drought_Soil_Dry_P Parameter: Timepoint (day) Value: 13
  misc_feature: MA Experiment 20001557 PARAMETER Experiment Name: At_Drought_Soil_Dry_P Parameter: Treatment Value: Drought vs. No Drought
  misc_feature: MA Experiment ID: 20001558 Result: Down-regulated in Transcription
  misc_feature: MA Experiment 20001558 PARAMETER Experiment Name: At_Drought_Soil_Dry_P Parameter: Age (day) Value: 27
  misc_feature: MA Experiment 20001558 PARAMETER Experiment Name: At_Drought_Soil_Dry_P Parameter: Organism Value: A. thaliana
  misc_feature: MA Experiment 20001558 PARAMETER Experiment Name: At_Drought_Soil_Dry_P Parameter: Plant Line Value: WS
  misc_feature: MA Experiment 20001558 PARAMETER Experiment Name: At_Drought_Soil_Dry_P Parameter: Post Timepoint (hr) Value: 6
  misc_feature: MA Experiment 20001558 PARAMETER Experiment Name: At_Drought_Soil_Dry_P Parameter: Post-Treatment Value: Re-Water vs. No Drought
  misc_feature: MA Experiment 20001558 PARAMETER Experiment Name: At_Drought_Soil_Dry_P Parameter: Timepoint (day) Value: 13
  misc_feature: MA Experiment 20001558 PARAMETER Experiment Name: At_Drought_Soil_Dry_P Parameter: Treatment Value: Drought vs. No Drought
  misc_feature: MA Experiment ID: 20001559 Result: Down-regulated in Transcription
  misc_feature: MA Experiment 20001559 PARAMETER Experiment Name: At_Drought_Soil_Dry_P Parameter: Age (day) Value: 28
  misc_feature: MA Experiment 20001559 PARAMETER Experiment Name: At_Drought_Soil_Dry_P Parameter: Organism Value: A. thaliana
  misc_feature: MA Experiment 20001559 PARAMETER Experiment Name: At_Drought_Soil_Dry_P Parameter: Plant Line Value: WS
  misc_feature: MA Experiment 20001559 PARAMETER Experiment Name: At_Drought_Soil_Dry_P Parameter: Post Timepoint (hr) Value: 29
  misc_feature: MA Experiment 20001559 PARAMETER Experiment Name: At_Drought_Soil_Dry_P Parameter: Post-Treatment Value: Re-Water vs. No Drought
  misc_feature: MA Experiment 20001559 PARAMETER Experiment Name: At_Drought_Soil_Dry_P Parameter: Timepoint (day) Value: 14
  misc_feature: MA Experiment 20001559 PARAMETER Experiment Name: At_Drought_Soil_Dry_P Parameter: Treatment Value: Drought vs. No Drought
  misc_feature: MA Experiment ID: 20001560 Result: Down-regulated in Transcription
  misc_feature: MA Experiment 20001560 PARAMETER Experiment Name: At_Drought_Soil_Dry_P Parameter: Age (day) Value: 28
  misc_feature: MA Experiment 20001560 PARAMETER Experiment Name: At_Drought_Soil_Dry_P Parameter: Organism Value: A. thaliana
  misc_feature: MA Experiment 20001560 PARAMETER Experiment Name: At_Drought_Soil_Dry_P Parameter: Plant Line Value: WS
  misc_feature: MA Experiment 20001560 PARAMETER Experiment Name: At_Drought_Soil_Dry_P Parameter: Post Timepoint (hr) Value: None
  misc_feature: MA Experiment 20001560 PARAMETER Experiment Name: At_Drought_Soil_Dry_P Parameter: Post-Treatment Value: None
  misc_feature: MA Experiment 20001560 PARAMETER Experiment Name: At_Drought_Soil_Dry_P Parameter: Timepoint (day) Value: 14
  misc_feature: MA Experiment 20001560 PARAMETER Experiment Name: At_Drought_Soil_Dry_P Parameter: Treatment Value: Drought vs. No Drought
  misc_feature: MA Experiment ID: 20001904 Result: Down-regulated in Transcription
  misc_feature: MA Experiment 20001904 PARAMETER Experiment Name: At_Drought_Reproduction_P Parameter: Age (day) Value: 37
  misc_feature: MA Experiment 20001904 PARAMETER Experiment Name: At_Drought_Reproduction_P Parameter: Organism Value: A. thaliana
  misc_feature: MA Experiment 20001904 PARAMETER Experiment Name: At_Drought_Reproduction_P Parameter: Plant Line Value: WS
  misc_feature: MA Experiment 20001904 PARAMETER Experiment Name: At_Drought_Reproduction_P Parameter: Timepoint (day) Value: 7
  misc_feature: MA Experiment 20001904 PARAMETER Experiment Name: At_Drought_Reproduction_P Parameter: Tissue Value: Rosettes
  misc_feature: MA Experiment 20001904 PARAMETER Experiment Name: At_Drought_Reproduction_P Parameter: Treatment Value: Drought vs. No Drought
  misc_feature: MA Experiment ID: 20001905 Result: Down-regulated in Transcription
  misc_feature: MA Experiment 20001905 PARAMETER Experiment Name: At_Drought_Reproduction_P Parameter: Age (day) Value: 40
  misc_feature: MA Experiment 20001905 PARAMETER Experiment Name: At_Drought_Reproduction_P Parameter: Organism Value: A. thaliana
  misc_feature: MA Experiment 20001905 PARAMETER Experiment Name: At_Drought_Reproduction_P Parameter: Plant Line Value: WS
  misc_feature: MA Experiment 20001905 PARAMETER Experiment Name: At_Drought_Reproduction_P Parameter: Timepoint (day) Value: 10
  misc_feature: MA Experiment 20001905 PARAMETER Experiment Name: At_Drought_Reproduction_P Parameter: Tissue Value: Rosettes
  misc_feature: MA Experiment 20001905 PARAMETER Experiment Name: At_Drought_Reproduction_P Parameter: Treatment Value: Drought vs. No Drought
aacttctttgaacttcaaatagtttaaaatttactctgtttcatcaaattactctgtttcgtcaaattactctgttttgtcagcttgctcttttctaaaacgtggaagtaaataaaattttgacataagtatattttctcccacaggttcaagaatctgtggaagaaaacaatcagcgatgatgaatccccaaagaaacaaattcgtaaggtttaatggaaatgatgatgagttttcgaccaaaactactagaccatcagtatcttcagttatgaaaaccgttagacgaagcttcgaaaaggggtcagagaaaatcagaacctttaagcggcccttaagcgttcattcaaataagaataaagaaaataataagaagaagaagatactaagagtgatgaatccgaacgattcatatcttcaaagctggaacaagattttcttgcttctctctgttgtggctttagcctttgatcctctgtttttctatatcccctatgtgaagcccgagcgattttgtcttaatctagacaagaaactccagacaatcgcttgcgttttccgcactttcatcgacgctttctatgtggttcacatgctgtttcagtttcataccggtttcatcactccttcttctagtggtttcggcagaggagagcttaatgagaaacataaagatatcgctttaagatacctcggctcatactttctaatcgatcttctttcgattctccctattcctcaggtagttgttctagctattgttccaaggatgagacgacccgcgtcgctagtagcaaaagagctactgaaatgggtaatcttttgccaatatgttccgaggatagcgagaatctatccgcttttcaaggaagtaacaagaacttctggtttggtaactgaaactgcttgggctggtgctgctttaaacctattcctctacatgttagctagccatgtttttgggtctttttggtacttgatttcgatagaaaggaaagatagatgttggcgtgaggcgtgtgctaagatacagaattgcactcatgcatacttatactgttcaccaacaggggaagacaataggttatttttaaacggttcttgtccgttgatcgatcccgaagaaatcacaaactcgacggttttcaactttggtatattcgctgatgcattgcagtctggagttgtggagtctagagatttccctaagaagtttttctactgtttctggtggggtctccgcaatcttagtgctttgggccaaaacttgaagacgagtgcctttgaaggagagatcatttttgcaatagtcatttgtatttctggactagtcttgtttgctctcctcattggaaatatgcagaaatatttgcaatcaactactgtaagagttgaggaaatgagagtgaaaaggagagatgcagagcaatggatgtctcatcggatgttgccagacgatctgagaaaacgtatccgtaaatacgaacagtataaatggcaagaaaccaaaggagttgaggaagaagctcttctctctagtcttccaaaagatctcagaaaggacattaaacgccatctttgtctcaagttgctcaaaaaggtgccttggttccaagctatggatgatcggttactagatgctctatgtgctcgtctcaaaacggttctttatacagagaagagttacattgtgcgtgaaggtgaaccagtggaggatatgttgtttataatgagaggaaatttaatcagcaccactacttatggtggcagaactggtttcttcaattctgttgacttagttgctggtgatttctgtggagatcttctcacttgggcattagatcctctcagttcccaattccctatctctagtagaaccgttcaagctttgacagaagtcgaaggctttcttctctcagctgatgatctcaagtttgtcgctactcagtatcgtcgcctccatagcaagcaactccgacacatgttcaggttttattcagtgcaatggcagacatgggcagcatgttttatacaagcagcatggaagagacattgtagaaggaagctctcaaaggctttacgtgaagaagaaggcaaactacataacactcttcagaacgatgattcaggaggcaataaacttaacttaggtgctgcgatttatgcgtcgaggtttgcttctcatgctctgaggaatctaagagcaaatgcagcagcccgaaattctagattcccgcacatgttaactttgttgcctcagaaaccagccgatcctgagtttcctatggatgaaacctagttgtgtatatagttgttgactctatctctatgtaatgtgatcgctagtattttttgcaaatgattatgtaaccagtaaagagctttatgtgaaataatcaataggaaaaattctt

SEQ ID NO: 96398 - protein, 706 aa, Arabidopsis thaliana
  peptide (1)..(706): Ceres Seq. ID no. 12733112
  misc_feature (123)..(394): Pfam Name: Ion transport protein Pfam Description: Ion transport protein
  misc_feature (14)..(703): Homolog of NCBI NO: 7484881 NR Description: cyclic nucleotide gated channel homolog F3I3.30 -
  misc_feature (6)..(703): Homolog of NCBI NO: 22328204 NR Description: cyclic nucleotide-regulated ion channel,
  misc_feature (33)..(706): Homolog of NCBI NO: 18378827 NR Description: cyclic nucleotide-regulated ion channel; protein
  misc_feature (6)..(703): Homolog of NCBI NO: 25407074 NR Description: hypothetical protein AT4g01010 [imported] - thaliana >gi|7228242|emb|CAB45784.2| cyclic nucleotide gated (CNGC4) like protein [Arabidopsis thaliana]
  misc_feature (2)..(705): Homolog of NCBI NO: 15238657 NR Description: cyclic nucleotide-regulated ion channel (CNGC1); id: At5g53130.1, supported by cDNA: gi_13877752 [Arabidopsis
  misc_feature (80)..(663): Homolog of NCBI NO: 15225983 NR Description: cyclic nucleotide-regulated ion channel, protein id: At2g46440.1 [Arabidopsis thaliana]
  misc_feature (36)..(705): Homolog of NCBI NO: 18400426 NR Description: cyclic nucleotide-regulated ion channel (CNGC6); id: At2g23980.1, supported by cDNA: gi_14532659 [Arabidopsis
  misc_feature (1)..(704): Homolog of NCBI NO: 15242908 NR Description: cyclic nucleotide-regulated ion channel (CNGC5); id: At5g57940.1 [Arabidopsis thaliana] >gi|25453537|pir||T52573
  misc_feature (36)..(706): Homolog of NCBI NO: 15234769 NR Description: cyclic nucleotide-regulated ion channel, protein id: At4g30560.1 [Arabidopsis thaliana]
  misc_feature (71)..(638): Homolog of NCBI NO: 15226370 NR Description: cyclic nucleotide-regulated ion channel, protein id: At2g28260.1 [Arabidopsis thaliana]
MMNPQRNKFVRFNGNDDEFSTKTTRPSVSSVMKTVRRSFEKGSEKIRTFKRPLSVHSNKNKENNKKKKILRVMNPNDSYLQSWNKIFLLLSVVALAFDPLFFYIPYVKPERFCLNLDKKLQTIACVFRTFIDAFYVVHMLFQFHTGFITPSSSGFGRGELNEKHKDIALRYLGSYFLIDLLSILPIPQVVVLAIVPRMRRPASLVAKELLKWVIFCQYVPRIARIYPLFKEVTRTSGLVTETAWAGAALNLFLYMLASHVFGSFWYLISIERKDRCWREACAKIQNCTHAYLYCSPTGEDNRLFLNGSCPLIDPEEITNSTVFNFGIFADALQSGVVESRDFPKKFFYCFWWGLRNLSALGQNLKTSAFEGEIIFAIVICISGLVLFALLIGNMQKYLQSTTVRVEEMRVKRRDAEQWMSHRMLPDDLRKRIRKYEQYKWQETKGVEEEALLSSLPKDLRKDIKRHLCLKLLKKVPWFQAMDDRLLDALCARLKTVLYTEKSYIVREGEPVEDMLFIMRGNLISTTTYGGRTGFFNSVDLVAGDFCGDLLTWALDPLSSQFPISSRTVQALTEVEGFLLSADDLKFVATQYRRLHSKQLRHMFRFYSVQWQTWAACFIQAAWKRHCRRKLSKALREEEGKLHNTLQNDDSGGNKLNLGAAIYASRFASHALRNLRANAAARNSRFPHMLTLLPQKPADPEFPMDET

SEQ ID NO: 96399 - protein, 705 aa, Arabidopsis thaliana
  peptide (1)..(705): Ceres Seq. ID no. 12733113
  misc_feature (122)..(393): Pfam Name: Ion transport protein Pfam Description: Ion transport protein
  misc_feature (13)..(702): Homolog of NCBI NO: 7484881 NR Description: cyclic nucleotide gated channel homolog F3I3.30 -
  misc_feature (5)..(702): Homolog of NCBI NO: 22328204 NR Description: cyclic nucleotide-regulated ion channel,
  misc_feature (32)..(705): Homolog of NCBI NO: 18378827 NR Description: cyclic nucleotide-regulated ion channel; protein
  misc_feature (5)..(702): Homolog of NCBI NO: 25407074 NR Description: hypothetical protein AT4g01010 [imported] - thaliana >gi|7228242|emb|CAB45784.2| cyclic nucleotide gated (CNGC4) like protein [Arabidopsis thaliana]
  misc_feature (1)..(704): Homolog of NCBI NO: 15238657 NR Description: cyclic nucleotide-regulated ion channel (CNGC1); id: At5g53130.1, supported by cDNA: gi_13877752 [Arabidopsis
  misc_feature (79)..(662): Homolog of NCBI NO: 15225983 NR Description: cyclic nucleotide-regulated ion channel, protein id: At2g46440.1 [Arabidopsis thaliana]
  misc_feature (35)..(704): Homolog of NCBI NO: 18400426 NR Description: cyclic nucleotide-regulated ion channel (CNGC6); id: At2g23980.1, supported by cDNA: gi_14532659 [Arabidopsis
  misc_feature (1)..(703): Homolog of NCBI NO: 15242908 NR Description: cyclic nucleotide-regulated ion channel (CNGC5); id: At5g57940.1 [Arabidopsis thaliana] >gi|25453537|pir||T52573
  misc_feature (35)..(705): Homolog of NCBI NO: 15234769 NR Description: cyclic nucleotide-regulated ion channel, protein id: At4g30560.1 [Arabidopsis thaliana]
  misc_feature (70)..(637): Homolog of NCBI NO: 15226370 NR Description: cyclic nucleotide-regulated ion channel, protein id: At2g28260.1 [Arabidopsis thaliana]
MNPQRNKFVRFNGNDDEFSTKTTRPSVSSVMKTVRRSFEKGSEKIRTFKRPLSVHSNKNKENNKKKKILRVMNPNDSYLQSWNKIFLLLSVVALAFDPLFFYIPYVKPERFCLNLDKKLQTIACVFRTFIDAFYVVHMLFQFHTGFITPSSSGFGRGELNEKHKDIALRYLGSYFLIDLLSILPIPQVVVLAIVPRMRRPASLVAKELLKWVIFCQYVPRIARIYPLFKEVTRTSGLVTETAWAGAALNLFLYMLASHVFGSFWYLISIERKDRCWREACAKIQNCTHAYLYCSPTGEDNRLFLNGSCPLIDPEEITNSTVFNFGIFADALQSGVVESRDFPKKFFYCFWWGLRNLSALGQNLKTSAFEGEIIFAIVICISGLVLFALLIGNMQKYLQSTTVRVEEMRVKRRDAEQWMSHRMLPDDLRKRIRKYEQYKWQETKGVEEEALLSSLPKDLRKDIKRHLCLKLLKKVPWFQAMDDRLLDALCARLKTVLYTEKSYIVREGEPVEDMLFIMRGNLISTTTYGGRTGFFNSVDLVAGDFCGDLLTWALDPLSSQFPISSRTVQALTEVEGFLLSADDLKFVATQYRRLHSKQLRHMFRFYSVQWQTWAACFIQAAWKRHCRRKLSKALREEEGKLHNTLQNDDSGGNKLNLGAAIYASRFASHALRNLRANAAARNSRFPHMLTLLPQKPADPEFPMDET

SEQ ID NO: 96400 - protein, 675 aa, Arabidopsis thaliana
  peptide (1)..(675): Ceres Seq. ID no. 12733114
  misc_feature (92)..(363): Pfam Name: Ion transport protein Pfam Description: Ion transport protein
  misc_feature (1)..(672): Homolog of NCBI NO: 7484881 NR Description: cyclic nucleotide gated channel homolog F3I3.30 -
  misc_feature (1)..(672): Homolog of NCBI NO: 22328204 NR Description: cyclic nucleotide-regulated ion channel,
  misc_feature (2)..(675): Homolog of NCBI NO: 18378827 NR Description: cyclic nucleotide-regulated ion channel; protein
  misc_feature (1)..(672): Homolog of NCBI NO: 25407074 NR Description: hypothetical protein AT4g01010 [imported] - thaliana >gi|7228242|emb|CAB45784.2| cyclic nucleotide gated (CNGC4) like protein [Arabidopsis thaliana]
  misc_feature (1)..(674): Homolog of NCBI NO: 15238657 NR Description: cyclic nucleotide-regulated ion channel (CNGC1); id: At5g53130.1, supported by cDNA: gi_13877752 [Arabidopsis
  misc_feature (49)..(632): Homolog of NCBI NO: 15225983 NR Description: cyclic nucleotide-regulated ion channel, protein id: At2g46440.1 [Arabidopsis thaliana]
  misc_feature (5)..(674): Homolog of NCBI NO: 18400426 NR Description: cyclic nucleotide-regulated ion channel (CNGC6); id: At2g23980.1, supported by cDNA: gi_14532659 [Arabidopsis
  misc_feature (1)..(673): Homolog of NCBI NO: 15242908 NR Description: cyclic nucleotide-regulated ion channel (CNGC5); id: At5g57940.1 [Arabidopsis thaliana] >gi|25453537|pir||T52573
  misc_feature (5)..(675): Homolog of NCBI NO: 15234769 NR Description: cyclic nucleotide-regulated ion channel, protein id: At4g30560.1 [Arabidopsis thaliana]
  misc_feature (40)..(607): Homolog of NCBI NO: 15226370 NR Description: cyclic nucleotide-regulated ion channel, protein id: At2g28260.1 [Arabidopsis thaliana]
MKTVRRSFEKGSEKIRTFKRPLSVHSNKNKENNKKKKILRVMNPNDSYLQSWNKIFLLLSVVALAFDPLFFYIPYVKPERFCLNLDKKLQTIACVFRTFIDAFYVVHMLFQFHTGFITPSSSGFGRGELNEKHKDIALRYLGSYFLIDLLSILPIPQVVVLAIVPRMRRPASLVAKELLKWVIFCQYVPRIARIYPLFKEVTRTSGLVTETAWAGAALNLFLYMLASHVFGSFWYLISIERKDRCWREACAKIQNCTHAYLYCSPTGEDNRLFLNGSCPLIDPEEITNSTVFNFGIFADALQSGVVESRDFPKKFFYCFWWGLRNLSALGQNLKTSAFEGEIIFAIVICISGLVLFALLIGNMQKYLQSTTVRVEEMRVKRRDAEQWMSHRMLPDDLRKRIRKYEQYKWQETKGVEEEALLSSLPKDLRKDIKRHLCLKLLKKVPWFQAMDDRLLDALCARLKTVLYTEKSYIVREGEPVEDMLFIMRGNLISTTTYGGRTGFFNSVDLVAGDFCGDLLTWALDPLSSQFPISSRTVQALTEVEGFLLSADDLKFVATQYRRLHSKQLRHMFRFYSVQWQTWAACFIQAAWKRHCRRKLSKALREEEGKLHNTLQNDDSGGNKLNLGAAIYASRFASHALRNLRANAAARNSRFPHMLTLLPQKPADPEFPMDET

SEQ ID NO: 96401 - DNA, 1593 bp, Arabidopsis thaliana
  misc_feature (1)..(1593): Ceres Seq. ID no. 12733164
  misc_feature: MA Experiment ID: 20000171 Result: Down-regulated in Transcription
  misc_feature: MA Experiment 20000171 PARAMETER Experiment Name: At_42deg_Heat_P Parameter: Age (day) Value: 14
  misc_feature: MA Experiment 20000171 PARAMETER Experiment Name: At_42deg_Heat_P Parameter: Organism Value: A. thaliana
  misc_feature: MA Experiment 20000171 PARAMETER Experiment Name: At_42deg_Heat_P Parameter: Plant Line Value: WS
  misc_feature: MA Experiment 20000171 PARAMETER Experiment Name: At_42deg_Heat_P Parameter: Temperature (deg C) Value: 42 vs. 22
  misc_feature: MA Experiment 20000171 PARAMETER Experiment Name: At_42deg_Heat_P Parameter: Timepoint (hr) Value: 1
  misc_feature: MA Experiment 20000171 PARAMETER Experiment Name: At_42deg_Heat_P Parameter: Tissue Value: Aerial
  misc_feature: MA Experiment ID: 20000184 Result: Up-regulated in Transcription
  misc_feature: MA Experiment 20000184 PARAMETER Experiment Name: At_Shoots__P Parameter: Age (day) Value: 7
  misc_feature: MA Experiment 20000184 PARAMETER Experiment Name: At_Shoots__P Parameter: Tissue Value: Shoots vs. Whole Plant
  misc_feature: MA Experiment ID: 20000185 Result: Up-regulated in Transcription
  misc_feature: MA Experiment 20000185 PARAMETER Experiment Name: At_Roots__P Parameter: Age (day) Value: 7 vs. 21
  misc_feature: MA Experiment 20000185 PARAMETER Experiment Name: At_Roots__P Parameter: Organism Value: A. thaliana
  misc_feature: MA Experiment 20000185 PARAMETER Experiment Name: At_Roots__P Parameter: Tissue Value: Roots vs. Whole Plant
  misc_feature: MA Experiment ID: 20000234 Result: Up-regulated in Transcription
  misc_feature: MA Experiment 20000234 PARAMETER Experiment Name: At_Siliques_P Parameter: Age (day) Value: 21
  misc_feature: MA Experiment 20000234 PARAMETER Experiment Name: At_Siliques_P Parameter: Organism Value: A. thaliana
  misc_feature: MA Experiment 20000234 PARAMETER Experiment Name: At_Siliques_P Parameter: Plant Line Value: WS
  misc_feature: MA Experiment 20000234 PARAMETER Experiment Name: At_Siliques_P Parameter: Tissue Value: Less Than 5mm Siliques vs. Whole Plant
  misc_feature: MA Experiment ID: 20000264 Result: Up-regulated in Transcription
  misc_feature: MA Experiment 20000264 PARAMETER Experiment Name: At_Open_Flower_P Parameter: Age (day) Value: 21
  misc_feature: MA Experiment 20000264 PARAMETER Experiment Name: At_Open_Flower_P Parameter: Plant Line Value: WS
  misc_feature: MA Experiment 20000264 PARAMETER Experiment Name: At_Open_Flower_P Parameter: Tissue Value: Open Flower vs. Whole Plant
  misc_feature: MA Experiment ID: 20000438 Result: Up-regulated in Transcription
  misc_feature: MA Experiment 20000438 PARAMETER Experiment Name: At_Shoots__P Parameter: Age (day) Value: 14
  misc_feature: MA Experiment 20000438 PARAMETER Experiment Name: At_Shoots__P Parameter: Tissue Value: Shoots vs. Whole Plant
  misc_feature: MA Experiment ID: 20000439 Result: Up-regulated in Transcription
  misc_feature: MA Experiment 20000439 PARAMETER Experiment Name: At_Roots__P Parameter: Age (day) Value: 14 vs. 21
  misc_feature: MA Experiment 20000439 PARAMETER Experiment Name: At_Roots__P Parameter: Organism Value: A. thaliana
  misc_feature: MA Experiment 20000439 PARAMETER Experiment Name: At_Roots__P Parameter: Tissue Value: Roots vs. Whole Plant
  misc_feature: MA Experiment ID: 20000453 Result: Down-regulated in Transcription
  misc_feature: MA Experiment 20000453 PARAMETER Experiment Name: At_100uM_ABA_P Parameter: Age (day) Value: 15
  misc_feature: MA Experiment 20000453 PARAMETER Experiment Name: At_100uM_ABA_P Parameter: Organism Value: A. thaliana
  misc_feature: MA Experiment 20000453 PARAMETER Experiment Name: At_100uM_ABA_P Parameter: Plant Line Value: WS
  misc_feature: MA Experiment 20000453 PARAMETER Experiment Name: At_100uM_ABA_P Parameter: Timepoint (hr) Value: 24
  misc_feature: MA Experiment 20000453 PARAMETER Experiment Name: At_100uM_ABA_P Parameter: Tissue Value: Aerial
  misc_feature: MA Experiment 20000453 PARAMETER Experiment Name: At_100uM_ABA_P Parameter: Treatment Value: 100uM ABA vs. No Treatment
  misc_feature: MA Experiment ID: 20001247 Result: Down-regulated in Transcription
  misc_feature: MA Experiment 20001247 PARAMETER Experiment Name: At_Far-red-induction_P Parameter: Age (day) Value: 7
  misc_feature: MA Experiment 20001247 PARAMETER Experiment Name: At_Far-red-induction_P Parameter: Light Value: Far-red vs. White
  misc_feature: MA Experiment 20001247 PARAMETER Experiment Name: At_Far-red-induction_P Parameter: Organism Value: A. thaliana
  misc_feature: MA Experiment 20001247 PARAMETER Experiment Name: At_Far-red-induction_P Parameter: Plant Line Value: Columbia
  misc_feature: MA Experiment 20001247 PARAMETER Experiment Name: At_Far-red-induction_P Parameter: Timepoint (hr) Value: 1
  misc_feature: MA Experiment 20001247 PARAMETER Experiment Name: At_Far-red-induction_P Parameter: Tissue Value: Whole Plant
  misc_feature: MA Experiment ID: 20001451 Result: Down-regulated in Transcription
  misc_feature: MA Experiment 20001451 PARAMETER Experiment Name: At_Far-red-induction_P Parameter: Age (day) Value: 7
  misc_feature: MA Experiment 20001451 PARAMETER Experiment Name: At_Far-red-induction_P Parameter: Light Value: Far-red vs. White
  misc_feature: MA Experiment 20001451 PARAMETER Experiment Name: At_Far-red-induction_P Parameter: Organism Value: A. thaliana
  misc_feature: MA Experiment 20001451 PARAMETER Experiment Name: At_Far-red-induction_P Parameter: Plant Line Value: Columbia
  misc_feature: MA Experiment 20001451 PARAMETER Experiment Name: At_Far-red-induction_P Parameter: Timepoint (hr) Value: 24
  misc_feature: MA Experiment 20001451 PARAMETER Experiment Name: At_Far-red-induction_P Parameter: Tissue Value: Whole Plant
  misc_feature: MA Experiment ID: 20001554 Result: Up-regulated in Transcription
  misc_feature: MA Experiment 20001554 PARAMETER Experiment Name: At_Drought_Soil_Dry_P Parameter: Age (day) Value: 21
  misc_feature: MA Experiment 20001554 PARAMETER Experiment Name: At_Drought_Soil_Dry_P Parameter: Organism Value: A. thaliana
  misc_feature: MA Experiment 20001554 PARAMETER Experiment Name: At_Drought_Soil_Dry_P Parameter: Plant Line Value: WS
  misc_feature: MA Experiment 20001554 PARAMETER Experiment Name: At_Drought_Soil_Dry_P Parameter: Post Timepoint (hr) Value: None
  misc_feature: MA Experiment 20001554 PARAMETER Experiment Name: At_Drought_Soil_Dry_P Parameter: Post-Treatment Value: None
  misc_feature: MA Experiment 20001554 PARAMETER Experiment Name: At_Drought_Soil_Dry_P Parameter: Timepoint (day) Value: 7
  misc_feature: MA Experiment 20001554 PARAMETER Experiment Name: At_Drought_Soil_Dry_P Parameter: Treatment Value: Drought vs. No Drought
  misc_feature: MA Experiment ID: 20001555 Result: Up-regulated in Transcription
  misc_feature: MA Experiment 20001555 PARAMETER Experiment Name: At_Drought_Soil_Dry_P Parameter: Age (day) Value: 24
  misc_feature: MA Experiment 20001555 PARAMETER Experiment Name: At_Drought_Soil_Dry_P Parameter: Organism Value: A. thaliana
  misc_feature: MA Experiment 20001555 PARAMETER Experiment Name: At_Drought_Soil_Dry_P Parameter: Plant Line Value: WS
  misc_feature: MA Experiment 20001555 PARAMETER Experiment Name: At_Drought_Soil_Dry_P Parameter: Post Timepoint (hr) Value: None
  misc_feature: MA Experiment 20001555 PARAMETER Experiment Name: At_Drought_Soil_Dry_P Parameter: Post-Treatment Value: None
  misc_feature: MA Experiment 20001555 PARAMETER Experiment Name: At_Drought_Soil_Dry_P Parameter: Timepoint (day) Value: 10
  misc_feature: MA Experiment 20001555 PARAMETER Experiment Name: At_Drought_Soil_Dry_P Parameter: Treatment Value: Drought vs. No Drought
  misc_feature: MA Experiment ID: 20001560 Result: Down-regulated in Transcription
  misc_feature: MA Experiment 20001560 PARAMETER Experiment Name: At_Drought_Soil_Dry_P Parameter: Age (day) Value: 28
  misc_feature: MA Experiment 20001560 PARAMETER Experiment Name: At_Drought_Soil_Dry_P Parameter: Organism Value: A. thaliana
  misc_feature: MA Experiment 20001560 PARAMETER Experiment Name: At_Drought_Soil_Dry_P Parameter: Plant Line Value: WS
  misc_feature: MA Experiment 20001560 PARAMETER Experiment Name: At_Drought_Soil_Dry_P Parameter: Post Timepoint (hr) Value: None
  misc_feature: MA Experiment 20001560 PARAMETER Experiment Name: At_Drought_Soil_Dry_P Parameter: Post-Treatment Value: None
  misc_feature: MA Experiment 20001560 PARAMETER Experiment Name: At_Drought_Soil_Dry_P Parameter: Timepoint (day) Value: 14
  misc_feature: MA Experiment 20001560 PARAMETER Experiment Name: At_Drought_Soil_Dry_P Parameter: Treatment Value: Drought vs. No Drought
  misc_feature: MA Experiment ID: 20001757 Result: Up-regulated in Transcription
  misc_feature: MA Experiment 20001757 PARAMETER Experiment Name: At_50mM_NH4NO3_L-to-H_P Parameter: Timepoint (hr) Value: 6
  misc_feature: MA Experiment 20001757 PARAMETER Experiment Name: At_50mM_NH4NO3_L-to-H_P Parameter: Tissue Value: Leaf
  misc_feature: MA Experiment 20001757 PARAMETER Experiment Name: At_50mM_NH4NO3_L-to-H_P Parameter: Treatment Value: 50mM NH4NO3 vs 100mM Mannitol
  misc_feature: MA Experiment ID: 20001904 Result: Up-regulated in Transcription
  misc_feature: MA Experiment 20001904 PARAMETER Experiment Name: At_Drought_Reproduction_P Parameter: Age (day) Value: 37
  misc_feature: MA Experiment 20001904 PARAMETER Experiment Name: At_Drought_Reproduction_P Parameter: Organism Value: A. thaliana
  misc_feature: MA Experiment 20001904 PARAMETER Experiment Name: At_Drought_Reproduction_P Parameter: Plant Line Value: WS
  misc_feature: MA Experiment 20001904 PARAMETER Experiment Name: At_Drought_Reproduction_P Parameter: Timepoint (day) Value: 7
  misc_feature: MA Experiment 20001904 PARAMETER Experiment Name: At_Drought_Reproduction_P Parameter: Tissue Value: Rosettes
  misc_feature: MA Experiment 20001904 PARAMETER Experiment Name: At_Drought_Reproduction_P Parameter: Treatment Value: Drought vs. No Drought
  misc_feature: MA Experiment ID: 20001910 Result: Up-regulated in Transcription
  misc_feature: MA Experiment 20001910 PARAMETER Experiment Name: At_Drought_Reproduction_P Parameter: Age (day) Value: 37
  misc_feature: MA Experiment 20001910 PARAMETER Experiment Name: At_Drought_Reproduction_P Parameter: Organism Value: A. thaliana
  misc_feature: MA Experiment 20001910 PARAMETER Experiment Name: At_Drought_Reproduction_P Parameter: Plant Line Value: WS
  misc_feature: MA Experiment 20001910 PARAMETER Experiment Name: At_Drought_Reproduction_P Parameter: Timepoint (day) Value: 7
  misc_feature: MA Experiment 20001910 PARAMETER Experiment Name: At_Drought_Reproduction_P Parameter: Tissue Value: Flowers
  misc_feature: MA Experiment 20001910 PARAMETER Experiment Name: At_Drought_Reproduction_P Parameter: Treatment Value: Drought vs. No Drought
atggctacgaaactcgaaagctccttaatctttgcccttttgtccaaatgcagcgttctaagccaaaccaaccttgccttctccctcctcgccgtcacaatcatctggctcgccatatctctcttcttatggacctatcccggtggacctgcttgggggaaatacctcttcggccggttaatatccggttcatacaaaaccggaaacgttattcccggtccaaaaggcttccctttggttggaagcatgtcactcatgtcaagcactctagctcaccgacgaatcgctgatgcagctgagaaattcggagccaagaggctcatggctttcagcttaggagagactcgcgtgatcgtcacgtgcaatcccgacgtagcgaaagagattctgaatagcccggtttttgctgatcgaccggttaaagaatcggcttactcactgatgtttaacagagcaattggttttgcaccacacggtgtttactggcgaacgcttcgccgtatcgcttcgaaccatctctttagtacaaaacaaatcagaagagccgagacgcaacgacgagtgatctcaagccagatggttgagtttcttgaaaaacagagtagtaacgaaccctgttttgttcgtgagttgcttaaaacggcgtcgcttaacaacatgatgtgctctgtattcggacaagagtatgagcttgaaaaaaaccatgttgagttacgtgaaatggtcgaagaaggttatgatttgctcggaacgttgaattggactgatcaccttccttggctatcggagtttgatcctcaaagactccggtctagatgttccacactcgtaccaaaggtaaaccggtttgtatcccggattatatccgaacaccgtaatcaaaccggtgatttgcctcgtgatttcgtcgacgttttgctctccctccatggttcagataaattatccgacccggacataatcgccgttctttgggagatgatattcagaggaacagacacagttgcggtcttaatcgagtggatcctcgctaggatggtccttcatccagatatgcaatcaacggtacaaaacgagctggatcaagtagtcgggaaatcaagagccctagatgaatctgacttggcttcacttccatatctaacggctgtggtgaaagaagtattgaggcttcatcctccaggcccacttctatcatgggcccgtttggccataacagacacgatcgttgatggtcgtcttgttccggcagggaccacagcaatggtgaacatgtgggccgtatcgcatgatccacacgtgtgggttgatcctttggagtttaaacctgagaggttcgtggcaaaagaaggtgaggtggagttttcggttcttgggtcggatttgagacttgcacctttcgggtcgggtcgtcggatttgccccgggaagaatcttggttttactaccgttatgttttggacggcgatgatgttacatgagtttgaatggggaccgtccgatggtaacggcgttgacttatctgagaaactgaggctttcttgcgagatggctaatcctcttcctgctaaattgcgccgtaggcgcagttaa

SEQ ID NO: 96402 - protein, 530 aa, Arabidopsis thaliana
  peptide (1)..(530): Ceres Seq. ID no. 12733165
  misc_feature (71)..(527): Pfam Name: Cytochrome P450 Pfam Description: Cytochrome P450
  misc_feature (1)..(530): Homolog of NCBI NO: 15226422 NR Description: putative cytochrome P450; protein id: At2g46660.1
  misc_feature (1)..(530): Homolog of NCBI NO: 15228624 NR Description: cytochrome p450 (CYP78A9); protein id: supported by cDNA: 29661., supported by cDNA: gi_17065343, by cDNA: gi_6633988 [Arabidopsis thaliana]
  misc_feature (1)..(530): Homolog of NCBI NO: 21592543 NR Description: cytochrome p450 (CYP78A9) [Arabidopsis thaliana]
  misc_feature (1)..(529): Homolog of NCBI NO: 6715638 NR Description: T25K16.18 [Arabidopsis thaliana]
  misc_feature (1)..(529): Homolog of NCBI NO: 15223341 NR Description: cytochrome P450, putative; protein id:
MATKLESSLIFALLSKCSVLSQTNLAFSLLAVTIIWLAISLFLWTYPGGPAWGKYLFGRLISGSYKTGNVIPGPKGFPLVGSMSLMSSTLAHRRIADAAEKFGAKRLMAFSLGETRVIVTCNPDVAKEILNSPVFADRPVKESAYSLMFNRAIGFAPHGVYWRTLRRIASNHLFSTKQIRRAETQRRVISSQMVEFLEKQSSNEPCFVRELLKTASLNNMMCSVFGQEYELEKNHVELREMVEEGYDLLGTLNWTDHLPWLSEFDPQRLRSRCSTLVPKVNRFVSRIISEHRNQTGDLPRDFVDVLLSLHGSDKLSDPDIIAVLWEMIFRGTDTVAVLIEWILARMVLHPDMQSTVQNELDQVVGKSRALDESDLASLPYLTAVVKEVLRLHPPGPLLSWARLAITDTIVDGRLVPAGTTAMVNMWAVSHDPHVWVDPLEFKPERFVAKEGEVEFSVLGSDLRLAPFGSGRRICPGKNLGFTTVMFWTAMMLHEFEWGPSDGNGVDLSEKLRLSCEMANPLPAKLRRRRS

SEQ ID NO: 96403 - protein, 448 aa, Arabidopsis thaliana
  peptide (1)..(448): Ceres Seq. ID no. 12733166
  misc_feature (1)..(445): Pfam Name: Cytochrome P450 Pfam Description: Cytochrome P450
  misc_feature (1)..(448): Homolog of NCBI NO: 15226422 NR Description: putative cytochrome P450; protein id: At2g46660.1
  misc_feature (1)..(448): Homolog of NCBI NO: 15228624 NR Description: cytochrome p450 (CYP78A9); protein id: supported by cDNA: 29661., supported by cDNA: gi_17065343, by cDNA: gi_6633988 [Arabidopsis thaliana]
  misc_feature (1)..(448): Homolog of NCBI NO: 21592543 NR Description: cytochrome p450 (CYP78A9) [Arabidopsis thaliana]
  misc_feature (1)..(447): Homolog of NCBI NO: 6715638 NR Description: T25K16.18 [Arabidopsis thaliana]
  misc_feature (1)..(447): Homolog of NCBI NO: 15223341 NR Description: cytochrome P450, putative; protein id:
MSLMSSTLAHRRIADAAEKFGAKRLMAFSLGETRVIVTCNPDVAKEILNSPVFADRPVKESAYSLMFNRAIGFAPHGVYWRTLRRIASNHLFSTKQIRRAETQRRVISSQMVEFLEKQSSNEPCFVRELLKTASLNNMMCSVFGQEYELEKNHVELREMVEEGYDLLGTLNWTDHLPWLSEFDPQRLRSRCSTLVPKVNRFVSRIISEHRNQTGDLPRDFVDVLLSLHGSDKLSDPDIIAVLWEMIFRGTDTVAVLIEWILARMVLHPDMQSTVQNELDQVVGKSRALDESDLASLPYLTAVVKEVLRLHPPGPLLSWARLAITDTIVDGRLVPAGTTAMVNMWAVSHDPHVWVDPLEFKPERFVAKEGEVEFSVLGSDLRLAPFGSGRRICPGKNLGFTTVMFWTAMMLHEFEWGPSDGNGVDLSEKLRLSCEMANPLPAKLRRRRS

SEQ ID NO: 96404 - protein, 445 aa, Arabidopsis thaliana
  peptide (1)..(445): Ceres Seq. ID no. 12733167
  misc_feature (1)..(442): Pfam Name: Cytochrome P450 Pfam Description: Cytochrome P450
  misc_feature (1)..(445): Homolog of NCBI NO: 15226422 NR Description: putative cytochrome P450; protein id: At2g46660.1
  misc_feature (1)..(445): Homolog of NCBI NO: 15228624 NR Description: cytochrome p450 (CYP78A9); protein id: supported by cDNA: 29661., supported by cDNA: gi_17065343, by cDNA: gi_6633988 [Arabidopsis thaliana]
  misc_feature (1)..(445): Homolog of NCBI NO: 21592543 NR Description: cytochrome p450 (CYP78A9) [Arabidopsis thaliana]
  misc_feature (1)..(444): Homolog of NCBI NO: 6715638 NR Description: T25K16.18 [Arabidopsis thaliana]
  misc_feature (1)..(444): Homolog of NCBI NO: 15223341 NR Description: cytochrome P450, putative; protein id:
MSSTLAHRRIADAAEKFGAKRLMAFSLGETRVIVTCNPDVAKEILNSPVFADRPVKESAYSLMFNRAIGFAPHGVYWRTLRRIASNHLFSTKQIRRAETQRRVISSQMVEFLEKQSSNEPCFVRELLKTASLNNMMCSVFGQEYELEKNHVELREMVEEGYDLLGTLNWTDHLPWLSEFDPQRLRSRCSTLVPKVNRFVSRIISEHRNQTGDLPRDFVDVLLSLHGSDKLSDPDIIAVLWEMIFRGTDTVAVLIEWILARMVLHPDMQSTVQNELDQVVGKSRALDESDLASLPYLTAVVKEVLRLHPPGPLLSWARLAITDTIVDGRLVPAGTTAMVNMWAVSHDPHVWVDPLEFKPERFVAKEGEVEFSVLGSDLRLAPFGSGRRICPGKNLGFTTVMFWTAMMLHEFEWGPSDGNGVDLSEKLRLSCEMANPLPAKLRRRRS

SEQ ID NO: 96405 - DNA, 2150 bp, Arabidopsis thaliana
  misc_feature (1)..(2150): Ceres Seq. ID no. 12733171
  misc_feature: MA Experiment ID: 20000794 Result: Up-regulated in Transcription
  misc_feature: MA Experiment 20000794 PARAMETER Experiment Name: At_Petals_P Parameter: Age (day) Value: 23-25 days
  misc_feature: MA Experiment 20000794 PARAMETER Experiment Name: At_Petals_P Parameter: Plant Line Value: WS
  misc_feature: MA Experiment 20000794 PARAMETER Experiment Name: At_Petals_P Parameter: Tissue Value: Petals vs. Whole plant
  misc_feature: MA Experiment ID: 20001905 Result: Up-regulated in Transcription
  misc_feature: MA Experiment 20001905 PARAMETER Experiment Name: At_Drought_Reproduction_P Parameter: Age (day) Value: 40
  misc_feature: MA Experiment 20001905 PARAMETER Experiment Name: At_Drought_Reproduction_P Parameter: Organism Value: A. thaliana
  misc_feature: MA Experiment 20001905 PARAMETER Experiment Name: At_Drought_Reproduction_P Parameter: Plant Line Value: WS
  misc_feature: MA Experiment 20001905 PARAMETER Experiment Name: At_Drought_Reproduction_P Parameter: Timepoint (day) Value: 10
  misc_feature: MA Experiment 20001905 PARAMETER Experiment Name: At_Drought_Reproduction_P Parameter: Tissue Value: Rosettes
  misc_feature: MA Experiment 20001905 PARAMETER Experiment Name: At_Drought_Reproduction_P Parameter: Treatment Value: Drought vs. No Drought
attcctttcgtttatcgttttcttcttccaattttggatctctcttccttttgatctgattcgttacttgctctatgttgcttcaattttgaattcttttgatttttgattgtgtgggggagatggggcaatgttacgggaaggttaatcagagtaagcaaaatggtgaagaagaagctaacacgactacttatgttgtttccggcgacgggaatcagattcagcctctaactccggttaattacggtcgagctaagaacactccagctaggtcatcgaatccgagtccttggcctagtcctttccctcacggatcagcgagccctcttccttctggtgtttctccttctccggccagaacttccactccgaggaggtttttccgacggcctttcccgccgccttctccagccaaacacattaaggcttctttgatcaaacgtcttggagtgaagcctaaggaaggtccgatccctgaggagagaggaactgagccggagcagtcgcttgataagagctttggttatggcaagaattttggtgctaagtacgaattggggaaagaagtgggtcgagggcattttggtcatacttgttctggccgtggtaagaagggagatattaaggatcatcctattgctgtcaagatcatctccaaggctaagatgacaacagcaattgcaattgaagatgttcgcagggaggtgaagttactgaaatcattatctggacacaaatatttaatcaaatattatgatgcatgtgaggacgccaataacgtatacatagtcatggagttgtgtgatggtggagaacttttggacagaattttagcaaggggtggtaaatacccggaggatgatgcaaaggcgattgtcgtacaaattctaactgttgtttcattttgtcatctccaaggagttgtgcaccgtgacttaaagccagagaattttctatttacatcaagccgcgaagactcagacttgaaacttattgattttggtctctcagactttattagacctgatgaaagactgaatgatatagttggaagtgcctactatgtcgcgcctgaagttttacacaggtcatatagccttgaggctgatatatggagtattggagttattacatatatactcttatgtggaagccgacctttttgggcacggacagaatctggaatctttcgcactgtactaagaactgaaccaaactatgatgacgtaccttggccttcttgttcatcagaaggtaaagattttgtgaaacgacttctcaacaaagactataggaagcgaatgtctgcagttcaagctttgactcatccgtggttacgggatgatagtcgtgtgattcctttagacattttgatctataagttggtcaaagcctacttgcacgcgacacctcttagacgagctgctttaaaggcgctagcaaaagcattgaccgagaacgagctagtctatcttagagcacagttcatgctgttgggaccaaacaaagatggtagcgtctctctcgaaaacttcaagacggcgcttatgcaaaacgcaacagacgcaatgagagaatcaagagttcctgaaatacttcacactatggaatctctagcgtataggaagatgtatttcgaagagttctgtgcagcagcaattagcatccatcaactagaagctgttgacgcgtgggaagagatagcaacggcaggtttccagcattttgaaaccgagggaaaccgagtgatcacaatcgaagaactagcaagggaactgaatgtgggtgcgtctgcgtatggacacttgagagattgggtaagaagcagtgacgggaagctgagttacttagggttcactaagttcttgcacggagttactcttcgtgctgctcacgcaagacctcgctagtccttctctaattttaggtctttttcttaatattttttttcttcatcagaacagagcaaatagacttctgagagaggtgaggggtattttcgtccgtttgttttgttctttatcgtattatagagtttcaattttatggtacagaaaagaccaaaatgaaaaaaagatataaacatgtgcataaggtagatgggttacagtcatttttttgcaagtataatatatgaacatctatggttc

SEQ ID NO: 96406 - protein, 595 aa, Arabidopsis thaliana
  peptide (1)..(595): Ceres Seq. ID no. 12733172
  misc_feature (143)..(405): Pfam Name: Protein kinase domain Pfam Description: Protein kinase domain
  misc_feature (1)..(593): Homolog of NCBI NO: 7446431 NR Description: calcium-dependent protein kinase-related protein
  misc_feature (1)..(593): Homolog of NCBI NO: 9858873 NR Description: calcium/calmodulin dependent protein kinase MCK2
  misc_feature (1)..(593): Homolog of NCBI NO: 19547871 NR Description: serine/threonine protein kinase pk23
  misc_feature (1)..(593): Homolog of NCBI NO: 16904222 NR Description: calcium/calmodulin-dependent protein kinase CaMK1
  misc_feature (37)..(593): Homolog of NCBI NO: 7446432 NR Description: calcium/calmodulin-dependent protein kinase
  misc_feature (1)..(589): Homolog of NCBI NO: 23237898 NR Description: putative calcium/calmodulin-dependent protein
  misc_feature (26)..(589): Homolog of NCBI NO: 25053813 NR Description: calcium/calmodulin protein kinase 1 [Nicotiana
  misc_feature (133)..(593): Homolog of NCBI NO: 15227920 NR Description: putative Ca2+-dependent ser/thr protein kinase;
  misc_feature (133)..(587): Homolog of NCBI NO: 16904224 NR Description: calcium/calmodulin-dependent protein kinase CaMK2
  misc_feature (133)..(593): Homolog of NCBI NO: 3779218 NR Description: protein kinase CPK1 [Solanum tuberosum]
MGQCYGKVNQSKQNGEEEANTTTYVVSGDGNQIQPLTPVNYGRAKNTPARSSNPSPWPSPFPHGSASPLPSGVSPSPARTSTPRRFFRRPFPPPSPAKHIKASLIKRLGVKPKEGPIPEERGTEPEQSLDKSFGYGKNFGAKYELGKEVGRGHFGHTCSGRGKKGDIKDHPIAVKIISKAKMTTAIAIEDVRREVKLLKSLSGHKYLIKYYDACEDANNVYIVMELCDGGELLDRILARGGKYPEDDAKAIVVQILTVVSFCHLQGVVHRDLKPENFLFTSSREDSDLKLIDFGLSDFIRPDERLNDIVGSAYYVAPEVLHRSYSLEADIWSIGVITYILLCGSRPFWARTESGIFRTVLRTEPNYDDVPWPSCSSEGKDFVKRLLNKDYRKRMSAVQALTHPWLRDDSRVIPLDILIYKLVKAYLHATPLRRAALKALAKALTENELVYLRAQFMLLGPNKDGSVSLENFKTALMQNATDAMRESRVPEILHTMESLAYRKMYFEEFCAAAISIHQLEAVDAWEEIATAGFQHFETEGNRVITIEELARELNVGASAYGHLRDWVRSSDGKLSYLGFTKFLHGVTLRAAHARPR

SEQ ID NO: 96407 - protein, 414 aa, Arabidopsis thaliana
  peptide (1)..(414): Ceres Seq. ID no. 12733173
  misc_feature (1)..(224): Pfam Name: Protein kinase domain Pfam Description: Protein kinase domain
  misc_feature (1)..(412): Homolog of NCBI NO: 7446431 NR Description: calcium-dependent protein kinase-related protein
  misc_feature (1)..(412): Homolog of NCBI NO: 9858873 NR Description: calcium/calmodulin dependent protein kinase MCK2
  misc_feature (1)..(412): Homolog of NCBI NO: 19547871 NR Description: serine/threonine protein kinase pk23
  misc_feature (1)..(412): Homolog of NCBI NO: 16904222 NR Description: calcium/calmodulin-dependent protein kinase CaMK1
  misc_feature (1)..(412): Homolog of NCBI NO: 7446432 NR Description: calcium/calmodulin-dependent protein kinase
  misc_feature (1)..(408): Homolog of NCBI NO: 23237898 NR Description: putative calcium/calmodulin-dependent protein
  misc_feature (1)..(408): Homolog of NCBI NO: 25053813 NR Description: calcium/calmodulin protein kinase 1 [Nicotiana
  misc_feature (1)..(412): Homolog of NCBI NO: 15227920 NR Description: putative Ca2+-dependent ser/thr protein kinase;
  misc_feature (1)..(406): Homolog of NCBI NO: 16904224 NR Description: calcium/calmodulin-dependent protein kinase CaMK2
  misc_feature (1)..(412): Homolog of NCBI NO: 3779218 NR Description: protein kinase CPK1 [Solanum tuberosum]
MTTAIAIEDVRREVKLLKSLSGHKYLIKYYDACEDANNVYIVMELCDGGELLDRILARGGKYPEDDAKAIVVQILTVVSFCHLQGVVHRDLKPENFLFTSSREDSDLKLIDFGLSDFIRPDERLNDIVGSAYYVAPEVLHRSYSLEADIWSIGVITYILLCGSRPFWARTESGIFRTVLRTEPNYDDVPWPSCSSEGKDFVKRLLNKDYRKRMSAVQALTHPWLRDDSRVIPLDILIYKLVKAYLHATPLRRAALKALAKALTENELVYLRAQFMLLGPNKDGSVSLENFKTALMQNATDAMRESRVPEILHTMESLAYRKMYFEEFCAAAISIHQLEAVDAWEEIATAGFQHFETEGNRVITIEELARELNVGASAYGHLRDWVRSSDGKLSYLGFTKFLHGVTLRAAHARPR

SEQ ID NO: 96408 - protein, 372 aa, Arabidopsis thaliana
  peptide (1)..(372): Ceres Seq. ID no. 12733174
  misc_feature (1)..(182): Pfam Name: Protein kinase domain Pfam Description: Protein kinase domain
  misc_feature (1)..(370): Homolog of NCBI NO: 7446431 NR Description: calcium-dependent protein kinase-related protein
  misc_feature (1)..(370): Homolog of NCBI NO: 9858873 NR Description: calcium/calmodulin dependent protein kinase MCK2
  misc_feature (1)..(370): Homolog of NCBI NO: 19547871 NR Description: serine/threonine protein kinase pk23
  misc_feature (1)..(370): Homolog of NCBI NO: 16904222 NR Description: calcium/calmodulin-dependent protein kinase CaMK1
  misc_feature (1)..(370): Homolog of NCBI NO: 7446432 NR Description: calcium/calmodulin-dependent protein kinase
  misc_feature (1)..(366): Homolog of NCBI NO: 23237898 NR Description: putative calcium/calmodulin-dependent protein
  misc_feature (1)..(366): Homolog of NCBI NO: 25053813 NR Description: calcium/calmodulin protein kinase 1 [Nicotiana
  misc_feature (1)..(370): Homolog of NCBI NO: 15227920 NR Description: putative Ca2+-dependent ser/thr protein kinase;
  misc_feature (1)..(364): Homolog of NCBI NO: 16904224 NR Description: calcium/calmodulin-dependent protein kinase CaMK2
  misc_feature (1)..(370): Homolog of NCBI NO: 3779218 NR Description: protein kinase CPK1 [Solanum tuberosum]
MELCDGGELLDRILARGGKYPEDDAKAIVVQILTVVSFCHLQGVVHRDLKPENFLFTSSREDSDLKLIDFGLSDFIRPDERLNDIVGSAYYVAPEVLHRSYSLEADIWSIGVITYILLCGSRPFWARTESGIFRTVLRTEPNYDDVPWPSCSSEGKDFVKRLLNKDYRKRMSAVQALTHPWLRDDSRVIPLDILIYKLVKAYLHATPLRRAALKALAKALTENELVYLRAQFMLLGPNKDGSVSLENFKTALMQNATDAMRESRVPEILHTMESLAYRKMYFEEFCAAAISIHQLEAVDAWEEIATAGFQHFETEGNRVITIEELARELNVGASAYGHLRDWVRSSDGKLSYLGFTKFLHGVTLRAAHARPR

SEQ ID NO: 96409 - DNA, 1854 bp, Arabidopsis thaliana
  misc_feature (1)..(1854): Ceres Seq. ID no. 12733202
  misc_feature: MA Experiment ID: 20000185 Result: Down-regulated in Transcription
  misc_feature: MA Experiment 20000185 PARAMETER Experiment Name: At_Roots__P Parameter: Age (day) Value: 7 vs. 21
  misc_feature: MA Experiment 20000185 PARAMETER Experiment Name: At_Roots__P Parameter: Organism Value: A. thaliana
  misc_feature: MA Experiment 20000185 PARAMETER Experiment Name: At_Roots__P Parameter: Tissue Value: Roots vs. Whole Plant
  misc_feature: MA Experiment ID: 20000234 Result: Up-regulated in Transcription
  misc_feature: MA Experiment 20000234 PARAMETER Experiment Name: At_Siliques_P Parameter: Age (day) Value: 21
  misc_feature: MA Experiment 20000234 PARAMETER Experiment Name: At_Siliques_P Parameter: Organism Value: A. thaliana
  misc_feature: MA Experiment 20000234 PARAMETER Experiment Name: At_Siliques_P Parameter: Plant Line Value: WS
  misc_feature: MA Experiment 20000234 PARAMETER Experiment Name: At_Siliques_P Parameter: Tissue Value: Less Than 5mm Siliques vs. Whole Plant
  misc_feature: MA Experiment ID: 20000235 Result: Up-regulated in Transcription
  misc_feature: MA Experiment 20000235 PARAMETER Experiment Name: At_Siliques_P Parameter: Age (day) Value: 21
  misc_feature: MA Experiment 20000235 PARAMETER Experiment Name: At_Siliques_P Parameter: Organism Value: A. thaliana
  misc_feature: MA Experiment 20000235 PARAMETER Experiment Name: At_Siliques_P Parameter: Plant Line Value: WS
  misc_feature: MA Experiment 20000235 PARAMETER Experiment Name: At_Siliques_P Parameter: Tissue Value: 5-10mm Siliques vs. Whole Plant
  misc_feature: MA Experiment ID: 20000265 Result: Down-regulated in Transcription
  misc_feature: MA Experiment 20000265 PARAMETER Experiment Name: At_Open_Flower_P Parameter: Age (day) Value: 21
  misc_feature: MA Experiment 20000265 PARAMETER Experiment Name: At_Open_Flower_P Parameter: Plant Line Value: WS
  misc_feature: MA Experiment 20000265 PARAMETER Experiment Name: At_Open_Flower_P Parameter: Tissue Value: Closed Flower vs. Whole Plant
  misc_feature: MA Experiment ID: 20000286 Result: Down-regulated in Transcription
  misc_feature: MA Experiment 20000286 PARAMETER Experiment Name: At_Open_Flower_P Parameter: Age (day) Value: 21
  misc_feature: MA Experiment 20000286 PARAMETER Experiment Name: At_Open_Flower_P Parameter: Plant Line Value: WS
  misc_feature: MA Experiment 20000286 PARAMETER Experiment Name: At_Open_Flower_P Parameter: Tissue Value: Half Open vs. Whole Plant
  misc_feature: MA Experiment ID: 20000438 Result: Down-regulated in Transcription
  misc_feature: MA Experiment 20000438 PARAMETER Experiment Name: At_Shoots__P Parameter: Age (day) Value: 14
  misc_feature: MA Experiment 20000438 PARAMETER Experiment Name: At_Shoots__P Parameter: Tissue Value: Shoots vs. Whole Plant
  misc_feature: MA Experiment ID: 20000439 Result: Down-regulated in Transcription
  misc_feature: MA Experiment 20000439 PARAMETER Experiment Name: At_Roots__P Parameter: Age (day) Value: 14 vs. 21
  misc_feature: MA Experiment 20000439 PARAMETER Experiment Name: At_Roots__P Parameter: Organism Value: A. thaliana
  misc_feature: MA Experiment 20000439 PARAMETER Experiment Name: At_Roots__P Parameter: Tissue Value: Roots vs. Whole Plant
  misc_feature: MA Experiment ID: 20000794 Result: Down-regulated in Transcription
  misc_feature: MA Experiment 20000794 PARAMETER Experiment Name: At_Petals_P Parameter: Age (day) Value: 23-25 days
  misc_feature: MA Experiment 20000794 PARAMETER Experiment Name: At_Petals_P Parameter: Plant Line Value: WS
  misc_feature: MA Experiment 20000794 PARAMETER Experiment Name: At_Petals_P Parameter: Tissue Value: Petals vs. Whole plant
  misc_feature: MA Experiment ID: 20001910 Result: Up-regulated in Transcription
  misc_feature: MA Experiment 20001910 PARAMETER Experiment Name: At_Drought_Reproduction_P Parameter: Age (day) Value: 37
  misc_feature: MA Experiment 20001910 PARAMETER Experiment Name: At_Drought_Reproduction_P Parameter: Organism Value: A. thaliana
  misc_feature: MA Experiment 20001910 PARAMETER Experiment Name: At_Drought_Reproduction_P Parameter: Plant Line Value: WS
  misc_feature: MA Experiment 20001910 PARAMETER Experiment Name: At_Drought_Reproduction_P Parameter: Timepoint (day) Value: 7
  misc_feature: MA Experiment 20001910 PARAMETER Experiment Name: At_Drought_Reproduction_P Parameter: Tissue Value: Flowers
  misc_feature: MA Experiment 20001910 PARAMETER Experiment Name: At_Drought_Reproduction_P Parameter: Treatment Value: Drought vs. No Drought
  misc_feature: MA Experiment ID: 20001911 Result: Up-regulated in Transcription
  misc_feature: MA Experiment 20001911 PARAMETER Experiment Name: At_Drought_Reproduction_P Parameter: Age (day) Value: 40
  misc_feature: MA Experiment 20001911 PARAMETER Experiment Name: At_Drought_Reproduction_P Parameter: Organism Value: A. thaliana
  misc_feature: MA Experiment 20001911 PARAMETER Experiment Name: At_Drought_Reproduction_P Parameter: Plant Line Value: WS
  misc_feature: MA Experiment 20001911 PARAMETER Experiment Name: At_Drought_Reproduction_P Parameter: Timepoint (day) Value: 10
  misc_feature: MA Experiment 20001911 PARAMETER Experiment Name: At_Drought_Reproduction_P Parameter: Tissue Value: Flowers
  misc_feature: MA Experiment 20001911 PARAMETER Experiment Name: At_Drought_Reproduction_P Parameter: Treatment Value: Drought vs. No Drought
aagaacaacaatacacacacacaaacataaggaaaaaaaaacttttccatggggctcgtaattttcttggcactaattgtcttaatccttattattggtctcaggatattcaaagcttttatgattcttgtttggcatccatttgtgttgaccagaagactcaaaaaccaaggaatctcaggcccaaattacagaatcttttacggaaacctcagcgagataaagaagatgaagagagaatctcatctttcgattcttgatcctagctccaatgatattttccctcgtattcttcctcattatcaaaaatggatgtctcaatacggagagacttttctttactggaacggaacagagccaaggatatgcatctcagatcctgaacttgcaaaaactatgttgtcgaacaagttaggtttctttgtcaaatcaaaggcaagacctgaggctgttaaacttgtcggctccaaaggacttgtctttatcgaaggtgctgattgggttcgccatagaagaatcttgaaccctgctttctccatcgataggctcaagatcatgacgaccgtgatggttgattgtacgctcaagatgttagaggagtggagaaaagagagcactaaggaagaaacagagcacccgaagattaaaaaggaaatgaacgaagagttccaaagactaacagctgatataatagcaacctctgcgtttggaagcagttacgtcgaaggaatcgaagtgtttagatcacaaatggagcttaaaaggtgttatacaacttctctcaaccaagtctctatccctggaactcagtaccttcctacgccttcgaacattcgggtatggaagctggagaggaaaatggataactcaattaagagaattataagttcgagactacagtcaaagtcagattatggagacgatcttctcggaatcttgttgaaagcttacaacactgaagggaaggaacggaagatgagcatcgaagagatcatacatgaatgcaggactttcttcttcggaggtcacgaaactacttcgaatttattggcatggacaacgatgttgctgagcttgcaccaagattggcaggagaaactcagagaagagatattcaaagaatgcggtaaagaaaaaaccccagattcagaaactttctccaaactcaagctgatgaacatggtgatcatggagtcgcttcgactttacggaccagtgtcagctttggcccgagaagcatcagtaaatataaagttaggtgacctagagattcccaagggcacaaccgtagtcatcccgcttctgaagatgcatagcgacaagaccctttggggatccgacgccgacaaattcaacccaatgcggtttgcaaacggcgtttcccgagccgccaatcacccaaacgctctcctagcattctccgtcggaccaagagcttgcattggccaaaactttgtcatgatcgaagccaagactgtgctcaccatgattcttcaacggtttcggtttattagcctctgtgacgagtataagcacacccctgtggataacgtcactattcagcctcagtacggcttacccgtaatgcttcagcctctggaagactgaagtaaaatgcccaaataaatcggatgtcttaatgaatatacctcacgtgtgtgacaagtctcctccatataggccggcttattgctgatggtgggggcttaacaaatcatccttgttaagttattgggcttttactatctcagtttggaacccttgatgggctaaatagttattaataatttaatatattgtgacattgcatgtataattgaaaagtggaaggaagtgtgtaacggttatgaattc

SEQ ID NO: 96410 - protein, 519 aa, Arabidopsis thaliana
  peptide (1)..(519): Ceres Seq. ID no. 12733203
  misc_feature (1)..(519): Homolog of NCBI NO: 18407219 NR Description: cytochrome P450, putative; protein id: supported by cDNA: gi_13605860, supported by cDNA: gi_20147140 thaliana] >gi|13605861|gb|AAK32916.1|AF367329_1
  misc_feature (1)..(519): Homolog of NCBI NO: 7484896 NR Description: cytochrome P450 homolog F14M4.21 - Arabidopsis
  misc_feature (117)..(519): Homolog of NCBI NO: 30690559 NR Description: cytochrome P450 family [Arabidopsis thaliana]
  misc_feature (5)..(518): Homolog of NCBI NO: 15226472 NR Description: cytochrome p450, putative; protein id: [Arabidopsis thaliana] >gi|7430708|pir||T02192 probable
  misc_feature (5)..(517): Homolog of NCBI NO: 15234248 NR Description: cytochrome P450 - like protein; protein id: [Arabidopsis thaliana] >gi|7484900|pir||T05876 cytochrome P450
  misc_feature (1)..(518): Homolog of NCBI NO: 38112707 NR Description: cytochrome P450 [Triticum aestivum]
  misc_feature (1)..(518): Homolog of NCBI NO: 22324446 NR Description: putative cytochrome P450 [Oryza sativa (japonica
  misc_feature (1)..(518): Homolog of NCBI NO: 34913354 NR Description: putative cytochrome P450 [Oryza sativa (japonica group)] >gi|22293694|dbj|BAC10039.1| putative cytochrome P450
  misc_feature (2)..(518): Homolog of NCBI NO: 14719280 NR Description: cytochrome P450 [Zea mays]
  misc_feature (89)..(516): Homolog of NCBI NO: 34896248 NR Description: OSJNBb0008D07.14 [Oryza sativa (japonica
MGLVIFLALIVLILIIGLRIFKAFMILVWHPFVLTRRLKNQGISGPNYRIFYGNLSEIKKMKRESHLSILDPSSNDIFPRILPHYQKWMSQYGETFLYWNGTEPRICISDPELAKTMLSNKLGFFVKSKARPEAVKLVGSKGLVFIEGADWVRHRRILNPAFSIDRLKIMTTVMVDCTLKMLEEWRKESTKEETEHPKIKKEMNEEFQRLTADIIATSAFGSSYVEGIEVFRSQMELKRCYTTSLNQVSIPGTQYLPTPSNIRVWKLERKMDNSIKRIISSRLQSKSDYGDDLLGILLKAYNTEGKERKMSIEEIIHECRTFFFGGHETTSNLLAWTTMLLSLHQDWQEKLREEIFKECGKEKTPDSETFSKLKLMNMVIMESLRLYGPVSALAREASVNIKLGDLEIPKGTTVVIPLLKMHSDKTLWGSDADKFNPMRFANGVSRAANHPNALLAFSVGPRACIGQNFVMIEAKTVLTMILQRFRFISLCDEYKHTPVDNVTIQPQYGLPVMLQPLED

SEQ ID NO: 96411 - protein, 495 aa, Arabidopsis thaliana
  peptide (1)..(495): Ceres Seq. ID no. 12733204
  misc_feature (1)..(495): Homolog of NCBI NO: 18407219 NR Description: cytochrome P450, putative; protein id: supported by cDNA: gi_13605860, supported by cDNA: gi_20147140 thaliana] >gi|13605861|gb|AAK32916.1|AF367329_1
  misc_feature (1)..(495): Homolog of NCBI NO: 7484896 NR Description: cytochrome P450 homolog F14M4.21 - Arabidopsis
  misc_feature (93)..(495): Homolog of NCBI NO: 30690559 NR Description: cytochrome P450 family [Arabidopsis thaliana]
  misc_feature (1)..(494): Homolog of NCBI NO: 15226472 NR Description: cytochrome p450, putative; protein id: [Arabidopsis thaliana] >gi|7430708|pir||T02192 probable
  misc_feature (1)..(493): Homolog of NCBI NO: 15234248 NR Description: cytochrome P450 - like protein; protein id: [Arabidopsis thaliana] >gi|7484900|pir||T05876 cytochrome P450
  misc_feature (1)..(494): Homolog of NCBI NO: 38112707 NR Description: cytochrome P450 [Triticum aestivum]
  misc_feature (1)..(494): Homolog of NCBI NO: 22324446 NR Description: putative cytochrome P450 [Oryza sativa (japonica
  misc_feature (1)..(494): Homolog of NCBI NO: 34913354 NR Description: putative cytochrome P450 [Oryza sativa (japonica group)] >gi|22293694|dbj|BAC10039.1| putative cytochrome P450
  misc_feature (1)..(494): Homolog of NCBI NO: 14719280 NR Description: cytochrome P450 [Zea mays]
  misc_feature (65)..(492): Homolog of NCBI NO: 34896248 NR Description: OSJNBb0008D07.14 [Oryza sativa (japonica
MILVWHPFVLTRRLKNQGISGPNYRIFYGNLSEIKKMKRESHLSILDPSSNDIFPRILPHYQKWMSQYGETFLYWNGTEPRICISDPELAKTMLSNKLGFFVKSKARPEAVKLVGSKGLVFIEGADWVRHRRILNPAFSIDRLKIMTTVMVDCTLKMLEEWRKESTKEETEHPKIKKEMNEEFQRLTADIIATSAFGSSYVEGIEVFRSQMELKRCYTTSLNQVSIPGTQYLPTPSNIRVWKLERKMDNSIKRIISSRLQSKSDYGDDLLGILLKAYNTEGKERKMSIEEIIHECRTFFFGGHETTSNLLAWTTMLLSLHQDWQEKLREEIFKECGKEKTPDSETFSKLKLMNMVIMESLRLYGPVSALAREASVNIKLGDLEIPKGTTVVIPLLKMHSDKTLWGSDADKFNPMRFANGVSRAANHPNALLAFSVGPRACIGQNFVMIEAKTVLTMILQRFRFISLCDEYKHTPVDNVTIQPQYGLPVMLQPLED

SEQ ID NO: 96412 - protein, 459 aa, Arabidopsis thaliana
  peptide (1)..(459): Ceres Seq. ID no. 12733205
  misc_feature (1)..(459): Homolog of NCBI NO: 18407219 NR Description: cytochrome P450, putative; protein id: supported by cDNA: gi_13605860, supported by cDNA: gi_20147140 thaliana] >gi|13605861|gb|AAK32916.1|AF367329_1
  misc_feature (1)..(459): Homolog of NCBI NO: 7484896 NR Description: cytochrome P450 homolog F14M4.21 - Arabidopsis
  misc_feature (57)..(459): Homolog of NCBI NO: 30690559 NR Description: cytochrome P450 family [Arabidopsis thaliana]
  misc_feature (1)..(458): Homolog of NCBI NO: 15226472 NR Description: cytochrome p450, putative; protein id: [Arabidopsis thaliana] >gi|7430708|pir||T02192 probable
  misc_feature (1)..(457): Homolog of NCBI NO: 15234248 NR Description: cytochrome P450 - like protein; protein id: [Arabidopsis thaliana] >gi|7484900|pir||T05876 cytochrome P450
  misc_feature (1)..(458): Homolog of NCBI NO: 38112707 NR Description: cytochrome P450 [Triticum aestivum]
  misc_feature (1)..(458): Homolog of NCBI NO: 22324446 NR Description: putative cytochrome P450 [Oryza sativa (japonica
  misc_feature (1)..(458): Homolog of NCBI NO: 34913354 NR Description: putative cytochrome P450 [Oryza sativa (japonica group)] >gi|22293694|dbj|BAC10039.1| putative cytochrome P450
  misc_feature (1)..(458): Homolog of NCBI NO: 14719280 NR Description: cytochrome P450 [Zea mays]
  misc_feature (29)..(456): Homolog of NCBI NO: 34896248 NR Description: OSJNBb0008D07.14 [Oryza sativa (japonica
MKRESHLSILDPSSNDIFPRILPHYQKWMSQYGETFLYWNGTEPRICISDPELAKTMLSNKLGFFVKSKARPEAVKLVGSKGLVFIEGADWVRHRRILNPAFSIDRLKIMTTVMVDCTLKMLEEWRKESTKEETEHPKIKKEMNEEFQRLTADIIATSAFGSSYVEGIEVFRSQMELKRCYTTSLNQVSIPGTQYLPTPSNIRVWKLERKMDNSIKRIISSRLQSKSDYGDDLLGILLKAYNTEGKERKMSIEEIIHECRTFFFGGHETTSNLLAWTTMLLSLHQDWQEKLREEIFKECGKEKTPDSETFSKLKLMNMVIMESLRLYGPVSALAREASVNIKLGDLEIPKGTTVVIPLLKMHSDKTLWGSDADKFNPMRFANGVSRAANHPNALLAFSVGPRACIGQNFVMIEAKTVLTMILQRFRFISLCDEYKHTPVDNVTIQPQYGLPVMLQPLED

SEQ ID NO: 96413 - DNA, 1588 bp, Arabidopsis thaliana
  misc_feature (1)..(1588): Ceres Seq. ID no. 12733212
  misc_feature: MA Experiment ID: 20000180 Result: Up-regulated in Transcription
  misc_feature: MA Experiment 20000180 PARAMETER Experiment Name: At_Germinating_Seeds_P Parameter: Age (hr) Value: 24 vs. 0
  misc_feature: MA Experiment 20000180 PARAMETER Experiment Name: At_Germinating_Seeds_P Parameter: Tissue Value: Germinating Seeds
  misc_feature: MA Experiment ID: 20000184 Result: Up-regulated in Transcription
  misc_feature: MA Experiment 20000184 PARAMETER Experiment Name: At_Shoots__P Parameter: Age (day) Value: 7
  misc_feature: MA Experiment 20000184 PARAMETER Experiment Name: At_Shoots__P Parameter: Tissue Value: Shoots vs. Whole Plant
  misc_feature: MA Experiment ID: 20000185 Result: Down-regulated in Transcription
  misc_feature: MA Experiment 20000185 PARAMETER Experiment Name: At_Roots__P Parameter: Age (day) Value: 7 vs. 21
  misc_feature: MA Experiment 20000185 PARAMETER Experiment Name: At_Roots__P Parameter: Organism Value: A. thaliana
  misc_feature: MA Experiment 20000185 PARAMETER Experiment Name: At_Roots__P Parameter: Tissue Value: Roots vs. Whole Plant
  misc_feature: MA Experiment ID: 20000234 Result: Up-regulated in Transcription
  misc_feature: MA Experiment 20000234 PARAMETER Experiment Name: At_Siliques_P Parameter: Age (day) Value: 21
  misc_feature: MA Experiment 20000234 PARAMETER Experiment Name: At_Siliques_P Parameter: Organism Value: A. thaliana
  misc_feature: MA Experiment 20000234 PARAMETER Experiment Name: At_Siliques_P Parameter: Plant Line Value: WS
  misc_feature: MA Experiment 20000234 PARAMETER Experiment Name: At_Siliques_P Parameter: Tissue Value: Less Than 5mm Siliques vs. Whole Plant
  misc_feature: MA Experiment ID: 20000235 Result: Up-regulated in Transcription
  misc_feature: MA Experiment 20000235 PARAMETER Experiment Name: At_Siliques_P Parameter: Age (day) Value: 21
  misc_feature: MA Experiment 20000235 PARAMETER Experiment Name: At_Siliques_P Parameter: Organism Value: A. thaliana
  misc_feature: MA Experiment 20000235 PARAMETER Experiment Name: At_Siliques_P Parameter: Plant Line Value: WS
  misc_feature: MA Experiment 20000235 PARAMETER Experiment Name: At_Siliques_P Parameter: Tissue Value: 5-10mm Siliques vs. Whole Plant
  misc_feature: MA Experiment ID: 20000264 Result: Up-regulated in Transcription
  misc_feature: MA Experiment 20000264 PARAMETER Experiment Name: At_Open_Flower_P Parameter: Age (day) Value: 21
  misc_feature: MA Experiment 20000264 PARAMETER Experiment Name: At_Open_Flower_P Parameter: Plant Line Value: WS
  misc_feature: MA Experiment 20000264 PARAMETER Experiment Name: At_Open_Flower_P Parameter: Tissue Value: Open Flower vs. Whole Plant
  misc_feature: MA Experiment ID: 20000265 Result: Up-regulated in Transcription
  misc_feature: MA Experiment 20000265 PARAMETER Experiment Name: At_Open_Flower_P Parameter: Age (day) Value: 21
  misc_feature: MA Experiment 20000265 PARAMETER Experiment Name: At_Open_Flower_P Parameter: Plant Line Value: WS
  misc_feature: MA Experiment 20000265 PARAMETER Experiment Name: At_Open_Flower_P Parameter: Tissue Value: Closed Flower vs. Whole Plant
  misc_feature: MA Experiment ID: 20000286 Result: Up-regulated in Transcription
  misc_feature: MA Experiment 20000286 PARAMETER Experiment Name: At_Open_Flower_P Parameter: Age (day) Value: 21
  misc_feature: MA Experiment 20000286 PARAMETER Experiment Name: At_Open_Flower_P Parameter: Plant Line Value: WS
  misc_feature: MA Experiment 20000286 PARAMETER Experiment Name: At_Open_Flower_P Parameter: Tissue Value: Half Open vs. Whole Plant
  misc_feature: MA Experiment ID: 20000451 Result: Up-regulated in Transcription
  misc_feature: MA Experiment 20000451 PARAMETER Experiment Name: At_CS6879_Shoots-Roots_P Parameter: Age (day) Value: 14
  misc_feature: MA Experiment 20000451 PARAMETER Experiment Name: At_CS6879_Shoots-Roots_P Parameter: Organism Value: A. thaliana
  misc_feature: MA Experiment 20000451 PARAMETER Experiment Name: At_CS6879_Shoots-Roots_P Parameter: Plant Line Value: CS6879 vs. WS
  misc_feature: MA Experiment 20000451 PARAMETER Experiment Name: At_CS6879_Shoots-Roots_P Parameter: Tissue Value: Roots
  misc_feature: MA Experiment ID: 20000495 Result: Up-regulated in Transcription
  misc_feature: MA Experiment 20000495 PARAMETER Experiment Name: At_Guard_Cells_P Parameter: Harvest Date Value: 8/2/2002
  misc_feature: MA Experiment 20000495 PARAMETER Experiment Name: At_Guard_Cells_P Parameter: Organism Value: A. thaliana
  misc_feature: MA Experiment 20000495 PARAMETER Experiment Name: At_Guard_Cells_P Parameter: Tissue Value: Guard Cells vs. Leaves
  misc_feature: MA Experiment ID: 20001450 Result: Down-regulated in Transcription
  misc_feature: MA Experiment 20001450 PARAMETER Experiment Name: At_Far-red-induction_P Parameter: Age (day) Value: 7
  misc_feature: MA Experiment 20001450 PARAMETER Experiment Name: At_Far-red-induction_P Parameter: Light Value: Far-red vs. White
  misc_feature: MA Experiment 20001450 PARAMETER Experiment Name: At_Far-red-induction_P Parameter: Organism Value: A. thaliana
  misc_feature: MA Experiment 20001450 PARAMETER Experiment Name: At_Far-red-induction_P Parameter: Plant Line Value: Columbia
  misc_feature: MA Experiment 20001450 PARAMETER Experiment Name: At_Far-red-induction_P Parameter: Timepoint (hr) Value: 8
  misc_feature: MA Experiment 20001450 PARAMETER Experiment Name: At_Far-red-induction_P Parameter: Tissue Value: Whole Plant
  misc_feature: MA Experiment ID: 20001555 Result: Down-regulated in Transcription
  misc_feature: MA Experiment 20001555 PARAMETER Experiment Name: At_Drought_Soil_Dry_P Parameter: Age (day) Value: 24
  misc_feature: MA Experiment 20001555 PARAMETER Experiment Name: At_Drought_Soil_Dry_P Parameter: Organism Value: A. thaliana
  misc_feature: MA Experiment 20001555 PARAMETER Experiment Name: At_Drought_Soil_Dry_P Parameter: Plant Line Value: WS
  misc_feature: MA Experiment 20001555 PARAMETER Experiment Name: At_Drought_Soil_Dry_P Parameter: Post Timepoint (hr) Value: None
  misc_feature: MA Experiment 20001555 PARAMETER Experiment Name: At_Drought_Soil_Dry_P Parameter: Post-Treatment Value: None
  misc_feature: MA Experiment 20001555 PARAMETER Experiment Name: At_Drought_Soil_Dry_P Parameter: Timepoint (day) Value: 10
  misc_feature: MA Experiment 20001555 PARAMETER Experiment Name: At_Drought_Soil_Dry_P Parameter: Treatment Value: Drought vs. No Drought
  misc_feature: MA Experiment ID: 20001906 Result: Down-regulated in Transcription
  misc_feature: MA Experiment 20001906 PARAMETER Experiment Name: At_Drought_Reproduction_P Parameter: Age (day) Value: 35
  misc_feature: MA Experiment 20001906 PARAMETER Experiment Name: At_Drought_Reproduction_P Parameter: Organism Value: A. thaliana
  misc_feature: MA Experiment 20001906 PARAMETER Experiment Name: At_Drought_Reproduction_P Parameter: Plant Line Value: WS
  misc_feature: MA Experiment 20001906 PARAMETER Experiment Name: At_Drought_Reproduction_P Parameter: Timepoint (day) Value: 5
  misc_feature: MA Experiment 20001906 PARAMETER Experiment Name: At_Drought_Reproduction_P Parameter: Tissue Value: Siliques
  misc_feature: MA Experiment 20001906 PARAMETER Experiment Name: At_Drought_Reproduction_P Parameter: Treatment Value: Drought vs. No Drought
  misc_feature: MA Experiment ID: 20001907 Result: Down-regulated in Transcription
  misc_feature: MA Experiment 20001907 PARAMETER Experiment Name: At_Drought_Reproduction_P Parameter: Age (day) Value: 37
  misc_feature: MA Experiment 20001907 PARAMETER Experiment Name: At_Drought_Reproduction_P Parameter: Organism Value: A. thaliana
  misc_feature: MA Experiment 20001907 PARAMETER Experiment Name: At_Drought_Reproduction_P Parameter: Plant Line Value: WS
  misc_feature: MA Experiment 20001907 PARAMETER Experiment Name: At_Drought_Reproduction_P Parameter: Timepoint (day) Value: 7
  misc_feature: MA Experiment 20001907 PARAMETER Experiment Name: At_Drought_Reproduction_P Parameter: Tissue Value: Siliques
  misc_feature: MA Experiment 20001907 PARAMETER Experiment Name: At_Drought_Reproduction_P Parameter: Treatment Value: Drought vs. No Drought
  misc_feature: MA Experiment ID: 20001910 Result: Down-regulated in Transcription
  misc_feature: MA Experiment 20001910 PARAMETER Experiment Name: At_Drought_Reproduction_P Parameter: Age (day) Value: 37
  misc_feature: MA Experiment 20001910 PARAMETER Experiment Name: At_Drought_Reproduction_P Parameter: Organism Value: A. thaliana
  misc_feature: MA Experiment 20001910 PARAMETER Experiment Name: At_Drought_Reproduction_P Parameter: Plant Line Value: WS
  misc_feature: MA Experiment 20001910 PARAMETER Experiment Name: At_Drought_Reproduction_P Parameter: Timepoint (day) Value: 7
  misc_feature: MA Experiment 20001910 PARAMETER Experiment Name: At_Drought_Reproduction_P Parameter: Tissue Value: Flowers
  misc_feature: MA Experiment 20001910 PARAMETER Experiment Name: At_Drought_Reproduction_P Parameter: Treatment Value: Drought vs. No Drought
  misc_feature: MA Experiment ID: 20001911 Result: Down-regulated in Transcription
  misc_feature: MA Experiment 20001911 PARAMETER Experiment Name: At_Drought_Reproduction_P Parameter: Age (day) Value: 40
  misc_feature: MA Experiment 20001911 PARAMETER Experiment Name: At_Drought_Reproduction_P Parameter: Organism Value: A. thaliana
  misc_feature: MA Experiment 20001911 PARAMETER Experiment Name: At_Drought_Reproduction_P Parameter: Plant Line Value: WS
  misc_feature: MA Experiment 20001911 PARAMETER Experiment Name: At_Drought_Reproduction_P Parameter: Timepoint (day) Value: 10
  misc_feature: MA Experiment 20001911 PARAMETER Experiment Name: At_Drought_Reproduction_P Parameter: Tissue Value: Flowers
  misc_feature: MA Experiment 20001911 PARAMETER Experiment Name: At_Drought_Reproduction_P Parameter: Treatment Value: Drought vs. No Drought
aaatgcagaaagagaggaaaagagacaaatgaagcaactggctccaatcttggccgtggtaaacttgatcctcctggttcatggagacgagagatcagcggttggagatcctgggatgaagagagacggtctcagagtggcatttgaagcttggaacttctgcaatgaggttggcttcgaagctcctcacatgggtagtcctcgagctgcagattgcttcgatttgtcatctaaatgcatcaaagcatacacagaagaccaatcaaacaaaaccaccagtggatcttccttggtgcacaaggtatcagactcggataatgagctagggattggaaagcctaaaccaggaatcatatcagaatcagcattgcataaccctgacctttacgcggtcgagaaagaactctacctaggctccctctgtcaagtctcagacaaaccaaacccatggagtttctggatggtcatgctcaaaaatggaaactacgacacaaaatctgctctttgccctaaaaacggcaaaaagatcccacctttcaatcaacccggattattcccctgtttcggcagcggttgtatgaaccaaccgacgctgaaccacggaaaaaccgagcttcagagagatggtcaaaccatgaagggatggttcaatggtacgtacgagcaaggggcagattttggaaatgggttggatgggataagttattacgaggttgtgtgggagaagagagtaggcgttggtggttgggtatttaaacataagcttaagacttcagctaagtacccatggcttatgctttaccttagagctgatgccactaaaggattctctggtggataccattatgacactagaggaatgctcaaaacacttccggagtcaccaaactttaaagtgagactaacactaaatgtaaaacaaggaggcggagccaagagtcaattctatcttctcgacatcggaagctgctggaaaaacaacggcaagccctgcgacggtgacgtaaccaccgacgttactcgttactcggagatgatcataaaccctgaaaccccactttggtgcaaccccaagagtcttcacaactgtccaccgtaccacacgtttcggaacggcaccagagttcaccgtacggaccaccggagcttcccttacgaggcttaccacgtttactgtgcgccgggaaacgccgagcatcttgagcttccggtggggacttgtgatgcttatagtaacccacaagctcaggagattcttcagcttttgcctcacccggtttggggtgaatatggatatcctacccggttgggtgatggttgggtgggtgacccgagaacttgggatcttgatgttggtggcttgtccagtaggcttttcttctaaccaggatcccggtacgattccagcgaggaggatttggacatcggtggatgttggcaccgagatttataaagaagatgaagcaattgcagaatgggatctctctgatttcgatgttcttattacttgatttaagtcaattttataatatttgtttttttttgtcgtcaagtcaattttataatataagattcacaactaatttat

SEQ ID NO: 96414 - protein, 460 aa, Arabidopsis thaliana
  peptide (1)..(460): Ceres Seq. ID no. 12733213
  misc_feature (10)..(460): Homolog of NCBI NO: 16612271 NR Description: At2g47010/F14M4.16 [Arabidopsis thaliana]
  misc_feature (10)..(452): Homolog of NCBI NO: 7459476 NR Description: hypothetical protein At2g47010 [imported] -
  misc_feature (10)..(460): Homolog of NCBI NO: 18407231 NR Description: expressed protein; protein id: At2g47010.1, by cDNA: gi_16612270 [Arabidopsis thaliana]
  misc_feature (32)..(460): Homolog of NCBI NO: 30685122 NR Description: expressed protein [Arabidopsis thaliana]
  misc_feature (39)..(460): Homolog of NCBI NO: 25335639 NR Description: F20D23.27 protein - Arabidopsis thaliana
NAEREEKRQMKQLAPILAVVNLILLVHGDERSAVGDPGMKRDGLRVAFEAWNFCNEVGFEAPHMGSPRAADCFDLSSKCIKAYTEDQSNKTTSGSSLVHKVSDSDNELGIGKPKPGIISESALHNPDLYAVEKELYLGSLCQVSDKPNPWSFWMVMLKNGNYDTKSALCPKNGKKIPPFNQPGLFPCFGSGCMNQPTLNHGKTELQRDGQTMKGWFNGTYEQGADFGNGLDGISYYEVVWEKRVGVGGWVFKHKLKTSAKYPWLMLYLRADATKGFSGGYHYDTRGMLKTLPESPNFKVRLTLNVKQGGGAKSQFYLLDIGSCWKNNGKPCDGDVTTDVTRYSEMIINPETPLWCNPKSLHNCPPYHTFRNGTRVHRTDHRSFPYEAYHVYCAPGNAEHLELPVGTCDAYSNPQAQEILQLLPHPVWGEYGYPTRLGDGWVGDPRTWDLDVGGLSSRLFF

SEQ ID NO: 96415 - protein, 451 aa, Arabidopsis thaliana
  peptide (1)..(451): Ceres Seq. ID no. 12733214
  misc_feature (1)..(451): Homolog of NCBI NO: 16612271 NR Description: At2g47010/F14M4.16 [Arabidopsis thaliana]
  misc_feature (1)..(443): Homolog of NCBI NO: 7459476 NR Description: hypothetical protein At2g47010 [imported] -
  misc_feature (1)..(451): Homolog of NCBI NO: 18407231 NR Description: expressed protein; protein id: At2g47010.1, by cDNA: gi_16612270 [Arabidopsis thaliana]
  misc_feature (23)..(451): Homolog of NCBI NO: 30685122 NR Description: expressed protein [Arabidopsis thaliana]
  misc_feature (30)..(451): Homolog of NCBI NO: 25335639 NR Description: F20D23.27 protein - Arabidopsis thaliana
MKQLAPILAVVNLILLVHGDERSAVGDPGMKRDGLRVAFEAWNFCNEVGFEAPHMGSPRAADCFDLSSKCIKAYTEDQSNKTTSGSSLVHKVSDSDNELGIGKPKPGIISESALHNPDLYAVEKELYLGSLCQVSDKPNPWSFWMVMLKNGNYDTKSALCPKNGKKIPPFNQPGLFPCFGSGCMNQPTLNHGKTELQRDGQTMKGWFNGTYEQGADFGNGLDGISYYEVVWEKRVGVGGWVFKHKLKTSAKYPWLMLYLRADATKGFSGGYHYDTRGMLKTLPESPNFKVRLTLNVKQGGGAKSQFYLLDIGSCWKNNGKPCDGDVTTDVTRYSEMIINPETPLWCNPKSLHNCPPYHTFRNGTRVHRTDHRSFPYEAYHVYCAPGNAEHLELPVGTCDAYSNPQAQEILQLLPHPVWGEYGYPTRLGDGWVGDPRTWDLDVGGLSSRLFF

SEQ ID NO: 96416 - protein, 422 aa, Arabidopsis thaliana
  peptide (1)..(422): Ceres Seq. ID no. 12733215
  misc_feature (1)..(422): Homolog of NCBI NO: 16612271 NR Description: At2g47010/F14M4.16 [Arabidopsis thaliana]
  misc_feature (1)..(414): Homolog of NCBI NO: 7459476 NR Description: hypothetical protein At2g47010 [imported] -
  misc_feature (1)..(422): Homolog of NCBI NO: 18407231 NR Description: expressed protein; protein id: At2g47010.1, by cDNA: gi_16612270 [Arabidopsis thaliana]
  misc_feature (1)..(422): Homolog of NCBI NO: 30685122 NR Description: expressed protein [Arabidopsis thaliana]
  misc_feature (1)..(422): Homolog of NCBI NO: 25335639 NR Description: F20D23.27 protein - Arabidopsis thaliana
MKRDGLRVAFEAWNFCNEVGFEAPHMGSPRAADCFDLSSKCIKAYTEDQSNKTTSGSSLVHKVSDSDNELGIGKPKPGIISESALHNPDLYAVEKELYLGSLCQVSDKPNPWSFWMVMLKNGNYDTKSALCPKNGKKIPPFNQPGLFPCFGSGCMNQPTLNHGKTELQRDGQTMKGWFNGTYEQGADFGNGLDGISYYEVVWEKRVGVGGWVFKHKLKTSAKYPWLMLYLRADATKGFSGGYHYDTRGMLKTLPESPNFKVRLTLNVKQGGGAKSQFYLLDIGSCWKNNGKPCDGDVTTDVTRYSEMIINPETPLWCNPKSLHNCPPYHTFRNGTRVHRTDHRSFPYEAYHVYCAPGNAEHLELPVGTCDAYSNPQAQEILQLLPHPVWGEYGYPTRLGDGWVGDPRTWDLDVGGLSSRLFF

SEQ ID NO: 96417 - DNA, 774 bp, Arabidopsis thaliana
  misc_feature (1)..(774): Ceres Seq. ID no. 12733224
  misc_feature: MA Experiment ID: 20000171 Result: Down-regulated in Transcription
  misc_feature: MA Experiment 20000171 PARAMETER Experiment Name: At_42deg_Heat_P Parameter: Age (day) Value: 14
  misc_feature: MA Experiment 20000171 PARAMETER Experiment Name: At_42deg_Heat_P Parameter: Organism Value: A. thaliana
  misc_feature: MA Experiment 20000171 PARAMETER Experiment Name: At_42deg_Heat_P Parameter: Plant Line Value: WS
  misc_feature: MA Experiment 20000171 PARAMETER Experiment Name: At_42deg_Heat_P Parameter: Temperature (deg C) Value: 42 vs. 22
  misc_feature: MA Experiment 20000171 PARAMETER Experiment Name: At_42deg_Heat_P Parameter: Timepoint (hr) Value: 1
  misc_feature: MA Experiment 20000171 PARAMETER Experiment Name: At_42deg_Heat_P Parameter: Tissue Value: Aerial
  misc_feature: MA Experiment ID: 20000173 Result: Down-regulated in Transcription
  misc_feature: MA Experiment 20000173 PARAMETER Experiment Name: At_42deg_Heat_P Parameter: Age (day) Value: 14
  misc_feature: MA Experiment 20000173 PARAMETER Experiment Name: At_42deg_Heat_P Parameter: Organism Value: A. thaliana
  misc_feature: MA Experiment 20000173 PARAMETER Experiment Name: At_42deg_Heat_P Parameter: Plant Line Value: WS
  misc_feature: MA Experiment 20000173 PARAMETER Experiment Name: At_42deg_Heat_P Parameter: Temperature (deg C) Value: 42 vs. 22
  misc_feature: MA Experiment 20000173 PARAMETER Experiment Name: At_42deg_Heat_P Parameter: Timepoint (hr) Value: 6
  misc_feature: MA Experiment 20000173 PARAMETER Experiment Name: At_42deg_Heat_P Parameter: Tissue Value: Aerial
  misc_feature: MA Experiment ID: 20000182 Result: Up-regulated in Transcription
  misc_feature: MA Experiment 20000182 PARAMETER Experiment Name: At_2mM_SA_P Parameter: Age (day) Value: 14
  misc_feature: MA Experiment 20000182 PARAMETER Experiment Name: At_2mM_SA_P Parameter: Organism Value: A. thaliana
  misc_feature: MA Experiment 20000182 PARAMETER Experiment Name: At_2mM_SA_P Parameter: Plant Line Value: WS
  misc_feature: MA Experiment 20000182 PARAMETER Experiment Name: At_2mM_SA_P Parameter: Timepoint (hr) Value: 6
  misc_feature: MA Experiment 20000182 PARAMETER Experiment Name: At_2mM_SA_P Parameter: Tissue Value: Aerial
  misc_feature: MA Experiment 20000182 PARAMETER Experiment Name: At_2mM_SA_P Parameter: Treatment Value: 2mM SA vs. No Treatment
  misc_feature: MA Experiment ID: 20000184 Result: Down-regulated in Transcription
  misc_feature: MA Experiment 20000184 PARAMETER Experiment Name: At_Shoots__P Parameter: Age (day) Value: 7
  misc_feature: MA Experiment 20000184 PARAMETER Experiment Name: At_Shoots__P Parameter: Tissue Value: Shoots vs. Whole Plant
  misc_feature: MA Experiment ID: 20000227 Result: Down-regulated in Transcription
  misc_feature: MA Experiment 20000227 PARAMETER Experiment Name: At_Root-Tips-vs-Tops_P Parameter: Tissue Value: Root Tips vs. Root Tops
  misc_feature: MA Experiment ID: 20000234 Result: Down-regulated in Transcription
  misc_feature: MA Experiment 20000234 PARAMETER Experiment Name: At_Siliques_P Parameter: Age (day) Value: 21
  misc_feature: MA Experiment 20000234 PARAMETER Experiment Name: At_Siliques_P Parameter: Organism Value: A. thaliana
  misc_feature: MA Experiment 20000234 PARAMETER Experiment Name: At_Siliques_P Parameter: Plant Line Value: WS
  misc_feature: MA Experiment 20000234 PARAMETER Experiment Name: At_Siliques_P Parameter: Tissue Value: Less Than 5mm Siliques vs. Whole Plant
  misc_feature: MA Experiment ID: 20000235 Result: Down-regulated in Transcription
  misc_feature: MA Experiment 20000235 PARAMETER Experiment Name: At_Siliques_P Parameter: Age (day) Value: 21
  misc_feature: MA Experiment 20000235 PARAMETER Experiment Name: At_Siliques_P Parameter: Organism Value: A. thaliana
  misc_feature: MA Experiment 20000235 PARAMETER Experiment Name: At_Siliques_P Parameter: Plant Line Value: WS
  misc_feature: MA Experiment 20000235 PARAMETER Experiment Name: At_Siliques_P Parameter: Tissue Value: 5-10mm Siliques vs. Whole Plant
  misc_feature: MA Experiment ID: 20000267 Result: Down-regulated in Transcription
  misc_feature: MA Experiment 20000267 PARAMETER Experiment Name: At_Drought_P Parameter: Age (day) Value: 7
  misc_feature: MA Experiment 20000267 PARAMETER Experiment Name: At_Drought_P Parameter: Organism Value: A. thaliana
  misc_feature: MA Experiment 20000267 PARAMETER Experiment Name: At_Drought_P Parameter: Plant Line Value: WS
  misc_feature: MA Experiment 20000267 PARAMETER Experiment Name: At_Drought_P Parameter: Timepoint (hr) Value: 6
  misc_feature: MA Experiment 20000267 PARAMETER Experiment Name: At_Drought_P Parameter: Tissue Value: Whole Plant
  misc_feature: MA Experiment 20000267 PARAMETER Experiment Name: At_Drought_P Parameter: Treatment Value: Drought vs. No Drought
  misc_feature: MA Experiment ID: 20000436 Result: Down-regulated in Transcription
  misc_feature: MA Experiment 20000436 PARAMETER Experiment Name: At_Drought_P Parameter: Age (day) Value: 7
  misc_feature: MA Experiment 20000436 PARAMETER Experiment Name: At_Drought_P Parameter: Organism Value: A. thaliana
  misc_feature: MA Experiment 20000436 PARAMETER Experiment Name: At_Drought_P Parameter: Plant Line Value: WS
  misc_feature: MA Experiment 20000436 PARAMETER Experiment Name: At_Drought_P Parameter: Timepoint (hr) Value: 12
  misc_feature: MA Experiment 20000436 PARAMETER Experiment Name: At_Drought_P Parameter: Tissue Value: Whole Plant
  misc_feature: MA Experiment 20000436 PARAMETER Experiment Name: At_Drought_P Parameter: Treatment Value: Drought vs. No Drought
  misc_feature: MA Experiment ID: 20000437 Result: Down-regulated in Transcription
  misc_feature: MA Experiment 20000437 PARAMETER Experiment Name: At_Drought_P Parameter: Age (day) Value: 8
  misc_feature: MA Experiment 20000437 PARAMETER Experiment Name: At_Drought_P Parameter: Organism Value: A. thaliana
  misc_feature: MA Experiment 20000437 PARAMETER Experiment Name: At_Drought_P Parameter: Plant Line Value: WS
  misc_feature: MA Experiment 20000437 PARAMETER Experiment Name: At_Drought_P Parameter: Timepoint (hr) Value: 24
  misc_feature: MA Experiment 20000437 PARAMETER Experiment Name: At_Drought_P Parameter: Tissue Value: Whole Plant
  misc_feature: MA Experiment 20000437 PARAMETER Experiment Name: At_Drought_P Parameter: Treatment Value: Drought vs. No Drought
  misc_feature: MA Experiment ID: 20000438 Result: Down-regulated in Transcription
  misc_feature: MA Experiment 20000438 PARAMETER Experiment Name: At_Shoots__P Parameter: Age (day) Value: 14
  misc_feature: MA Experiment 20000438 PARAMETER Experiment Name: At_Shoots__P Parameter: Tissue Value: Shoots vs. Whole Plant
  misc_feature: MA Experiment ID: 20000495 Result: Down-regulated in Transcription
  misc_feature: MA Experiment 20000495 PARAMETER Experiment Name: At_Guard_Cells_P Parameter: Harvest Date Value: 8/2/2002
  misc_feature: MA Experiment 20000495 PARAMETER Experiment Name: At_Guard_Cells_P Parameter: Organism Value: A. thaliana
  misc_feature: MA Experiment 20000495 PARAMETER Experiment Name: At_Guard_Cells_P Parameter: Tissue Value: Guard Cells vs. Leaves
  misc_feature: MA Experiment ID: 20000527 Result: Down-regulated in Transcription
  misc_feature: MA Experiment 20000527 PARAMETER Experiment Name: At_10percent_PEG_P Parameter: Age (day) Value: 20
  misc_feature: MA Experiment 20000527 PARAMETER Experiment Name: At_10percent_PEG_P Parameter: Organism Value: A. thaliana
  misc_feature: MA Experiment 20000527 PARAMETER Experiment Name: At_10percent_PEG_P Parameter: Plant Line Value: WS
  misc_feature: MA Experiment 20000527 PARAMETER Experiment Name: At_10percent_PEG_P Parameter: Timepoint (day) Value: 20
  misc_feature: MA Experiment 20000527 PARAMETER Experiment Name: At_10percent_PEG_P Parameter: Tissue Value: Whole Plant
  misc_feature: MA Experiment 20000527 PARAMETER Experiment Name: At_10percent_PEG_P Parameter: Treatment Value: 10percent PEG vs. No Treatment
  misc_feature: MA Experiment ID: 20001554 Result: Down-regulated in Transcription
  misc_feature: MA Experiment 20001554 PARAMETER Experiment Name: At_Drought_Soil_Dry_P Parameter: Age (day) Value: 21
  misc_feature: MA Experiment 20001554 PARAMETER Experiment Name: At_Drought_Soil_Dry_P Parameter: Organism Value: A. thaliana
  misc_feature: MA Experiment 20001554 PARAMETER Experiment Name: At_Drought_Soil_Dry_P Parameter: Plant Line Value: WS
  misc_feature: MA Experiment 20001554 PARAMETER Experiment Name: At_Drought_Soil_Dry_P Parameter: Post Timepoint (hr) Value: None
  misc_feature: MA Experiment 20001554 PARAMETER Experiment Name: At_Drought_Soil_Dry_P Parameter: Post-Treatment Value: None
  misc_feature: MA Experiment 20001554 PARAMETER Experiment Name: At_Drought_Soil_Dry_P Parameter: Timepoint (day) Value: 7
  misc_feature: MA Experiment 20001554 PARAMETER Experiment Name: At_Drought_Soil_Dry_P Parameter: Treatment Value: Drought vs. No Drought
  misc_feature: MA Experiment ID: 20001555 Result: Down-regulated in Transcription
  misc_feature: MA Experiment 20001555 PARAMETER Experiment Name: At_Drought_Soil_Dry_P Parameter: Age (day) Value: 24
  misc_feature: MA Experiment 20001555 PARAMETER Experiment Name: At_Drought_Soil_Dry_P Parameter: Organism Value: A. thaliana
  misc_feature: MA Experiment 20001555 PARAMETER Experiment Name: At_Drought_Soil_Dry_P Parameter: Plant Line Value: WS
  misc_feature: MA Experiment 20001555 PARAMETER Experiment Name: At_Drought_Soil_Dry_P Parameter: Post Timepoint (hr) Value: None
  misc_feature: MA Experiment 20001555 PARAMETER Experiment Name: At_Drought_Soil_Dry_P Parameter: Post-Treatment Value: None
  misc_feature: MA Experiment 20001555 PARAMETER Experiment Name: At_Drought_Soil_Dry_P Parameter: Timepoint (day) Value: 10
  misc_feature: MA Experiment 20001555 PARAMETER Experiment Name: At_Drought_Soil_Dry_P Parameter: Treatment Value: Drought vs. No Drought
  misc_feature: MA Experiment ID: 20001560 Result: Down-regulated in Transcription
  misc_feature: MA Experiment 20001560 PARAMETER Experiment Name: At_Drought_Soil_Dry_P Parameter: Age (day) Value: 28
  misc_feature: MA Experiment 20001560 PARAMETER Experiment Name: At_Drought_Soil_Dry_P Parameter: Organism Value: A. thaliana
  misc_feature: MA Experiment 20001560 PARAMETER Experiment Name: At_Drought_Soil_Dry_P Parameter: Plant Line Value: WS
  misc_feature: MA Experiment 20001560 PARAMETER Experiment Name: At_Drought_Soil_Dry_P Parameter: Post Timepoint (hr) Value: None
  misc_feature: MA Experiment 20001560 PARAMETER Experiment Name: At_Drought_Soil_Dry_P Parameter: Post-Treatment Value: None
  misc_feature: MA Experiment 20001560 PARAMETER Experiment Name: At_Drought_Soil_Dry_P Parameter: Timepoint (day) Value: 14
  misc_feature: MA Experiment 20001560 PARAMETER Experiment Name: At_Drought_Soil_Dry_P Parameter: Treatment Value: Drought vs. No Drought
  misc_feature: MA Experiment ID: 20001757 Result: Up-regulated in Transcription
  misc_feature: MA Experiment 20001757 PARAMETER Experiment Name: At_50mM_NH4NO3_L-to-H_P Parameter: Timepoint (hr) Value: 6
  misc_feature: MA Experiment 20001757 PARAMETER Experiment Name: At_50mM_NH4NO3_L-to-H_P Parameter: Tissue Value: Leaf
  misc_feature: MA Experiment 20001757 PARAMETER Experiment Name: At_50mM_NH4NO3_L-to-H_P Parameter: Treatment Value: 50mM NH4NO3 vs 100mM Mannitol
  misc_feature: MA Experiment ID: 20001904 Result: Down-regulated in Transcription
  misc_feature: MA Experiment 20001904 PARAMETER Experiment Name: At_Drought_Reproduction_P Parameter: Age (day) Value: 37
  misc_feature: MA Experiment 20001904 PARAMETER Experiment Name: At_Drought_Reproduction_P Parameter: Organism Value: A. thaliana
  misc_feature: MA Experiment 20001904 PARAMETER Experiment Name: At_Drought_Reproduction_P Parameter: Plant Line Value: WS
  misc_feature: MA Experiment 20001904 PARAMETER Experiment Name: At_Drought_Reproduction_P Parameter: Timepoint (day) Value: 7
  misc_feature: MA Experiment 20001904 PARAMETER Experiment Name: At_Drought_Reproduction_P Parameter: Tissue Value: Rosettes
  misc_feature: MA Experiment 20001904 PARAMETER Experiment Name: At_Drought_Reproduction_P Parameter: Treatment Value: Drought vs. No Drought
atgtcgggactcagattggatggcaaaatcgcaataataacaggcggagctagcgggattggagccgaagcggttaggctgttcacggaccacggagctaaggtggtcatcgttgactttcaagaagaacttggtcaaaacgttgccgtttctgtcgggaaagacaaagcaagtttttaccgttgcgatgttacaaacgaaaaggaggtagaaaacgccgttaagttcaccgtcgaaaagtacgggaagcttgacgttctctttagtaacgccggcgttatggaacagccgggaagctttctcgacttgaatctggaacagtttgaccgaaccatggcggtcaacgttcgtggtgcggctgcgtttatcaaacacgctgcacgagccatggtggagaaaggcacgcgtgggtcaatcgtatgtacgaccagcgtcgcgtcggagatcggtggtccaggacctcacgcgtacacggcgtctaagcacgctcttctcgggctggttaaatcggcttgtggcgggctagggaagtacgggattagagtcaacggcgttgcaccatacgcggtggcgacggcgataaatagccgtgacgaggaaacggtgaggatggtggaggaatatagcgcagccacggggattctcaaaggtgtggtgcttaaggctcgccatgtggcagaggcggctttgtttctggcttcggatgattcggcttacgttagcggtcagaatctggctgttgacgggggttatagcgtcgttaagcccatttga

SEQ ID NO: 96418 - protein, 257 aa, Arabidopsis thaliana
  peptide (1)..(257): Ceres Seq. ID no. 12733225
  misc_feature (1)..(257): Homolog of NCBI NO: 15226503 NR Description: (NM_130281) putative alcohol dehydrogenase; id: At2g47130.1 [Arabidopsis thaliana] >gi|7431088|pir||T02175
  misc_feature (1)..(255): Homolog of NCBI NO: 15228656 NR Description: short-chain alcohol dehydrogenase, putative;
  misc_feature (1)..(255): Homolog of NCBI NO: 9293918 NR Description: alcohol dehydrogenase-like protein [Arabidopsis
  misc_feature (1)..(256): Homolog of NCBI NO: 15226500 NR Description: (NM_130280) putative alcohol dehydrogenase; id: At2g47120.1 [Arabidopsis thaliana] >gi|7431089|pir||T02176
  misc_feature (13)..(255): Homolog of NCBI NO: 22331405 NR Description: short-chain alcohol dehydrogenase, putative;
  misc_feature (1)..(256): Homolog of NCBI NO: 18407273 NR Description: putative alcohol dehydrogenase; protein id: supported by cDNA: gi_13878112, supported by cDNA: gi_17104782 thaliana] >gi|13878113|gb|AAK44134.1|AF370319_1 putative alcohol
  misc_feature (5)..(256): Homolog of NCBI NO: 7431087 NR Description: probable alcohol dehydrogenase [imported] -
  misc_feature (5)..(255): Homolog of NCBI NO: 15983819 NR Description: 3-beta-hydroxysteroiddehydrogenase [Digitalis
  misc_feature (4)..(254): Homolog of NCBI NO: 7981382 NR Description: putative alcohol dehydrogenase [Lycopersicon
  misc_feature (94)..(255): Homolog of NCBI NO: 9293921 NR Description: contains similarity to alcohol
MSGLRLDGKIAIITGGASGIGAEAVRLFTDHGAKVVIVDFQEELGQNVAVSVGKDKASFYRCDVTNEKEVENAVKFTVEKYGKLDVLFSNAGVMEQPGSFLDLNLEQFDRTMAVNVRGAAAFIKHAARAMVEKGTRGSIVCTTSVASEIGGPGPHAYTASKHALLGLVKSACGGLGKYGIRVNGVAPYAVATAINSRDEETVRMVEEYSAATGILKGVVLKARHVAEAALFLASDDSAYVSGQNLAVDGGYSVVKPI

SEQ ID NO: 96419 - protein, 164 aa, Arabidopsis thaliana
  peptide (1)..(164): Ceres Seq. ID no. 12733226
  misc_feature (1)..(164): Homolog of NCBI NO: 15226503 NR Description: (NM_130281) putative alcohol dehydrogenase; id: At2g47130.1 [Arabidopsis thaliana] >gi|7431088|pir||T02175
  misc_feature (1)..(162): Homolog of NCBI NO: 15228656 NR Description: short-chain alcohol dehydrogenase, putative;
  misc_feature (1)..(162): Homolog of NCBI NO: 9293918 NR Description: alcohol dehydrogenase-like protein [Arabidopsis
  misc_feature (1)..(163): Homolog of NCBI NO: 15226500 NR Description: (NM_130280) putative alcohol dehydrogenase; id: At2g47120.1 [Arabidopsis thaliana] >gi|7431089|pir||T02176
  misc_feature (1)..(162): Homolog of NCBI NO: 22331405 NR Description: short-chain alcohol dehydrogenase, putative;
  misc_feature (1)..(163): Homolog of NCBI NO: 18407273 NR Description: putative alcohol dehydrogenase; protein id: supported by cDNA: gi_13878112, supported by cDNA: gi_17104782 thaliana] >gi|13878113|gb|AAK44134.1|AF370319_1 putative alcohol
  misc_feature (1)..(163): Homolog of NCBI NO: 7431087 NR Description: probable alcohol dehydrogenase [imported] -
  misc_feature (1)..(162): Homolog of NCBI NO: 15983819 NR Description: 3-beta-hydroxysteroiddehydrogenase [Digitalis
  misc_feature (1)..(161): Homolog of NCBI NO: 7981382 NR Description: putative alcohol dehydrogenase [Lycopersicon
  misc_feature (1)..(162): Homolog of NCBI NO: 9293921 NR Description: contains similarity to alcohol
MEQPGSFLDLNLEQFDRTMAVNVRGAAAFIKHAARAMVEKGTRGSIVCTTSVASEIGGPGPHAYTASKHALLGLVKSACGGLGKYGIRVNGVAPYAVATAINSRDEETVRMVEEYSAATGILKGVVLKARHVAEAALFLASDDSAYVSGQNLAVDGGYSVVKPI

SEQ ID NO: 96420 - protein, 146 aa, Arabidopsis thaliana
  peptide (1)..(146): Ceres Seq. ID no. 12733227
  misc_feature (1)..(146): Homolog of NCBI NO: 15226503 NR Description: (NM_130281) putative alcohol dehydrogenase; id: At2g47130.1 [Arabidopsis thaliana] >gi|7431088|pir||T02175
  misc_feature (1)..(144): Homolog of NCBI NO: 15228656 NR Description: short-chain alcohol dehydrogenase, putative;
  misc_feature (1)..(144): Homolog of NCBI NO: 9293918 NR Description: alcohol dehydrogenase-like protein [Arabidopsis
  misc_feature (1)..(145): Homolog of NCBI NO: 15226500 NR Description: (NM_130280) putative alcohol dehydrogenase; id: At2g47120.1 [Arabidopsis thaliana] >gi|7431089|pir||T02176
  misc_feature (1)..(144): Homolog of NCBI NO: 22331405 NR Description: short-chain alcohol dehydrogenase, putative;
  misc_feature (1)..(145): Homolog of NCBI NO: 18407273 NR Description: putative alcohol dehydrogenase; protein id: supported by cDNA: gi_13878112, supported by cDNA: gi_17104782 thaliana] >gi|13878113|gb|AAK44134.1|AF370319_1 putative alcohol
  misc_feature (1)..(145): Homolog of NCBI NO: 7431087 NR Description: probable alcohol dehydrogenase [imported] -
  misc_feature (1)..(144): Homolog of NCBI NO: 15983819 NR Description: 3-beta-hydroxysteroiddehydrogenase [Digitalis
  misc_feature (1)..(143): Homolog of NCBI NO: 7981382 NR Description: putative alcohol dehydrogenase [Lycopersicon
  misc_feature (1)..(144): Homolog of NCBI NO: 9293921 NR Description: contains similarity to alcohol
MAVNVRGAAAFIKHAARAMVEKGTRGSIVCTTSVASEIGGPGPHAYTASKHALLGLVKSACGGLGKYGIRVNGVAPYAVATAINSRDEETVRMVEEYSAATGILKGVVLKARHVAEAALFLASDDSAYVSGQNLAVDGGYSVVKPI

SEQ ID NO: 96421 - DNA, 1032 bp, Arabidopsis thaliana
  misc_feature (1)..(1032): Ceres Seq. ID no. 12733228
  misc_feature: MA Experiment ID: 20000185 Result: Up-regulated in Transcription
  misc_feature: MA Experiment 20000185 PARAMETER Experiment Name: At_Roots__P Parameter: Age (day) Value: 7 vs. 21
  misc_feature: MA Experiment 20000185 PARAMETER Experiment Name: At_Roots__P Parameter: Organism Value: A. thaliana
  misc_feature: MA Experiment 20000185 PARAMETER Experiment Name: At_Roots__P Parameter: Tissue Value: Roots vs. Whole Plant
  misc_feature: MA Experiment ID: 20000227 Result: Up-regulated in Transcription
  misc_feature: MA Experiment 20000227 PARAMETER Experiment Name: At_Root-Tips-vs-Tops_P Parameter: Tissue Value: Root Tips vs. Root Tops
  misc_feature: MA Experiment ID: 20000437 Result: Down-regulated in Transcription
  misc_feature: MA Experiment 20000437 PARAMETER Experiment Name: At_Drought_P Parameter: Age (day) Value: 8
  misc_feature: MA Experiment 20000437 PARAMETER Experiment Name: At_Drought_P Parameter: Organism Value: A. thaliana
  misc_feature: MA Experiment 20000437 PARAMETER Experiment Name: At_Drought_P Parameter: Plant Line Value: WS
  misc_feature: MA Experiment 20000437 PARAMETER Experiment Name: At_Drought_P Parameter: Timepoint (hr) Value: 24
  misc_feature: MA Experiment 20000437 PARAMETER Experiment Name: At_Drought_P Parameter: Tissue Value: Whole Plant
  misc_feature: MA Experiment 20000437 PARAMETER Experiment Name: At_Drought_P Parameter: Treatment Value: Drought vs. No Drought
  misc_feature: MA Experiment ID: 20000439 Result: Up-regulated in Transcription
  misc_feature: MA Experiment 20000439 PARAMETER Experiment Name: At_Roots__P Parameter: Age (day) Value: 14 vs. 21
  misc_feature: MA Experiment 20000439 PARAMETER Experiment Name: At_Roots__P Parameter: Organism Value: A. thaliana
  misc_feature: MA Experiment 20000439 PARAMETER Experiment Name: At_Roots__P Parameter: Tissue Value: Roots vs. Whole Plant
atccttcaaattttcataacgtctcaacaatgtctggaaaaagattggatggcaaaatcgtaattattactggcggagcaagcgggattggggctgagtccgttcgattatttaccgaacacggcgctcgagtcgtgatcgttgatgtacaggatgagctcggtcaaaacgttgcagtttcgatcggtgaagacaaagcgagttactatcattgcgatgtcacgaacgagacggaagttgaaaacgccgttaagttcaccgtcgaaaaatatgggaagcttgacgttctgtttagtaacgccggcgtaatagagccgtttgtgagcatcctcgacttaaacctcaacgagttagaccgaacgatcgccattaacctccgcggcacagccgcattcatcaagcatgctgcacgtgccatggtggagaaaggcatccgcggctccatcgtttgcaccactagcgtcgcggctgagatcgctggcacggcaccacacgggtacacgacgtcgaagcatgggctgttgggtttgatcaaatcggcttctggtggattaggaaaatatggtataagagtaaacggcgttgctccatttggtgtcgcaacaccgttagtttgtaatggtttcaagatggaaccaaacgtggtggagcagaacacgtcagcttcggcgaatctaaagggcattgtattgaaagctcgtcacgtggcagaagctgctctgtttttagcgtccgatgagtcggcttacgttagcggacagaacctggctgttgacggtggttactcggtggtgaagccgtagctataacaacttggccacaaagatcccatgatggaatattggaattttgtttttttggtcaaaagttgacttgacttaattgttgtagaggcatggggattgagaagtttctgaggttgcaaatttccttgaaatgtggatgttgtatttttatatggtaacattcattatccaacatattgcacatctcgaggataatttatttaaacaaatactacaagcttatttg

SEQ ID NO: 96422 - protein, 266 aa, Arabidopsis thaliana
  peptide (1)..(266): Ceres Seq. ID no. 12733229
  misc_feature (10)..(266): Homolog of NCBI NO: 18407273 NR Description: putative alcohol dehydrogenase; protein id: supported by cDNA: gi_13878112, supported by cDNA: gi_17104782 thaliana] >gi|13878113|gb|AAK44134.1|AF370319_1 putative alcohol
  misc_feature (14)..(266): Homolog of NCBI NO: 7431087 NR Description: probable alcohol dehydrogenase [imported] -
  misc_feature (10)..(266): Homolog of NCBI NO: 15226503 NR Description: (NM_130281) putative alcohol dehydrogenase; id: At2g47130.1 [Arabidopsis thaliana] >gi|7431088|pir||T02175
  misc_feature (10)..(265): Homolog of NCBI NO: 15228656 NR Description: short-chain alcohol dehydrogenase, putative;
  misc_feature (9)..(265): Homolog of NCBI NO: 9293918 NR Description: alcohol dehydrogenase-like protein [Arabidopsis
  misc_feature (10)..(266): Homolog of NCBI NO: 15226500 NR Description: (NM_130280) putative alcohol dehydrogenase; id: At2g47120.1 [Arabidopsis thaliana] >gi|7431089|pir||T02176
  misc_feature (22)..(265): Homolog of NCBI NO: 22331405 NR Description: short-chain alcohol dehydrogenase, putative;
  misc_feature (10)..(265): Homolog of NCBI NO: 15983819 NR Description: 3-beta-hydroxysteroiddehydrogenase [Digitalis
  misc_feature (10)..(264): Homolog of NCBI NO: 7981382 NR Description: putative alcohol dehydrogenase [Lycopersicon
  misc_feature (16)..(264): Homolog of NCBI NO: 7431090 NR Description: probable short-chain alcohol-dehydrogenase (EC - tomato (fragment) >gi|717142|gb|AAB00109.1| alcohol
PSNFHNVSTMSGKRLDGKIVIITGGASGIGAESVRLFTEHGARVVIVDVQDELGQNVAVSIGEDKASYYHCDVTNETEVENAVKFTVEKYGKLDVLFSNAGVIEPFVSILDLNLNELDRTIAINLRGTAAFIKHAARAMVEKGIRGSIVCTTSVAAEIAGTAPHGYTTSKHGLLGLIKSASGGLGKYGIRVNGVAPFGVATPLVCNGFKMEPNVVEQNTSASANLKGIVLKARHVAEAALFLASDESAYVSGQNLAVDGGYSVVKP

SEQ ID NO: 96423 - protein, 257 aa, Arabidopsis thaliana
  peptide (1)..(257): Ceres Seq. ID no. 12733230
  misc_feature (1)..(257): Homolog of NCBI NO: 18407273 NR Description: putative alcohol dehydrogenase; protein id: supported by cDNA: gi_13878112, supported by cDNA: gi_17104782 thaliana] >gi|13878113|gb|AAK44134.1|AF370319_1 putative alcohol
  misc_feature (5)..(257): Homolog of NCBI NO: 7431087 NR Description: probable alcohol dehydrogenase [imported] -
  misc_feature (1)..(257): Homolog of NCBI NO: 15226503 NR Description: (NM_130281) putative alcohol dehydrogenase; id: At2g47130.1 [Arabidopsis thaliana] >gi|7431088|pir||T02175
  misc_feature (1)..(256): Homolog of NCBI NO: 15228656 NR Description: short-chain alcohol dehydrogenase, putative;
  misc_feature (1)..(256): Homolog of NCBI NO: 9293918 NR Description: alcohol dehydrogenase-like protein [Arabidopsis
  misc_feature (1)..(257): Homolog of NCBI NO: 15226500 NR Description: (NM_130280) putative alcohol dehydrogenase; id: At2g47120.1 [Arabidopsis thaliana] >gi|7431089|pir||T02176
  misc_feature (13)..(256): Homolog of NCBI NO: 22331405 NR Description: short-chain alcohol dehydrogenase, putative;
  misc_feature (1)..(256): Homolog of NCBI NO: 15983819 NR Description: 3-beta-hydroxysteroiddehydrogenase [Digitalis
  misc_feature (1)..(255): Homolog of NCBI NO: 7981382 NR Description: putative alcohol dehydrogenase [Lycopersicon
  misc_feature (7)..(255): Homolog of NCBI NO: 7431090 NR Description: probable short-chain alcohol-dehydrogenase (EC - tomato (fragment) >gi|717142|gb|AAB00109.1| alcohol
MSGKRLDGKIVIITGGASGIGAESVRLFTEHGARVVIVDVQDELGQNVAVSIGEDKASYYHCDVTNETEVENAVKFTVEKYGKLDVLFSNAGVIEPFVSILDLNLNELDRTIAINLRGTAAFIKHAARAMVEKGIRGSIVCTTSVAAEIAGTAPHGYTTSKHGLLGLIKSASGGLGKYGIRVNGVAPFGVATPLVCNGFKMEPNVVEQNTSASANLKGIVLKARHVAEAALFLASDESAYVSGQNLAVDGGYSVVKP

SEQ ID NO: 96424 - DNA, 822 bp, Arabidopsis thaliana
  misc_feature (1)..(822): Ceres Seq. ID no. 12733235
  misc_feature: MA Experiment ID: 20000169 Result: Up-regulated in Transcription
  misc_feature: MA Experiment 20000169 PARAMETER Experiment Name: At_100uM_ABA_P Parameter: Age (day) Value: 14
  misc_feature: MA Experiment 20000169 PARAMETER Experiment Name: At_100uM_ABA_P Parameter: Organism Value: A. thaliana
  misc_feature: MA Experiment 20000169 PARAMETER Experiment Name: At_100uM_ABA_P Parameter: Plant Line Value: WS
  misc_feature: MA Experiment 20000169 PARAMETER Experiment Name: At_100uM_ABA_P Parameter: Timepoint (hr) Value: 6
  misc_feature: MA Experiment 20000169 PARAMETER Experiment Name: At_100uM_ABA_P Parameter: Tissue Value: Aerial
  misc_feature: MA Experiment 20000169 PARAMETER Experiment Name: At_100uM_ABA_P Parameter: Treatment Value: 100uM ABA vs. No Treatment
  misc_feature: MA Experiment ID: 20000182 Result: Up-regulated in Transcription
  misc_feature: MA Experiment 20000182 PARAMETER Experiment Name: At_2mM_SA_P Parameter: Age (day) Value: 14
  misc_feature: MA Experiment 20000182 PARAMETER Experiment Name: At_2mM_SA_P Parameter: Organism Value: A. thaliana
  misc_feature: MA Experiment 20000182 PARAMETER Experiment Name: At_2mM_SA_P Parameter: Plant Line Value: WS
  misc_feature: MA Experiment 20000182 PARAMETER Experiment Name: At_2mM_SA_P Parameter: Timepoint (hr) Value: 6
  misc_feature: MA Experiment 20000182 PARAMETER Experiment Name: At_2mM_SA_P Parameter: Tissue Value: Aerial
  misc_feature: MA Experiment 20000182 PARAMETER Experiment Name: At_2mM_SA_P Parameter: Treatment Value: 2mM SA vs. No Treatment
  misc_feature: MA Experiment ID: 20000184 Result: Down-regulated in Transcription
  misc_feature: MA Experiment 20000184 PARAMETER Experiment Name: At_Shoots__P Parameter: Age (day) Value: 7
  misc_feature: MA Experiment 20000184 PARAMETER Experiment Name: At_Shoots__P Parameter: Tissue Value: Shoots vs. Whole Plant
  misc_feature: MA Experiment ID: 20000185 Result: Down-regulated in Transcription
  misc_feature: MA Experiment 20000185 PARAMETER Experiment Name: At_Roots__P Parameter: Age (day) Value: 7 vs. 21
  misc_feature: MA Experiment 20000185 PARAMETER Experiment Name: At_Roots__P Parameter: Organism Value: A. thaliana
  misc_feature: MA Experiment 20000185 PARAMETER Experiment Name: At_Roots__P Parameter: Tissue Value: Roots vs. Whole Plant
  misc_feature: MA Experiment ID: 20000234 Result: Down-regulated in Transcription
  misc_feature: MA Experiment 20000234 PARAMETER Experiment Name: At_Siliques_P Parameter: Age (day) Value: 21
  misc_feature: MA Experiment 20000234 PARAMETER Experiment Name: At_Siliques_P Parameter: Organism Value: A. thaliana
  misc_feature: MA Experiment 20000234 PARAMETER Experiment Name: At_Siliques_P Parameter: Plant Line Value: WS
  misc_feature: MA Experiment 20000234 PARAMETER Experiment Name: At_Siliques_P Parameter: Tissue Value: Less Than 5mm Siliques vs. Whole Plant
  misc_feature: MA Experiment ID: 20000235 Result: Down-regulated in Transcription
  misc_feature: MA Experiment 20000235 PARAMETER Experiment Name: At_Siliques_P Parameter: Age (day) Value: 21
  misc_feature: MA Experiment 20000235 PARAMETER Experiment Name: At_Siliques_P Parameter: Organism Value: A. thaliana
  misc_feature: MA Experiment 20000235 PARAMETER Experiment Name: At_Siliques_P Parameter: Plant Line Value: WS
  misc_feature: MA Experiment 20000235 PARAMETER Experiment Name: At_Siliques_P Parameter: Tissue Value: 5-10mm Siliques vs. Whole Plant
  misc_feature: MA Experiment ID: 20000265 Result: Down-regulated in Transcription
  misc_feature: MA Experiment 20000265 PARAMETER Experiment Name: At_Open_Flower_P Parameter: Age (day) Value: 21
  misc_feature: MA Experiment 20000265 PARAMETER Experiment Name: At_Open_Flower_P Parameter: Plant Line Value: WS
  misc_feature: MA Experiment 20000265 PARAMETER Experiment Name: At_Open_Flower_P Parameter: Tissue Value: Closed Flower vs. Whole Plant
  misc_feature: MA Experiment ID: 20000286 Result: Down-regulated in Transcription
  misc_feature: MA Experiment 20000286 PARAMETER Experiment Name: At_Open_Flower_P Parameter: Age (day) Value: 21
  misc_feature: MA Experiment 20000286 PARAMETER Experiment Name: At_Open_Flower_P Parameter: Plant Line Value: WS
  misc_feature: MA Experiment 20000286 PARAMETER Experiment Name: At_Open_Flower_P Parameter: Tissue Value: Half Open vs. Whole Plant
  misc_feature: MA Experiment ID: 20000438 Result: Down-regulated in Transcription
  misc_feature: MA Experiment 20000438 PARAMETER Experiment Name: At_Shoots__P Parameter: Age (day) Value: 14
  misc_feature: MA Experiment 20000438 PARAMETER Experiment Name: At_Shoots__P Parameter: Tissue Value: Shoots vs. Whole Plant
  misc_feature: MA Experiment ID: 20000439 Result: Down-regulated in Transcription
  misc_feature: MA Experiment 20000439 PARAMETER Experiment Name: At_Roots__P Parameter: Age (day) Value: 14 vs. 21
  misc_feature: MA Experiment 20000439 PARAMETER Experiment Name: At_Roots__P Parameter: Organism Value: A. thaliana
  misc_feature: MA Experiment 20000439 PARAMETER Experiment Name: At_Roots__P Parameter: Tissue Value: Roots vs. Whole Plant
  misc_feature: MA Experiment ID: 20000453 Result: Up-regulated in Transcription
  misc_feature: MA Experiment 20000453 PARAMETER Experiment Name: At_100uM_ABA_P Parameter: Age (day) Value: 15
  misc_feature: MA Experiment 20000453 PARAMETER Experiment Name: At_100uM_ABA_P Parameter: Organism Value: A. thaliana
  misc_feature: MA Experiment 20000453 PARAMETER Experiment Name: At_100uM_ABA_P Parameter: Plant Line Value: WS
  misc_feature: MA Experiment 20000453 PARAMETER Experiment Name: At_100uM_ABA_P Parameter: Timepoint (hr) Value: 24
  misc_feature: MA Experiment 20000453 PARAMETER Experiment Name: At_100uM_ABA_P Parameter: Tissue Value: Aerial
  misc_feature: MA Experiment 20000453 PARAMETER Experiment Name: At_100uM_ABA_P Parameter: Treatment Value: 100uM ABA vs. No Treatment
  misc_feature: MA Experiment ID: 20000527 Result: Down-regulated in Transcription
  misc_feature: MA Experiment 20000527 PARAMETER Experiment Name: At_10percent_PEG_P Parameter: Age (day) Value: 20
  misc_feature: MA Experiment 20000527 PARAMETER Experiment Name: At_10percent_PEG_P Parameter: Organism Value: A. thaliana
  misc_feature: MA Experiment 20000527 PARAMETER Experiment Name: At_10percent_PEG_P Parameter: Plant Line Value: WS
  misc_feature: MA Experiment 20000527 PARAMETER Experiment Name: At_10percent_PEG_P Parameter: Timepoint (day) Value: 20
  misc_feature: MA Experiment 20000527 PARAMETER Experiment Name: At_10percent_PEG_P Parameter: Tissue Value: Whole Plant
  misc_feature: MA Experiment 20000527 PARAMETER Experiment Name: At_10percent_PEG_P Parameter: Treatment Value: 10percent PEG vs. No Treatment
  misc_feature: MA Experiment ID: 20001555 Result: Up-regulated in Transcription
  misc_feature: MA Experiment 20001555 PARAMETER Experiment Name: At_Drought_Soil_Dry_P Parameter: Age (day) Value: 24
  misc_feature: MA Experiment 20001555 PARAMETER Experiment Name: At_Drought_Soil_Dry_P Parameter: Organism Value: A. thaliana
  misc_feature: MA Experiment 20001555 PARAMETER Experiment Name: At_Drought_Soil_Dry_P Parameter: Plant Line Value: WS
  misc_feature: MA Experiment 20001555 PARAMETER Experiment Name: At_Drought_Soil_Dry_P Parameter: Post Timepoint (hr) Value: None
  misc_feature: MA Experiment 20001555 PARAMETER Experiment Name: At_Drought_Soil_Dry_P Parameter: Post-Treatment Value: None
  misc_feature: MA Experiment 20001555 PARAMETER Experiment Name: At_Drought_Soil_Dry_P Parameter: Timepoint (day) Value: 10
  misc_feature: MA Experiment 20001555 PARAMETER Experiment Name: At_Drought_Soil_Dry_P Parameter: Treatment Value: Drought vs. No Drought
  misc_feature: MA Experiment ID: 20001904 Result: Up-regulated in Transcription
  misc_feature: MA Experiment 20001904 PARAMETER Experiment Name: At_Drought_Reproduction_P Parameter: Age (day) Value: 37
  misc_feature: MA Experiment 20001904 PARAMETER Experiment Name: At_Drought_Reproduction_P Parameter: Organism Value: A. thaliana
  misc_feature: MA Experiment 20001904 PARAMETER Experiment Name: At_Drought_Reproduction_P Parameter: Plant Line Value: WS
  misc_feature: MA Experiment 20001904 PARAMETER Experiment Name: At_Drought_Reproduction_P Parameter: Timepoint (day) Value: 7
  misc_feature: MA Experiment 20001904 PARAMETER Experiment Name: At_Drought_Reproduction_P Parameter: Tissue Value: Rosettes
  misc_feature: MA Experiment 20001904 PARAMETER Experiment Name: At_Drought_Reproduction_P Parameter: Treatment Value: Drought vs. No Drought
  misc_feature: MA Experiment ID: 20001905 Result: Up-regulated in Transcription
  misc_feature: MA Experiment 20001905 PARAMETER Experiment Name: At_Drought_Reproduction_P Parameter: Age (day) Value: 40
  misc_feature: MA Experiment 20001905 PARAMETER Experiment Name: At_Drought_Reproduction_P Parameter: Organism Value: A. thaliana
  misc_feature: MA Experiment 20001905 PARAMETER Experiment Name: At_Drought_Reproduction_P Parameter: Plant Line Value: WS
  misc_feature: MA Experiment 20001905 PARAMETER Experiment Name: At_Drought_Reproduction_P Parameter: Timepoint (day) Value: 10
  misc_feature: MA Experiment 20001905 PARAMETER Experiment Name: At_Drought_Reproduction_P Parameter: Tissue Value: Rosettes
  misc_feature: MA Experiment 20001905 PARAMETER Experiment Name: At_Drought_Reproduction_P Parameter: Treatment Value: Drought vs. No Drought
atggaagattacgagcgaataaactcaaactctccaacacatgaagaagattctgatgtacggaaaggtccatggaccgaggaagaagatgcaatcctagtcaacttcgtctctatccatggcgatgctcgttggaaccacatcgctcgttcctctgggctaaagcgaactggtaagagttgtagattaagatggcttaattacttacgtccagatgttagaagaggcaacatcactctcgaagaacaatttatgatcctcaaactccattctctttggggcaataggtggtcgaagattgcgcaatatctaccgggaagaacagataatgaaataaagaattattggagaactcgagtccaaaagcaagccaaacacctaagatgcgatgttaacagtaatcttttcaaggagactatgagaaatgtttggatgccgagattagtggaacgaatcaacgcccaatcattacccaccacgtgtgaacaagtggagtcaatgatcaccgacccaagtcaaccagttaacgaaccgagtccggtcgagccgggtttcgttcaattcagccagaatcatcatcagcaattcgtaccggctacggaattgtcagcaacgtcttcgaattctccggctgagacgttttcggacgttcgaggtggggtggtgaacgggtcaggttatgatccgtcgggtcaaacgggtttcggagagttcaacgattggggctgtgttggtggggacaacatgtggactgacgaggagagtttttggttcttgcaggaccagttctgccccgatacgacatcgtattcgtataattaa

SEQ ID NO: 96425 - protein, 273 aa, Arabidopsis thaliana
  peptide (1)..(273): Ceres Seq. ID no. 12733236
  misc_feature (22)..(69): Pfam Name: Myb-like DNA-binding domain Pfam Description: Myb-like DNA-binding domain
  misc_feature (1)..(273): Homolog of NCBI NO: 15226524 NR Description: MYB transcription factor (Atmyb2); protein id: [Arabidopsis thaliana] >gi|541881|pir||JQ2390 MYB transcription
  misc_feature (1)..(273): Homolog of NCBI NO: 14970954 NR Description: MYB transcription factor Atmyb2 [Arabidopsis >gi|14970956|dbj|BAB62113.1| MYB transcription factor Atmyb2 thaliana] >gi|14970962|dbj|BAB62116.1| MYB transcription factor
  misc_feature (1)..(273): Homolog of NCBI NO: 14970958 NR Description: MYB transcription factor Atmyb2 [Arabidopsis
  misc_feature (1)..(273): Homolog of NCBI NO: 14970972 NR Description: MYB transcription factor Atmyb2 [Arabidopsis >gi|14970978|dbj|BAB62124.1| MYB transcription factor Atmyb2 thaliana] >gi|14970988|dbj|BAB62129.1| MYB transcription factor
  misc_feature (1)..(273): Homolog of NCBI NO: 14970968 NR Description: MYB transcription factor Atmyb2 [Arabidopsis
  misc_feature (1)..(273): Homolog of NCBI NO: 14970966 NR Description: MYB transcription factor Atmyb2 [Arabidopsis
  misc_feature (1)..(273): Homolog of NCBI NO: 14970960 NR Description: MYB transcription factor Atmyb2 [Arabidopsis
  misc_feature (1)..(261): Homolog of NCBI NO: 14970950 NR Description: MYB transcription factor Atmyb2 [Arabis gemmifera]
  misc_feature (41)..(261): Homolog of NCBI NO: 14970952 NR Description: MYB transcription factor Atmyb2 [Crucihimalaya
  misc_feature (1)..(209): Homolog of NCBI NO: 23476307 NR Description: myb-like transcription factor 5 [Gossypioides
MEDYERINSNSPTHEEDSDVRKGPWTEEEDAILVNFVSIHGDARWNHIARSSGLKRTGKSCRLRWLNYLRPDVRRGNITLEEQFMILKLHSLWGNRWSKIAQYLPGRTDNEIKNYWRTRVQKQAKHLRCDVNSNLFKETMRNVWMPRLVERINAQSLPTTCEQVESMITDPSQPVNEPSPVEPGFVQFSQNHHQQFVPATELSATSSNSPAETFSDVRGGVVNGSGYDPSGQTGFGEFNDWGCVGGDNMWTDEESFWFLQDQFCPDTTSYSYN

SEQ ID NO: 96426 - protein, 189 aa, Arabidopsis thaliana
  peptide (1)..(189): Ceres Seq. ID no. 12733237
  misc_feature (1)..(189): Homolog of NCBI NO: 15226524 NR Description: MYB transcription factor (Atmyb2); protein id: [Arabidopsis thaliana] >gi|541881|pir||JQ2390 MYB transcription
  misc_feature (1)..(189): Homolog of NCBI NO: 14970954 NR Description: MYB transcription factor Atmyb2 [Arabidopsis >gi|14970956|dbj|BAB62113.1| MYB transcription factor Atmyb2 thaliana] >gi|14970962|dbj|BAB62116.1| MYB transcription factor
  misc_feature (1)..(189): Homolog of NCBI NO: 14970958 NR Description: MYB transcription factor Atmyb2 [Arabidopsis
  misc_feature (1)..(189): Homolog of NCBI NO: 14970972 NR Description: MYB transcription factor Atmyb2 [Arabidopsis >gi|14970978|dbj|BAB62124.1| MYB transcription factor Atmyb2 thaliana] >gi|14970988|dbj|BAB62129.1| MYB transcription factor
  misc_feature (1)..(189): Homolog of NCBI NO: 14970968 NR Description: MYB transcription factor Atmyb2 [Arabidopsis
  misc_feature (1)..(189): Homolog of NCBI NO: 14970966 NR Description: MYB transcription factor Atmyb2 [Arabidopsis
  misc_feature (1)..(189): Homolog of NCBI NO: 14970960 NR Description: MYB transcription factor Atmyb2 [Arabidopsis
  misc_feature (1)..(177): Homolog of NCBI NO: 14970950 NR Description: MYB transcription factor Atmyb2 [Arabis gemmifera]
  misc_feature (1)..(177): Homolog of NCBI NO: 14970952 NR Description: MYB transcription factor Atmyb2 [Crucihimalaya
  misc_feature (1)..(125): Homolog of NCBI NO: 23476307 NR Description: myb-like transcription factor 5 [Gossypioides
MILKLHSLWGNRWSKIAQYLPGRTDNEIKNYWRTRVQKQAKHLRCDVNSNLFKETMRNVWMPRLVERINAQSLPTTCEQVESMITDPSQPVNEPSPVEPGFVQFSQNHHQQFVPATELSATSSNSPAETFSDVRGGVVNGSGYDPSGQTGFGEFNDWGCVGGDNMWTDEESFWFLQDQFCPDTTSYSYN

SEQ ID NO: 96427 - DNA, 2482 bp, Arabidopsis thaliana
  misc_feature (1)..(2482): Ceres Seq. ID no. 12733250
  misc_feature: MA Experiment ID: 20000180 Result: Down-regulated in Transcription
  misc_feature: MA Experiment 20000180 PARAMETER Experiment Name: At_Germinating_Seeds_P Parameter: Age (hr) Value: 24 vs. 0
  misc_feature: MA Experiment 20000180 PARAMETER Experiment Name: At_Germinating_Seeds_P Parameter: Tissue Value: Germinating Seeds
aaatttcgtcgtaattggcaacagttaagctctttgctaaaagctctagctgagaagcgaaattcgaagtgaagaatgtctaatcgcaaattcggaatggaaggattcggcattaatcggcaaactagctacagtttcgagcgatctcaagcaccgcaacgtctctacgtccctccctcgtctcgcggcggagacaactccgaagatgccgatcttgataacattgattacatggaaaacgaagaagctgaggaagatattgaggaaggcggttctgctgcggctagcggtggcgaggttgatgagatcgatccattagatgcttttatggagggaattcaccaggagatgaaatctgctccacctcctaagccaaaggagaaactagagaggtacaaggacgacgatgacgatcctgttgagagttacctcaaggccaagaaggatttgggcctgacactagccgccgatgcacttaacgccggttataactccgacgaggaggtgtatgctgcagctaaggcggtcgatgcagggatgctagattatgattccgatgataatccgattgttgtggataaaaggaagattgagcctattacagctctggatcatagctccatcgattatgaacctattaataaggacttttacgaggagctagaatcaatatcaggaatgactgagcaagaaaccacggattaccgtcagagattagggattcgggtctcgggttttgatgttcataggccagttaagacctttgaggattgtggattttcctcacagattatgagtgctatcaaaaagcaagcttatgaaaaacctacagcaatccaatgtcaggctttacctattgtgttgtctggtcgagatgttattggcatagccaaaactggttcaggtaagactgcagcgtttgttcttccaatgattgttcatattatggatcagcctgaacttcagagagatgaaggtccaattggtgtcatatgtgctccaaccagagaattggctcatcaaatcttcttggaagccaagaaattttcgaaagcatatggcttacgagtctctgctgtgtatggtggaatgtctaaacatgaacagtttaaggaactcaaggcaggatgcgaaatagttgttgctactcctggaaggttgatagacatgctgaagatgaaggctttgacaatgatgagagccagttatttggttcttgatgaggcagatcggatgtttgaccttggctttgagccacaagtaaggtctattgttggccagattcgtcctgatcgccagactttactattttcagccactatgccttggaaagttgaaaagttagctagggaaatcctttcagatcctattagagtcacagttggtgaagtggggatggccaatgaagatattacgcaggttgtcaatgtcataccttctgatgctgaaaaacttccctggctacttgaaaagctccctggaatgattgatgagggtgacgtattagtgtttgcatctaaaaaggccactgttgatgagattgaagctcaacttactctaaattccttcaaagttgctgctcttcacggtgataaagaccaagcatcacgaatggaaactctgcagaagttcaaatctggagttcaccatgtgctgattgccactgatgttgctgcccgaggtcttgacatcaaatcgcttaagacagtggttaactatgacatcgcaaaagatatggacatgcatgtacatcgtattggtagaacaggccgtgccggtgacagagatggggttgcctacacacttgttacgcagagagaggctagatttgctggtgaattggtaaacagtctggttgctgctggtcaaaatgtgcctccagaactcacagatcttgccatgaaggatggacgattcaagtccaagcgtgacgggagaaaaggaggtaagaaaggccgaggaggaggtggtggaaacaaaggagtacgtggagttgattttggtcttggtattggatttagctcggaatctagtaggacaccttcttctaaagctgcaccaagtagaagtggggcaatcaattcagtgagaactggagtaatggcccaattcaagaatagttttgtcgctgcaacgccatcaaatccacaaaaccaagcttatccaaacaagagaccatccctaatgggctttgtctcaggtggtactattggtggagacatgggtagaactcagagtcaagctcccccagtagcacctactcaaaacgcctcatcacacaactccagccagaatcactcacagagttctgagaatcggcctagagagaggaagagaagatctggttgggataattgagtgagccacgttttgcatgatgatagtggaagtgttttgcacaacaatgtaatgaatgttgtataatttgttttatcctttcccgtttcagcctttgaatatataaattttccatttctaaaac

SEQ ID NO: 96428 - protein, 760 aa, Arabidopsis thaliana
  peptide (1)..(760): Ceres Seq. ID no. 12733251
  misc_feature (241)..(449): Pfam Name: DEAD/DEAH box helicase Pfam Description: DEAD/DEAH box helicase
  misc_feature (11)..(733): Homolog of NCBI NO: 29420431 NR Description: RNA helicase-related protein [Homo sapiens]
  misc_feature (41)..(689): Homolog of NCBI NO: 27696431 NR Description: Similar to RIKEN cDNA 1810047H21 gene [Xenopus
  misc_feature (138)..(749): Homolog of NCBI NO: 27261822 NR Description: RNA helicase-related protein [Mus musculus]
  misc_feature (138)..(749): Homolog of NCBI NO: 37573956 NR Description: DEAD (Asp-Glu-Ala-Asp) box polypeptide 42 [Mus
  misc_feature (138)..(733): Homolog of NCBI NO: 11267525 NR Description: probable RNA helicase - human
  misc_feature (138)..(733): Homolog of NCBI NO: 11321632 NR Description: RNA helicase-related protein; RNA helicase-like
  misc_feature (31)..(759): Homolog of NCBI NO: 24662330 NR Description: CG6418-PB [Drosophila melanogaster]
  misc_feature (51)..(695): Homolog of NCBI NO: 17552642 NR Description: DEAD DEAH box helicase (90.4 kD) [Caenorhabditis
  misc_feature (51)..(695): Homolog of NCBI NO: 39590574 NR Description: Hypothetical protein CBG09775 [Caenorhabditis
  misc_feature (44)..(638): Homolog of NCBI NO: 15218071 NR Description: DEAD/DEAH box RNA helicase, putative; protein id: [Arabidopsis thaliana] >gi|25518759|pir||H86341 hypothetical
MSNRKFGMEGFGINRQTSYSFERSQAPQRLYVPPSSRGGDNSEDADLDNIDYMENEEAEEDIEEGGSAAASGGEVDEIDPLDAFMEGIHQEMKSAPPPKPKEKLERYKDDDDDPVESYLKAKKDLGLTLAADALNAGYNSDEEVYAAAKAVDAGMLDYDSDDNPIVVDKRKIEPITALDHSSIDYEPINKDFYEELESISGMTEQETTDYRQRLGIRVSGFDVHRPVKTFEDCGFSSQIMSAIKKQAYEKPTAIQCQALPIVLSGRDVIGIAKTGSGKTAAFVLPMIVHIMDQPELQRDEGPIGVICAPTRELAHQIFLEAKKFSKAYGLRVSAVYGGMSKHEQFKELKAGCEIVVATPGRLIDMLKMKALTMMRASYLVLDEADRMFDLGFEPQVRSIVGQIRPDRQTLLFSATMPWKVEKLAREILSDPIRVTVGEVGMANEDITQVVNVIPSDAEKLPWLLEKLPGMIDEGDVLVFASKKATVDEIEAQLTLNSFKVAALHGDKDQASRMETLQKFKSGVHHVLIATDVAARGLDIKSLKTVVNYDIAKDMDMHVHRIGRTGRAGDRDGVAYTLVTQREARFAGELVNSLVAAGQNVPPELTDLAMKDGRFKSKRDGRKGGKKGRGGGGGNKGVRGVDFGLGIGFSSESSRTPSSKAAPSRSGAINSVRTGVMAQFKNSFVAATPSNPQNQAYPNKRPSLMGFVSGGTIGGDMGRTQSQAPPVAPTQNASSHNSSQNHSQSSENRPRERKRRSGWDN

SEQ ID NO: 96429 - protein, 753 aa, Arabidopsis thaliana
  peptide (1)..(753): Ceres Seq. ID no. 12733252
  misc_feature (234)..(442): Pfam Name: DEAD/DEAH box helicase Pfam Description: DEAD/DEAH box helicase
  misc_feature (4)..(726): Homolog of NCBI NO: 29420431 NR Description: RNA helicase-related protein [Homo sapiens]
  misc_feature (34)..(682): Homolog of NCBI NO: 27696431 NR Description: Similar to RIKEN cDNA 1810047H21 gene [Xenopus
  misc_feature (131)..(742): Homolog of NCBI NO: 27261822 NR Description: RNA helicase-related protein [Mus musculus]
  misc_feature (131)..(742): Homolog of NCBI NO: 37573956 NR Description: DEAD (Asp-Glu-Ala-Asp) box polypeptide 42 [Mus
  misc_feature (131)..(726): Homolog of NCBI NO: 11267525 NR Description: probable RNA helicase - human
  misc_feature (131)..(726): Homolog of NCBI NO: 11321632 NR Description: RNA helicase-related protein; RNA helicase-like
  misc_feature (24)..(752): Homolog of NCBI NO: 24662330 NR Description: CG6418-PB [Drosophila melanogaster]
  misc_feature (44)..(688): Homolog of NCBI NO: 17552642 NR Description: DEAD DEAH box helicase (90.4 kD) [Caenorhabditis
  misc_feature (44)..(688): Homolog of NCBI NO: 39590574 NR Description: Hypothetical protein CBG09775 [Caenorhabditis
  misc_feature (37)..(631): Homolog of NCBI NO: 15218071 NR Description: DEAD/DEAH box RNA helicase, putative; protein id: [Arabidopsis thaliana] >gi|25518759|pir||H86341 hypothetical
MEGFGINRQTSYSFERSQAPQRLYVPPSSRGGDNSEDADLDNIDYMENEEAEEDIEEGGSAAASGGEVDEIDPLDAFMEGIHQEMKSAPPPKPKEKLERYKDDDDDPVESYLKAKKDLGLTLAADALNAGYNSDEEVYAAAKAVDAGMLDYDSDDNPIVVDKRKIEPITALDHSSIDYEPINKDFYEELESISGMTEQETTDYRQRLGIRVSGFDVHRPVKTFEDCGFSSQIMSAIKKQAYEKPTAIQCQALPIVLSGRDVIGIAKTGSGKTAAFVLPMIVHIMDQPELQRDEGPIGVICAPTRELAHQIFLEAKKFSKAYGLRVSAVYGGMSKHEQFKELKAGCEIVVATPGRLIDMLKMKALTMMRASYLVLDEADRMFDLGFEPQVRSIVGQIRPDRQTLLFSATMPWKVEKLAREILSDPIRVTVGEVGMANEDITQVVNVIPSDAEKLPWLLEKLPGMIDEGDVLVFASKKATVDEIEAQLTLNSFKVAALHGDKDQASRMETLQKFKSGVHHVLIATDVAARGLDIKSLKTVVNYDIAKDMDMHVHRIGRTGRAGDRDGVAYTLVTQREARFAGELVNSLVAAGQNVPPELTDLAMKDGRFKSKRDGRKGGKKGRGGGGGNKGVRGVDFGLGIGFSSESSRTPSSKAAPSRSGAINSVRTGVMAQFKNSFVAATPSNPQNQAYPNKRPSLMGFVSGGTIGGDMGRTQSQAPPVAPTQNASSHNSSQNHSQSSENRPRERKRRSGWDN

SEQ ID NO: 96430 - protein, 708 aa, Arabidopsis thaliana
  peptide (1)..(708): Ceres Seq. ID no. 12733253
  misc_feature (189)..(397): Pfam Name: DEAD/DEAH box helicase Pfam Description: DEAD/DEAH box helicase
  misc_feature (1)..(681): Homolog of NCBI NO: 29420431 NR Description: RNA helicase-related protein [Homo sapiens]
  misc_feature (1)..(637): Homolog of NCBI NO: 27696431 NR Description: Similar to RIKEN cDNA 1810047H21 gene [Xenopus
  misc_feature (86)..(697): Homolog of NCBI NO: 27261822 NR Description: RNA helicase-related protein [Mus musculus]
  misc_feature (86)..(697): Homolog of NCBI NO: 37573956 NR Description: DEAD (Asp-Glu-Ala-Asp) box polypeptide 42 [Mus
  misc_feature (86)..(681): Homolog of NCBI NO: 11267525 NR Description: probable RNA helicase - human
  misc_feature (86)..(681): Homolog of NCBI NO: 11321632 NR Description: RNA helicase-related protein; RNA helicase-like
  misc_feature (1)..(707): Homolog of NCBI NO: 24662330 NR Description: CG6418-PB [Drosophila melanogaster]
  misc_feature (1)..(643): Homolog of NCBI NO: 17552642 NR Description: DEAD DEAH box helicase (90.4 kD) [Caenorhabditis
  misc_feature (1)..(643): Homolog of NCBI NO: 39590574 NR Description: Hypothetical protein CBG09775 [Caenorhabditis
  misc_feature (1)..(586): Homolog of NCBI NO: 15218071 NR Description: DEAD/DEAH box RNA helicase, putative; protein id: [Arabidopsis thaliana] >gi|25518759|pir||H86341 hypothetical
MENEEAEEDIEEGGSAAASGGEVDEIDPLDAFMEGIHQEMKSAPPPKPKEKLERYKDDDDDPVESYLKAKKDLGLTLAADALNAGYNSDEEVYAAAKAVDAGMLDYDSDDNPIVVDKRKIEPITALDHSSIDYEPINKDFYEELESISGMTEQETTDYRQRLGIRVSGFDVHRPVKTFEDCGFSSQIMSAIKKQAYEKPTAIQCQALPIVLSGRDVIGIAKTGSGKTAAFVLPMIVHIMDQPELQRDEGPIGVICAPTRELAHQIFLEAKKFSKAYGLRVSAVYGGMSKHEQFKELKAGCEIVVATPGRLIDMLKMKALTMMRASYLVLDEADRMFDLGFEPQVRSIVGQIRPDRQTLLFSATMPWKVEKLAREILSDPIRVTVGEVGMANEDITQVVNVIPSDAEKLPWLLEKLPGMIDEGDVLVFASKKATVDEIEAQLTLNSFKVAALHGDKDQASRMETLQKFKSGVHHVLIATDVAARGLDIKSLKTVVNYDIAKDMDMHVHRIGRTGRAGDRDGVAYTLVTQREARFAGELVNSLVAAGQNVPPELTDLAMKDGRFKSKRDGRKGGKKGRGGGGGNKGVRGVDFGLGIGFSSESSRTPSSKAAPSRSGAINSVRTGVMAQFKNSFVAATPSNPQNQAYPNKRPSLMGFVSGGTIGGDMGRTQSQAPPVAPTQNASSHNSSQNHSQSSENRPRERKRRSGWDN

SEQ ID NO: 96431 - DNA, 4824 bp, Arabidopsis thaliana
  misc_feature (1)..(4824): Ceres Seq. ID no. 12733263
  misc_feature: MA Experiment ID: 20000184 Result: Down-regulated in Transcription
  misc_feature: MA Experiment 20000184 PARAMETER Experiment Name: At_Shoots__P Parameter: Age (day) Value: 7
  misc_feature: MA Experiment 20000184 PARAMETER Experiment Name: At_Shoots__P Parameter: Tissue Value: Shoots vs. Whole Plant
  misc_feature: MA Experiment ID: 20000794 Result: Up-regulated in Transcription
  misc_feature: MA Experiment 20000794 PARAMETER Experiment Name: At_Petals_P Parameter: Age (day) Value: 23-25 days
  misc_feature: MA Experiment 20000794 PARAMETER Experiment Name: At_Petals_P Parameter: Plant Line Value: WS
  misc_feature: MA Experiment 20000794 PARAMETER Experiment Name: At_Petals_P Parameter: Tissue Value: Petals vs. Whole plant
  misc_feature: MA Experiment ID: 20001451 Result: Down-regulated in Transcription
  misc_feature: MA Experiment 20001451 PARAMETER Experiment Name: At_Far-red-induction_P Parameter: Age (day) Value: 7
  misc_feature: MA Experiment 20001451 PARAMETER Experiment Name: At_Far-red-induction_P Parameter: Light Value: Far-red vs. White
  misc_feature: MA Experiment 20001451 PARAMETER Experiment Name: At_Far-red-induction_P Parameter: Organism Value: A. thaliana
  misc_feature: MA Experiment 20001451 PARAMETER Experiment Name: At_Far-red-induction_P Parameter: Plant Line Value: Columbia
  misc_feature: MA Experiment 20001451 PARAMETER Experiment Name: At_Far-red-induction_P Parameter: Timepoint (hr) Value: 24
  misc_feature: MA Experiment 20001451 PARAMETER Experiment Name: At_Far-red-induction_P Parameter: Tissue Value: Whole Plant
  misc_feature: MA Experiment ID: 20001905 Result: Up-regulated in Transcription
  misc_feature: MA Experiment 20001905 PARAMETER Experiment Name: At_Drought_Reproduction_P Parameter: Age (day) Value: 40
  misc_feature: MA Experiment 20001905 PARAMETER Experiment Name: At_Drought_Reproduction_P Parameter: Organism Value: A. thaliana
  misc_feature: MA Experiment 20001905 PARAMETER Experiment Name: At_Drought_Reproduction_P Parameter: Plant Line Value: WS
  misc_feature: MA Experiment 20001905 PARAMETER Experiment Name: At_Drought_Reproduction_P Parameter: Timepoint (day) Value: 10
  misc_feature: MA Experiment 20001905 PARAMETER Experiment Name: At_Drought_Reproduction_P Parameter: Tissue Value: Rosettes
  misc_feature: MA Experiment 20001905 PARAMETER Experiment Name: At_Drought_Reproduction_P Parameter: Treatment Value: Drought vs. No Drought
atggactggatacacaaatctactccttttatggaaccttcgaatttggcaaaactggttcaaggaaatgttcctcttcagccacatgacagccattcttcgctaactgatctagatatggaccttagagaagtctatttcctgattttacattttctttctattggcccctgcgaacgaacctttggccacttgagagacgaaattttggaaaaagggcttttaccccgtagatatcattcctggtggtcaagaagtggcatttatagcgggcgtgctgatgatgatggcatctccctccccttgagttatgataatttgatagagaggtatcctcatatcgaaaaggatcacttggtgaagcttctcaaacaactaattttaaacccgtctttcccttcacacatgagagttgaaggaaatgctcctaatgctgctgatgttccaacactattgggatctggcaccttttcacttgtggatcgtagtaattcttattcatctactttgtccaacatgttcctttggatctgggacttgaaaaaatcccatatatgcatagaacctgatagtggctctaaggctttgcattttagaaatttgtttttctggctttggcaatctttacttggtatcatgacttgtattgggaattctggtgaagtagctcatataggagaagttaagtccaggggtaacaatatagagtctcagaaagctaggcatgttgcgtcatacttacgctggccgcatatgcatgccgatcaagtgcgtggcctaagtctcagagaaattggaggaggtttcaggaaacaccaccgtgctccgtccattctttcagcatgtcatgctattgcaaaaccatcaacaatggttcaaaagatgcaaaatataaagaagctcagaggacatcgtaatgctgtctactgcgctatatttgatcgttctggaagatatgttatcactggctccgatgaccggcttgtcaaaatttggtcaatggaaactgcgctttgcttggctagctgccgtgggcatgaaggtgacattacagacttggccgttagttcaaacaatgctttggttgcttcagcttcaaacgattttgtgattcgagtgtggcggttgcctgatggaatgccaatttctgtattgcggggacacactggagctgttaccgcaattgcattcagtcccagacaggcgtctgtttaccaacttttatcgtcatcagatgatggaacctgtcgtatctgggatgctaggtattctcagtggctcccacgaatctatgttccaagtccttcagatgctaacactggctcattggaagtttctctcttaggcgaaagcacttttacatcttccaacacaggatccacgagcaatgcatctcagagtcatcaaatattatgttgtgcatacaatgctaatggaaccattttcgtcacgggtagctctgacagcaatgcaagggtttggagtgcctcaaaacctaacttggatgatgctgaacagccgactcatgagctggatgttctacggggccatgagaatgatgtcaactatgtgcaatttagtggttgtgctgtggctccaaaatcttcaacagctgatgctctgaaggaagatagctacccaaagtttaagaattcctggttttgtcatgacaatatagtaacctgctctcgcgatggtagtgcaattatatggactccaagatcacgtaaattccatgggaaatctggacgctggatgaaaggatatcatctgaaggttccacctcctccacttcctccacaacctcctcgaggaggcccacgtcaaaggtttcttccaacaccacggggtgttaatatgattatatggagcttggataatcgttttgtacttgccgctatcatggattgcaggatttgtgtttggaatgctgctgatggtagcttagtgcattgtttaactggtcacagtgaatcgtcttatgtcttggatgtccatcctttcaatcctcggattgctatgagcgctggctatgatgggaaaacaatcatctgggatatatgggagggtataccaatcaaagtgtacgaaatcgggagatttaagttggttgatggaaagttttcacaagatgggacatctattgtgctttcagatgatgttggccagatatattttctaaacacaggacaaggagagtctcaaaagaatgcaaaatacgaccagttcttccttggtgattatcgtcctcttattcgagataccaatggacatgttcttgatcaggagacgcagctacttcctcatcggaggaaccttcaggatcttctttgtgattcaagtatgattccgtatccagaacctgaccagacaatgtttcagcaacgcagacttggtgcattaggagttgaatggcgtccttcctcgataaagttttctgttggccctgattttagtttaggtcaagattatataatgcctcctttggctgatctggatagactgattgagccattgcctgagtttatagatgctatgtactgggaaccagaacacgaagttctgagtgacgacaatgattcagagtataatgctgaagtttcctctgatggggctagggcaagcccatgttccaactcttcaaatgaacttgagtgcagctccgaggacagtgacgttgaaaatattcacgaaagtagctatcattggaaaagaagaagaaaacatcctaaggtcaacgtctctacttcatctggaagacgtgataagaggattttggatgagaatgatagctcgaattctggaattaagagaaccaagaaccgaagaattgtcgtgaaggcttcaaaaagaaaacattctgatgtcaaagcatcacggccgcagagagcagcagctcaaaatgctcgatccttgctttctaaaatttctggaagctcttcggatgaagttgatgatgataatgattcatccaacagtgaatctgatagaagcatacccactttgcgacagttggacaaaccatctcagatgctggaatctctttcaaatgacaaacagaagaaaagattgattgtaaagatctctgttaagaagccagcagagtctatgggaagcaagggagatgtgataaatcaggctgatttagagcaactatcttccaaacctttggaggagaatcacagagtgattggtatatattccagagaacccgggtcaagttctgtagatgcaaaaggtgattcagggtgtcagagtattccctactctatgaatacgccacagagagaaaaggccgataatcagttgataagatcttcagatcaagaccagaatatgtgcaagtggagggaagagattcctgtttgtgaacctaccgaattaactgcgcctgagaacatagaagaagcccaaccattttatggggatgaagctgatgagattcttccaaagaaagttcgacgactgaggttaaagcttcggcatcccaacagtcctcgaaaactagaacctgatgaggtggcagatgatttggcagatggtggagatgggtttgcatccatagctccctctttcatgaatccgattatggattctgaacctgtgatagatagcgttagagattcttctgcacataactttgagtttggagaagctacagctgatgtgatacgtaggaaaagatccataagaagtgaatctagtacaagaaatagcgcattacgcataaggttgggctctggatctgtagacaaaataaagaaacaagggattccttccacaagcgtgtatgatgatgcatcacttgaagaatggccttctacctcaaaagctgggtccaggtctagatctgcaagcgtcagcaaaccaagtcttcatactgggataaggttgaatagtgtctcaggaaaaatctcatggttattgttgtctgaacacgaggaaggctgccgttatatacctcagctaggggatgaagttatttacttcaagcagggtcatcaagagttccttaaaactaaagaattaaatgacagggaccgatcaaggtaccttccccgaaacctaggagcagtagagatttgcaaagtcgagaaacttaactatgatacatatcctggttctggagatagctgctgcaaaatgaccctcagggttctggattcttcttcatcacatgcctcccgcaaagagtttcaactgacacttcctgagctcattaatttccctgattttattgtggagaagactcgatacgacgctgcaattcaaacaaactggaaaattggtaatgagtgccgtgtgtggtggagagacgcaaccggtgaaggcggggcttggtgggaaggtaggattgagtcttcacaagtaaaatccactgacttcccagagagtccatgggaaagatacagagttgtctatgaaacaggggaaacgagtcttcacagcccgtgggagtttgacaatcccgagtttccctgggaaaaatctaccatcgaagatgagagaagagagaaactgctttcattatttgctggactagtaaaatcaatcagcaagcatcaggatagttacgggatccaaaagctaaacgaagcagctcaaaagatggatttctgcaataggttcccggttccattataccctgagctgattcacgaaagactagagaatcagtactacagaagtattgaatcgtttaaacacgacgtggatgcaatgctctcaaatgcggagttgtatttcgttagaagtgcacatatgctttcgaagataaagcgactgcgagataaattgacaaaaacgttaagaaagctgatctga

SEQ ID NO: 96432 - protein, 1607 aa, Arabidopsis thaliana
  peptide (1)..(1607): Ceres Seq. ID no. 12733264
  misc_feature (380)..(494): Pfam Name: WD domain, G-beta repeat Pfam Description: WD domain, G-beta repeat
  misc_feature (231)..(494): Homolog of NCBI NO: 20196881 NR Description: hypothetical protein [Arabidopsis thaliana]
  misc_feature (1)..(168): Homolog of NCBI NO: 20196881 NR Description: hypothetical protein [Arabidopsis thaliana]
  misc_feature (637)..(762): Homolog of NCBI NO: 20196881 NR Description: hypothetical protein [Arabidopsis thaliana]
  misc_feature (344)..(553): Homolog of NCBI NO: 9759426 NR Description: WD-40 repeat protein-like [Arabidopsis thaliana]
  misc_feature (493)..(553): Homolog of NCBI NO: 15239884 NR Description: WD-40 repeat protein-like; protein id:
  misc_feature (516)..(1137): Homolog of NCBI NO: 17976802 NR Description: WD repeat domain 11 protein [Mus musculus]
  misc_feature (1317)..(1498): Homolog of NCBI NO: 17976802 NR Description: WD repeat domain 11 protein [Mus musculus]
  misc_feature (288)..(429): Homolog of NCBI NO: 17976802 NR Description: WD repeat domain 11 protein [Mus musculus]
  misc_feature (41)..(133): Homolog of NCBI NO: 17976802 NR Description: WD repeat domain 11 protein [Mus musculus]
  misc_feature (516)..(1025): Homolog of NCBI NO: 34996489 NR Description: pleckstrin homology domain interacting protein sapiens] >gi|17976800|emb|CAC83118.1| WD repeat domain 11 protein
MDWIHKSTPFMEPSNLAKLVQGNVPLQPHDSHSSLTDLDMDLREVYFLILHFLSIGPCERTFGHLRDEILEKGLLPRRYHSWWSRSGIYSGRADDDGISLPLSYDNLIERYPHIEKDHLVKLLKQLILNPSFPSHMRVEGNAPNAADVPTLLGSGTFSLVDRSNSYSSTLSNMFLWIWDLKKSHICIEPDSGSKALHFRNLFFWLWQSLLGIMTCIGNSGEVAHIGEVKSRGNNIESQKARHVASYLRWPHMHADQVRGLSLREIGGGFRKHHRAPSILSACHAIAKPSTMVQKMQNIKKLRGHRNAVYCAIFDRSGRYVITGSDDRLVKIWSMETALCLASCRGHEGDITDLAVSSNNALVASASNDFVIRVWRLPDGMPISVLRGHTGAVTAIAFSPRQASVYQLLSSSDDGTCRIWDARYSQWLPRIYVPSPSDANTGSLEVSLLGESTFTSSNTGSTSNASQSHQILCCAYNANGTIFVTGSSDSNARVWSASKPNLDDAEQPTHELDVLRGHENDVNYVQFSGCAVAPKSSTADALKEDSYPKFKNSWFCHDNIVTCSRDGSAIIWTPRSRKFHGKSGRWMKGYHLKVPPPPLPPQPPRGGPRQRFLPTPRGVNMIIWSLDNRFVLAAIMDCRICVWNAADGSLVHCLTGHSESSYVLDVHPFNPRIAMSAGYDGKTIIWDIWEGIPIKVYEIGRFKLVDGKFSQDGTSIVLSDDVGQIYFLNTGQGESQKNAKYDQFFLGDYRPLIRDTNGHVLDQETQLLPHRRNLQDLLCDSSMIPYPEPDQTMFQQRRLGALGVEWRPSSIKFSVGPDFSLGQDYIMPPLADLDRLIEPLPEFIDAMYWEPEHEVLSDDNDSEYNAEVSSDGARASPCSNSSNELECSSEDSDVENIHESSYHWKRRRKHPKVNVSTSSGRRDKRILDENDSSNSGIKRTKNRRIVVKASKRKHSDVKASRPQRAAAQNARSLLSKISGSSSDEVDDDNDSSNSESDRSIPTLRQLDKPSQMLESLSNDKQKKRLIVKISVKKPAESMGSKGDVINQADLEQLSSKPLEENHRVIGIYSREPGSSSVDAKGDSGCQSIPYSMNTPQREKADNQLIRSSDQDQNMCKWREEIPVCEPTELTAPENIEEAQPFYGDEADEILPKKVRRLRLKLRHPNSPRKLEPDEVADDLADGGDGFASIAPSFMNPIMDSEPVIDSVRDSSAHNFEFGEATADVIRRKRSIRSESSTRNSALRIRLGSGSVDKIKKQGIPSTSVYDDASLEEWPSTSKAGSRSRSASVSKPSLHTGIRLNSVSGKISWLLLSEHEEGCRYIPQLGDEVIYFKQGHQEFLKTKELNDRDRSRYLPRNLGAVEICKVEKLNYDTYPGSGDSCCKMTLRVLDSSSSHASRKEFQLTLPELINFPDFIVEKTRYDAAIQTNWKIGNECRVWWRDATGEGGAWWEGRIESSQVKSTDFPESPWERYRVVYETGETSLHSPWEFDNPEFPWEKSTIEDERREKLLSLFAGLVKSISKHQDSYGIQKLNEAAQKMDFCNRFPVPLYPELIHERLENQYYRSIESFKHDVDAMLSNAELYFVRSAHMLSKIKRLRDKLTKTLRKLI

SEQ ID NO: 96433 - protein, 1597 aa, Arabidopsis thaliana
  peptide (1)..(1597): Ceres Seq. ID no. 12733265
  misc_feature (370)..(484): Pfam Name: WD domain, G-beta repeat Pfam Description: WD domain, G-beta repeat
  misc_feature (221)..(484): Homolog of NCBI NO: 20196881 NR Description: hypothetical protein [Arabidopsis thaliana]
  misc_feature (1)..(158): Homolog of NCBI NO: 20196881 NR Description: hypothetical protein [Arabidopsis thaliana]
  misc_feature (627)..(752): Homolog of NCBI NO: 20196881 NR Description: hypothetical protein [Arabidopsis thaliana]
  misc_feature (334)..(543): Homolog of NCBI NO: 9759426 NR Description: WD-40 repeat protein-like [Arabidopsis thaliana]
  misc_feature (483)..(543): Homolog of NCBI NO: 15239884 NR Description: WD-40 repeat protein-like; protein id:
  misc_feature (506)..(1127): Homolog of NCBI NO: 17976802 NR Description: WD repeat domain 11 protein [Mus musculus]
  misc_feature (1307)..(1488): Homolog of NCBI NO: 17976802 NR Description: WD repeat domain 11 protein [Mus musculus]
  misc_feature (278)..(419): Homolog of NCBI NO: 17976802 NR Description: WD repeat domain 11 protein [Mus musculus]
  misc_feature (31)..(123): Homolog of NCBI NO: 17976802 NR Description: WD repeat domain 11 protein [Mus musculus]
  misc_feature (506)..(1015): Homolog of NCBI NO: 34996489 NR Description: pleckstrin homology domain interacting protein sapiens] >gi|17976800|emb|CAC83118.1| WD repeat domain 11 protein
MEPSNLAKLVQGNVPLQPHDSHSSLTDLDMDLREVYFLILHFLSIGPCERTFGHLRDEILEKGLLPRRYHSWWSRSGIYSGRADDDGISLPLSYDNLIERYPHIEKDHLVKLLKQLILNPSFPSHMRVEGNAPNAADVPTLLGSGTFSLVDRSNSYSSTLSNMFLWIWDLKKSHICIEPDSGSKALHFRNLFFWLWQSLLGIMTCIGNSGEVAHIGEVKSRGNNIESQKARHVASYLRWPHMHADQVRGLSLREIGGGFRKHHRAPSILSACHAIAKPSTMVQKMQNIKKLRGHRNAVYCAIFDRSGRYVITGSDDRLVKIWSMETALCLASCRGHEGDITDLAVSSNNALVASASNDFVIRVWRLPDGMPISVLRGHTGAVTAIAFSPRQASVYQLLSSSDDGTCRIWDARYSQWLPRIYVPSPSDANTGSLEVSLLGESTFTSSNTGSTSNASQSHQILCCAYNANGTIFVTGSSDSNARVWSASKPNLDDAEQPTHELDVLRGHENDVNYVQFSGCAVAPKSSTADALKEDSYPKFKNSWFCHDNIVTCSRDGSAIIWTPRSRKFHGKSGRWMKGYHLKVPPPPLPPQPPRGGPRQRFLPTPRGVNMIIWSLDNRFVLAAIMDCRICVWNAADGSLVHCLTGHSESSYVLDVHPFNPRIAMSAGYDGKTIIWDIWEGIPIKVYEIGRFKLVDGKFSQDGTSIVLSDDVGQIYFLNTGQGESQKNAKYDQFFLGDYRPLIRDTNGHVLDQETQLLPHRRNLQDLLCDSSMIPYPEPDQTMFQQRRLGALGVEWRPSSIKFSVGPDFSLGQDYIMPPLADLDRLIEPLPEFIDAMYWEPEHEVLSDDNDSEYNAEVSSDGARASPCSNSSNELECSSEDSDVENIHESSYHWKRRRKHPKVNVSTSSGRRDKRILDENDSSNSGIKRTKNRRIVVKASKRKHSDVKASRPQRAAAQNARSLLSKISGSSSDEVDDDNDSSNSESDRSIPTLRQLDKPSQMLESLSNDKQKKRLIVKISVKKPAESMGSKGDVINQADLEQLSSKPLEENHRVIGIYSREPGSSSVDAKGDSGCQSIPYSMNTPQREKADNQLIRSSDQDQNMCKWREEIPVCEPTELTAPENIEEAQPFYGDEADEILPKKVRRLRLKLRHPNSPRKLEPDEVADDLADGGDGFASIAPSFMNPIMDSEPVIDSVRDSSAHNFEFGEATADVIRRKRSIRSESSTRNSALRIRLGSGSVDKIKKQGIPSTSVYDDASLEEWPSTSKAGSRSRSASVSKPSLHTGIRLNSVSGKISWLLLSEHEEGCRYIPQLGDEVIYFKQGHQEFLKTKELNDRDRSRYLPRNLGAVEICKVEKLNYDTYPGSGDSCCKMTLRVLDSSSSHASRKEFQLTLPELINFPDFIVEKTRYDAAIQTNWKIGNECRVWWRDATGEGGAWWEGRIESSQVKSTDFPESPWERYRVVYETGETSLHSPWEFDNPEFPWEKSTIEDERREKLLSLFAGLVKSISKHQDSYGIQKLNEAAQKMDFCNRFPVPLYPELIHERLENQYYRSIESFKHDVDAMLSNAELYFVRSAHMLSKIKRLRDKLTKTLRKLI

SEQ ID NO: 96434 - protein, 1568 aa, Arabidopsis thaliana
  peptide (1)..(1568): Ceres Seq. ID no. 12733266
  misc_feature (341)..(455): Pfam Name: WD domain, G-beta repeat Pfam Description: WD domain, G-beta repeat
  misc_feature (192)..(455): Homolog of NCBI NO: 20196881 NR Description: hypothetical protein [Arabidopsis thaliana]
  misc_feature (1)..(129): Homolog of NCBI NO: 20196881 NR Description: hypothetical protein [Arabidopsis thaliana]
  misc_feature (598)..(723): Homolog of NCBI NO: 20196881 NR Description: hypothetical protein [Arabidopsis thaliana]
  misc_feature (305)..(514): Homolog of NCBI NO: 9759426 NR Description: WD-40 repeat protein-like [Arabidopsis thaliana]
  misc_feature (454)..(514): Homolog of NCBI NO: 15239884 NR Description: WD-40 repeat protein-like; protein id:
  misc_feature (477)..(1098): Homolog of NCBI NO: 17976802 NR Description: WD repeat domain 11 protein [Mus musculus]
  misc_feature (1278)..(1459): Homolog of NCBI NO: 17976802 NR Description: WD repeat domain 11 protein [Mus musculus]
  misc_feature (249)..(390): Homolog of NCBI NO: 17976802 NR Description: WD repeat domain 11 protein [Mus musculus]
  misc_feature (2)..(94): Homolog of NCBI NO: 17976802 NR Description: WD repeat domain 11 protein [Mus musculus]
  misc_feature (477)..(986): Homolog of NCBI NO: 34996489 NR Description: pleckstrin homology domain interacting protein sapiens] >gi|17976800|emb|CAC83118.1| WD repeat domain 11 protein
MDLREVYFLILHFLSIGPCERTFGHLRDEILEKGLLPRRYHSWWSRSGIYSGRADDDGISLPLSYDNLIERYPHIEKDHLVKLLKQLILNPSFPSHMRVEGNAPNAADVPTLLGSGTFSLVDRSNSYSSTLSNMFLWIWDLKKSHICIEPDSGSKALHFRNLFFWLWQSLLGIMTCIGNSGEVAHIGEVKSRGNNIESQKARHVASYLRWPHMHADQVRGLSLREIGGGFRKHHRAPSILSACHAIAKPSTMVQKMQNIKKLRGHRNAVYCAIFDRSGRYVITGSDDRLVKIWSMETALCLASCRGHEGDITDLAVSSNNALVASASNDFVIRVWRLPDGMPISVLRGHTGAVTAIAFSPRQASVYQLLSSSDDGTCRIWDARYSQWLPRIYVPSPSDANTGSLEVSLLGESTFTSSNTGSTSNASQSHQILCCAYNANGTIFVTGSSDSNARVWSASKPNLDDAEQPTHELDVLRGHENDVNYVQFSGCAVAPKSSTADALKEDSYPKFKNSWFCHDNIVTCSRDGSAIIWTPRSRKFHGKSGRWMKGYHLKVPPPPLPPQPPRGGPRQRFLPTPRGVNMIIWSLDNRFVLAAIMDCRICVWNAADGSLVHCLTGHSESSYVLDVHPFNPRIAMSAGYDGKTIIWDIWEGIPIKVYEIGRFKLVDGKFSQDGTSIVLSDDVGQIYFLNTGQGESQKNAKYDQFFLGDYRPLIRDTNGHVLDQETQLLPHRRNLQDLLCDSSMIPYPEPDQTMFQQRRLGALGVEWRPSSIKFSVGPDFSLGQDYIMPPLADLDRLIEPLPEFIDAMYWEPEHEVLSDDNDSEYNAEVSSDGARASPCSNSSNELECSSEDSDVENIHESSYHWKRRRKHPKVNVSTSSGRRDKRILDENDSSNSGIKRTKNRRIVVKASKRKHSDVKASRPQRAAAQNARSLLSKISGSSSDEVDDDNDSSNSESDRSIPTLRQLDKPSQMLESLSNDKQKKRLIVKISVKKPAESMGSKGDVINQADLEQLSSKPLEENHRVIGIYSREPGSSSVDAKGDSGCQSIPYSMNTPQREKADNQLIRSSDQDQNMCKWREEIPVCEPTELTAPENIEEAQPFYGDEADEILPKKVRRLRLKLRHPNSPRKLEPDEVADDLADGGDGFASIAPSFMNPIMDSEPVIDSVRDSSAHNFEFGEATADVIRRKRSIRSESSTRNSALRIRLGSGSVDKIKKQGIPSTSVYDDASLEEWPSTSKAGSRSRSASVSKPSLHTGIRLNSVSGKISWLLLSEHEEGCRYIPQLGDEVIYFKQGHQEFLKTKELNDRDRSRYLPRNLGAVEICKVEKLNYDTYPGSGDSCCKMTLRVLDSSSSHASRKEFQLTLPELINFPDFIVEKTRYDAAIQTNWKIGNECRVWWRDATGEGGAWWEGRIESSQVKSTDFPESPWERYRVVYETGETSLHSPWEFDNPEFPWEKSTIEDERREKLLSLFAGLVKSISKHQDSYGIQKLNEAAQKMDFCNRFPVPLYPELIHERLENQYYRSIESFKHDVDAMLSNAELYFVRSAHMLSKIKRLRDKLTKTLRKLI

SEQ ID NO: 96435 - DNA, 2002 bp, Arabidopsis thaliana
  misc_feature (1)..(2002): Ceres Seq. ID no. 12733271
  misc_feature: MA Experiment ID: 20000328 Result: Down-regulated in Transcription
  misc_feature: MA Experiment 20000328 PARAMETER Experiment Name: At_42deg_Heat_Sub_P Parameter: Age (day) Value: 14
  misc_feature: MA Experiment 20000328 PARAMETER Experiment Name: At_42deg_Heat_Sub_P Parameter: Organism Value: A. thaliana
  misc_feature: MA Experiment 20000328 PARAMETER Experiment Name: At_42deg_Heat_Sub_P Parameter: Plant Line Value: WS
  misc_feature: MA Experiment 20000328 PARAMETER Experiment Name: At_42deg_Heat_Sub_P Parameter: Temperature (deg C) Value: 42 vs. 22
  misc_feature: MA Experiment 20000328 PARAMETER Experiment Name: At_42deg_Heat_Sub_P Parameter: Timepoint (hr) Value: 6
  misc_feature: MA Experiment 20000328 PARAMETER Experiment Name: At_42deg_Heat_Sub_P Parameter: Tissue Value: Aerial
  misc_feature: MA Experiment ID: 20000348 Result: Down-regulated in Transcription
  misc_feature: MA Experiment 20000348 PARAMETER Experiment Name: At_100uM_ABA_Sub_P Parameter: Age (day) Value: 14
  misc_feature: MA Experiment 20000348 PARAMETER Experiment Name: At_100uM_ABA_Sub_P Parameter: Organism Value: A. thaliana
  misc_feature: MA Experiment 20000348 PARAMETER Experiment Name: At_100uM_ABA_Sub_P Parameter: Plant Line Value: WS
  misc_feature: MA Experiment 20000348 PARAMETER Experiment Name: At_100uM_ABA_Sub_P Parameter: Timepoint (hr) Value: 1
  misc_feature: MA Experiment 20000348 PARAMETER Experiment Name: At_100uM_ABA_Sub_P Parameter: Tissue Value: Aerial
  misc_feature: MA Experiment 20000348 PARAMETER Experiment Name: At_100uM_ABA_Sub_P Parameter: Treatment Value: 100uM ABA vs. No Treatment
  misc_feature: MA Experiment ID: 20000355 Result: Down-regulated in Transcription
  misc_feature: MA Experiment 20000355 PARAMETER Experiment Name: At_Siliques_Sub_P Parameter: Age (day) Value: 21
  misc_feature: MA Experiment 20000355 PARAMETER Experiment Name: At_Siliques_Sub_P Parameter: Organism Value: A. thaliana
  misc_feature: MA Experiment 20000355 PARAMETER Experiment Name: At_Siliques_Sub_P Parameter: Plant Line Value: WS
  misc_feature: MA Experiment 20000355 PARAMETER Experiment Name: At_Siliques_Sub_P Parameter: Tissue Value: Less Than 5mm Siliques vs. Whole Plant
  misc_feature: MA Experiment ID: 20000440 Result: Down-regulated in Transcription
  misc_feature: MA Experiment 20000440 PARAMETER Experiment Name: At_Closed-Flower__Sub_P Parameter: Tissue Value: Closed Flower vs. Whole Plant
acttcttttcgctttttgtttttgggattgttttcattgatcctttcaagatggagaaagtgaccaactcagacttgaaatcctctgttgatggtggcgttgttgatgtgtatggagaagattcagccaccattgagcacaacataactccttggtctctctctgtttctagtggatattcattgctgagagatcctcgctacaacaaaggacttgctttcactgagaaagagagagacactcattacttgcgtggtcttctccctccagttgttcttgatcaaaagcttcaggagaagaggctgttgaacaatatccgacaatatcaattcccattacaaaagtacatggctctgacagaacttcaggaaagaaacgagagactgttttacaagctattgatagataatgttgaggagctacttcctattgtttatactccaactgttggtgaagcttgtcagaaatttggaagtattttcaggcgacctcagggtttattcatcagtttaaaagacaagggaaagattctagatgtgttaaagaactggcctgaaaggaacatacaggttattgttgttactgacggtgaaaggattttaggattaggagatcttggatgtcaggggatgggtataccggttggtaagttggcgttatattcagcacttggaggtgttcgtccttcagcgtgtttacctgtcaccattgatgtgggaacaaacaatgagaaactgttgaatgatgagttctacataggactcaggcaaaagagagcaacgggacaggaatatagtgaactcttgaatgaattcatgagtgctgtgaaacagaactatggtgaaaaagttcttattcagtttgaagattttgctaatcataatgcctttgagttgcttgcaaaatacagcgatactcatctcgtcttcaacgatgatatacaggggacagcatcagttgttttagcaggattagtttccgcacagaagttaacgaatagcccacttgcagagcataccttcctctttcttggtgctggtgaagctggaactggaatagcagaactcatagctctctatatgtcaaaacagatgaatgcttcggtagaggaaagccgcaagaaaatctggcttgttgattccaagggattgattgttaactcccgcaaagattcacttcaagactttaagaaaccatgggctcatgaacatgaaccagtcaaagacctcttaggtgctatcaaggcaataaaaccgactgttctgattggatcttctggcgttggacggtcttttacaaaagaagtgatagaagccatgtcctccattaatgagagaccactgataatggctctctctaaccccacaacacaatctgaatgtacagccgaagaagcttatacttggagtaagggccgtgccatttttgctagtggaagcccttttgatccagttgagtatgaaggaaaggtgtttgtatctacacaggcgaacaatgcgtacatattcccgggctttggacttggtttggttatctctggagcaatacgggtacatgacgatatgcttctagctgctgctgaggcattagctggacaagtaagcaaagagaactatgagaaaggaatgatatatccttcattctcttccatccggaaaatatcagctcagattgcagccaatgtagcaactaaggcgtatgaactaggattggcagggcggcttccacggccgaaagatattgtcaaatgtgcagagagtagcatgtacagccccacataccgtctctaccgttgaaagttgaaactcaagagtctatactttgtgtgcttctcatcctttgttcagttattcccatgtctttctgtaatttccagtattaaattagtctttcaagttgagatttcaaacacatgccaagatctctcatttaactttgcaactctgaaagttaaagactatatgaagtgaatttgtttaatagaaaacgatgaaaatgttat

SEQ ID NO: 96436 - protein, 597 aa, Arabidopsis thaliana
  peptide (1)..(597): Ceres Seq. ID no. 12733272
  misc_feature (313)..(566): Pfam Name: Malic enzyme, NAD binding domain Pfam Description: Malic enzyme, NAD binding domain
  misc_feature (17)..(597): Homolog of NCBI NO: 15225262 NR Description: malate oxidoreductase (malic enzyme); protein id: supported by cDNA: gi_17065315 [Arabidopsis thaliana] malate oxidoreductase (malic enzyme) oxidoreductase (malic
  misc_feature (20)..(597): Homolog of NCBI NO: 7431234 NR Description: malate dehydrogenase
  misc_feature (18)..(597): Homolog of NCBI NO: 510876 NR Description: NADP dependent malic enzyme [Phaseolus vulgaris]
  misc_feature (31)..(597): Homolog of NCBI NO: 7427668 NR Description: malate dehydrogenase
  misc_feature (20)..(597): Homolog of NCBI NO: 8118507 NR Description: NADP-dependent malic protein [Ricinus communis]
  misc_feature (20)..(597): Homolog of NCBI NO: 1346485 NR Description: NADP-DEPENDENT MALIC ENZYME (NADP-ME)
  misc_feature (20)..(597): Homolog of NCBI NO: 1708924 NR Description: NADP-DEPENDENT MALIC ENZYME (NADP-ME)
  misc_feature (20)..(597): Homolog of NCBI NO: 1561774 NR Description: malate dehydrogenase [Vitis vinifera]
  misc_feature (20)..(597): Homolog of NCBI NO: 228412 NR Description: malic enzyme
  misc_feature (31)..(597): Homolog of NCBI NO: 115420 NR Description: NADP-DEPENDENT MALIC ENZYME (NADP-ME)
FFSLFVFGIVFIDPFKMEKVTNSDLKSSVDGGVVDVYGEDSATIEHNITPWSLSVSSGYSLLRDPRYNKGLAFTEKERDTHYLRGLLPPVVLDQKLQEKRLLNNIRQYQFPLQKYMALTELQERNERLFYKLLIDNVEELLPIVYTPTVGEACQKFGSIFRRPQGLFISLKDKGKILDVLKNWPERNIQVIVVTDGERILGLGDLGCQGMGIPVGKLALYSALGGVRPSACLPVTIDVGTNNEKLLNDEFYIGLRQKRATGQEYSELLNEFMSAVKQNYGEKVLIQFEDFANHNAFELLAKYSDTHLVFNDDIQGTASVVLAGLVSAQKLTNSPLAEHTFLFLGAGEAGTGIAELIALYMSKQMNASVEESRKKIWLVDSKGLIVNSRKDSLQDFKKPWAHEHEPVKDLLGAIKAIKPTVLIGSSGVGRSFTKEVIEAMSSINERPLIMALSNPTTQSECTAEEAYTWSKGRAIFASGSPFDPVEYEGKVFVSTQANNAYIFPGFGLGLVISGAIRVHDDMLLAAAEALAGQVSKENYEKGMIYPSFSSIRKISAQIAANVATKAYELGLAGRLPRPKDIVKCAESSMYSPTYRLYR

SEQ ID NO: 96437 - protein, 581 aa, Arabidopsis thaliana
  peptide (1)..(581): Ceres Seq. ID no. 12733273
  misc_feature (297)..(550): Pfam Name: Malic enzyme, NAD binding domain Pfam Description: Malic enzyme, NAD binding domain
  misc_feature (1)..(581): Homolog of NCBI NO: 15225262 NR Description: malate oxidoreductase (malic enzyme); protein id: supported by cDNA: gi_17065315 [Arabidopsis thaliana] malate oxidoreductase (malic enzyme) oxidoreductase (malic
  misc_feature (4)..(581): Homolog of NCBI NO: 7431234 NR Description: malate dehydrogenase
  misc_feature (2)..(581): Homolog of NCBI NO: 510876 NR Description: NADP dependent malic enzyme [Phaseolus vulgaris]
  misc_feature (15)..(581): Homolog of NCBI NO: 7427668 NR Description: malate dehydrogenase
  misc_feature (4)..(581): Homolog of NCBI NO: 8118507 NR Description: NADP-dependent malic protein [Ricinus communis]
  misc_feature (4)..(581): Homolog of NCBI NO: 1346485 NR Description: NADP-DEPENDENT MALIC ENZYME (NADP-ME)
  misc_feature (4)..(581): Homolog of NCBI NO: 1708924 NR Description: NADP-DEPENDENT MALIC ENZYME (NADP-ME)
  misc_feature (4)..(581): Homolog of NCBI NO: 1561774 NR Description: malate dehydrogenase [Vitis vinifera]
  misc_feature (4)..(581): Homolog of NCBI NO: 228412 NR Description: malic enzyme
  misc_feature (15)..(581): Homolog of NCBI NO: 115420 NR Description: NADP-DEPENDENT MALIC ENZYME (NADP-ME)
MEKVTNSDLKSSVDGGVVDVYGEDSATIEHNITPWSLSVSSGYSLLRDPRYNKGLAFTEKERDTHYLRGLLPPVVLDQKLQEKRLLNNIRQYQFPLQKYMALTELQERNERLFYKLLIDNVEELLPIVYTPTVGEACQKFGSIFRRPQGLFISLKDKGKILDVLKNWPERNIQVIVVTDGERILGLGDLGCQGMGIPVGKLALYSALGGVRPSACLPVTIDVGTNNEKLLNDEFYIGLRQKRATGQEYSELLNEFMSAVKQNYGEKVLIQFEDFANHNAFELLAKYSDTHLVFNDDIQGTASVVLAGLVSAQKLTNSPLAEHTFLFLGAGEAGTGIAELIALYMSKQMNASVEESRKKIWLVDSKGLIVNSRKDSLQDFKKPWAHEHEPVKDLLGAIKAIKPTVLIGSSGVGRSFTKEVIEAMSSINERPLIMALSNPTTQSECTAEEAYTWSKGRAIFASGSPFDPVEYEGKVFVSTQANNAYIFPGFGLGLVISGAIRVHDDMLLAAAEALAGQVSKENYEKGMIYPSFSSIRKISAQIAANVATKAYELGLAGRLPRPKDIVKCAESSMYSPTYRLYR

SEQ ID NO: 96438 - protein, 482 aa, Arabidopsis thaliana
  peptide (1)..(482): Ceres Seq. ID no. 12733274
  misc_feature (198)..(451): Pfam Name: Malic enzyme, NAD binding domain Pfam Description: Malic enzyme, NAD binding domain
  misc_feature (1)..(482): Homolog of NCBI NO: 15225262 NR Description: malate oxidoreductase (malic enzyme); protein id: supported by cDNA: gi_17065315 [Arabidopsis thaliana] malate oxidoreductase (malic enzyme) oxidoreductase (malic
  misc_feature (1)..(482): Homolog of NCBI NO: 7431234 NR Description: malate dehydrogenase
  misc_feature (1)..(482): Homolog of NCBI NO: 510876 NR Description: NADP dependent malic enzyme [Phaseolus vulgaris]
  misc_feature (1)..(482): Homolog of NCBI NO: 7427668 NR Description: malate dehydrogenase
  misc_feature (1)..(482): Homolog of NCBI NO: 8118507 NR Description: NADP-dependent malic protein [Ricinus communis]
  misc_feature (1)..(482): Homolog of NCBI NO: 1346485 NR Description: NADP-DEPENDENT MALIC ENZYME (NADP-ME)
  misc_feature (1)..(482): Homolog of NCBI NO: 1708924 NR Description: NADP-DEPENDENT MALIC ENZYME (NADP-ME)
  misc_feature (1)..(482): Homolog of NCBI NO: 1561774 NR Description: malate dehydrogenase [Vitis vinifera]
  misc_feature (1)..(482): Homolog of NCBI NO: 228412 NR Description: malic enzyme
  misc_feature (1)..(482): Homolog of NCBI NO: 115420 NR Description: NADP-DEPENDENT MALIC ENZYME (NADP-ME)
MALTELQERNERLFYKLLIDNVEELLPIVYTPTVGEACQKFGSIFRRPQGLFISLKDKGKILDVLKNWPERNIQVIVVTDGERILGLGDLGCQGMGIPVGKLALYSALGGVRPSACLPVTIDVGTNNEKLLNDEFYIGLRQKRATGQEYSELLNEFMSAVKQNYGEKVLIQFEDFANHNAFELLAKYSDTHLVFNDDIQGTASVVLAGLVSAQKLTNSPLAEHTFLFLGAGEAGTGIAELIALYMSKQMNASVEESRKKIWLVDSKGLIVNSRKDSLQDFKKPWAHEHEPVKDLLGAIKAIKPTVLIGSSGVGRSFTKEVIEAMSSINERPLIMALSNPTTQSECTAEEAYTWSKGRAIFASGSPFDPVEYEGKVFVSTQANNAYIFPGFGLGLVISGAIRVHDDMLLAAAEALAGQVSKENYEKGMIYPSFSSIRKISAQIAANVATKAYELGLAGRLPRPKDIVKCAESSMYSPTYRLYR

SEQ ID NO: 96439 - DNA, 1173 bp, Arabidopsis thaliana
  misc_feature (1)..(1173): Ceres Seq. ID no. 12733290
  misc_feature: MA Experiment ID: 20000307 Result: Up-regulated in Transcription
  misc_feature: MA Experiment 20000307 PARAMETER Experiment Name: At_Germinating_Seeds_Sub_P Parameter: Age (hr) Value: 24 vs. 0
  misc_feature: MA Experiment 20000307 PARAMETER Experiment Name: At_Germinating_Seeds_Sub_P Parameter: Organism Value: A. thaliana
  misc_feature: MA Experiment 20000307 PARAMETER Experiment Name: At_Germinating_Seeds_Sub_P Parameter: Plant Line Value: WS
  misc_feature: MA Experiment 20000307 PARAMETER Experiment Name: At_Germinating_Seeds_Sub_P Parameter: Tissue Value: Germinating Seeds
atgaattcaccacaagaaatctccattctcttcttcttcatcatcttcttagactatgtatctgctcaatctcctcctcctcctaatctatacgcaacaagcgaccttttcaagccaagcttagctatcatcaccggagttttctccatcgtcttcactctcacctttgttctcctcgtctacgcgaaatgcttccacaatgacctccgatcagagaccgacagtgatggagaaagaatacgacatgatcgtctctggcaaggacttttcaatcggtcttcaagattctctggtcttgacaagaaagcaatcgaatctcttccctttttcagattctctgctttgaaaggattgaaacaagggcttgaatgttctgtttgtttgtctaaattcgaagatgttgagattcttaggcttttgcctaaatgcagacacgcttttcatattggttgtattgaccagtggcttgagcagcacgctacgtgtcctttgtgtagaaacagagtcaatattgaagacgacctctctgtgttgggtaatagcagcactagtcttaggatcttgaaccaatctgagacaagagaagaagactcgaggttggagatttacattgaacgcgaagaaggaactaatgacgggtcatcaagattcagcagtttccgaaagattctaaagaaatcgttgttgcttgagcgagaaggaaatgagaacatcgatgagaagaaacttatgcacaagttcaatcacaggatcgttgtttcggatgctgtgtttaagaaccgctggagtaatatcacttcatctgatttgacgtttttgacatcagaaatgctgaattcggtgtcaagcgacagattttcgtcggtggatcgagtgcatagaggtaacttgcgggacaaggaagatatggaaatgaaaagaatgttgattaagcacaaagactcatccagaagaacggtttctgagatcacgactgtttcaagagaaaaggcggttggaggaagctacagaggttcaaccgcgtccacttcgcagaattatgccgttactgcgaccacggaagaaagaagacggcggttatggctgccgatcgctagaagaacggctcagtggtttgttaacagagagaaaagtaatgacctaaacacgacacgccaaaatcttaatgtatag

SEQ ID NO: 96440 - protein, 390 aa, Arabidopsis thaliana
  peptide (1)..(390): Ceres Seq. ID no. 12733291
  misc_feature (124)..(165): Pfam Name: Zinc finger, C3HC4 type (RING finger) Pfam Description: Zinc finger, C3HC4 type (RING finger)
  misc_feature (1)..(390): Homolog of NCBI NO: 15225285 NR Description: putative RING zinc finger protein; protein id: [Arabidopsis thaliana] >gi|25411956|pir||B84584 probable RING
  misc_feature (9)..(349): Homolog of NCBI NO: 15235482 NR Description: putative protein; protein id: At4g28890.1
  misc_feature (314)..(390): Homolog of NCBI NO: 15235482 NR Description: putative protein; protein id: At4g28890.1
  misc_feature (24)..(183): Homolog of NCBI NO: 15239252 NR Description: putative protein; protein id: At5g05810.1
  misc_feature (25)..(256): Homolog of NCBI NO: 15237991 NR Description: RING-H2 zinc finger protein-like; protein id:
  misc_feature (3)..(174): Homolog of NCBI NO: 7487705 NR Description: hypothetical protein T5J17.240 - Arabidopsis
  misc_feature (3)..(174): Homolog of NCBI NO: 25407810 NR Description: hypothetical protein AT4g40070 [imported] - thaliana >gi|5918310|emb|CAB38920.2| putative protein thaliana] >gi|7271062|emb|CAB80670.1| putative protein
  misc_feature (32)..(215): Homolog of NCBI NO: 6017119 NR Description: unknown protein [Arabidopsis thaliana]
  misc_feature (32)..(215): Homolog of NCBI NO: 18396583 NR Description: expressed protein; protein id: At3g03550.1, by cDNA: 152633. [Arabidopsis thaliana]
  misc_feature (9)..(166): Homolog of NCBI NO: 15219561 NR Description: RING zinc finger protein, putative; protein id: [Arabidopsis thaliana] >gi|25403229|pir||D86474 probable RING
MNSPQEISILFFFIIFLDYVSAQSPPPPNLYATSDLFKPSLAIITGVFSIVFTLTFVLLVYAKCFHNDLRSETDSDGERIRHDRLWQGLFNRSSRFSGLDKKAIESLPFFRFSALKGLKQGLECSVCLSKFEDVEILRLLPKCRHAFHIGCIDQWLEQHATCPLCRNRVNIEDDLSVLGNSSTSLRILNQSETREEDSRLEIYIEREEGTNDGSSRFSSFRKILKKSLLLEREGNENIDEKKLMHKFNHRIVVSDAVFKNRWSNITSSDLTFLTSEMLNSVSSDRFSSVDRVHRGNLRDKEDMEMKRMLIKHKDSSRRTVSEITTVSREKAVGGSYRGSTASTSQNYAVTATTEERRRRLWLPIARRTAQWFVNREKSNDLNTTRQNLNV

SEQ ID NO: 96441 - DNA, 1206 bp, Arabidopsis thaliana
  misc_feature (1)..(1206): Ceres Seq. ID no. 12733308
  misc_feature: MA Experiment ID: 20000184 Result: Up-regulated in Transcription
  misc_feature: MA Experiment 20000184 PARAMETER Experiment Name: At_Shoots__P Parameter: Age (day) Value: 7
  misc_feature: MA Experiment 20000184 PARAMETER Experiment Name: At_Shoots__P Parameter: Tissue Value: Shoots vs. Whole Plant
atgaggtcatgcactaagcttatcctactgaattttttcacaataactctcatcttagttacggagagtcgaagaacaataccattgaaaaatgagaaacaagagctcaagaaactactcaaccatattaataaacccgcaataaaaagtttccaaacgaaacatggttatatattggactgcatcgacattcaaaagcagctcgcctttgatcatcctttgctcaaaaaccattctattcagttgaagcctacaatcatacctaaatggacaagagataaaaacactcaaaaatcaagttctctgccatttcgacaagatgaagacataagttgtccacatggaacagtgattattaaaagaactacacttgaagatcttatacaaattcaacgtttgaaatatttaggggttaagtatacaacttcaaaagacaaggatttcctcaatatgaccggtcgtcattttgctatagctgaatactatagagacaactatggagcaacgggaaacataaatttatgggatccacctgtcaaccctgatcaatttagtcttgcaagtatatatgtcgagaacggttttagagacagtttacagagcatttcagctggatggatagtgtccccgaaactaaatcagaataatagtggcttatttacatattggaccgcagatggacatgagaagacaggttgctacaatacagtatgtccagggtttgtacaagtgagtagcaagctcgcacttggaactcttgccagaccaacttccacttatgatggcgaacaatactatttacaagccatcatttatcaggataatattacaggaaactggtggtttttgataaagaacgagccaattgggtattggccaaaatcattgtttcatgttcaaggtttagcttatggagcaagtcgtgtgttttggggaggagaagttttcagtgcactgagacagagtacaagcccactcatgggaagtggacatttcccaaaagaaggtttcaaaaaggcagcttttgtgaacggccttaaagtgatagatcgtgaaatagaaaaaattagaagtccaccagttaaagatttaagattattcgcaaacagcccaaaatgttataaagtcgaaacaaaaacaggggtcggtgaggagtggtctagtgcaattttctatggaggaccaggaggatgcaccattacttaa

SEQ ID NO: 96442 - protein, 401 aa, Arabidopsis thaliana
  peptide (1)..(401): Ceres Seq. ID no. 12733309
  misc_feature (165)..(355): Pfam Name: Arabidopsis proteins of unknown function Pfam Description: Arabidopsis proteins of unknown function
  misc_feature (1)..(401): Homolog of NCBI NO: 15225313 NR Description: hypothetical protein; protein id: At2g20170.1
  misc_feature (1)..(398): Homolog of NCBI NO: 30686176 NR Description: expressed protein [Arabidopsis thaliana] unknown protein [Arabidopsis thaliana]
  misc_feature (36)..(398): Homolog of NCBI NO: 7485564 NR Description: hypothetical protein F16G20.90 - Arabidopsis >gi|3451064|emb|CAA20460.1| putative protein [Arabidopsis >gi|7269187|emb|CAB79294.1| putative protein [Arabidopsis
  misc_feature (63)..(398): Homolog of NCBI NO: 15236480 NR Description: putative protein; protein id: At4g23380.1
  misc_feature (1)..(54): Homolog of NCBI NO: 15236480 NR Description: putative protein; protein id: At4g23380.1
  misc_feature (1)..(398): Homolog of NCBI NO: 15236474 NR Description: putative protein; protein id: At4g23350.1
  misc_feature (32)..(396): Homolog of NCBI NO: 18400044 NR Description: expressed protein; protein id: At3g13510.1, by cDNA: 37810., supported by cDNA: gi_18700164 [Arabidopsis >gi|9280303|dbj|BAB01758.1| gb|AAC16072.1~gene_id:MRP15.17~strong
  misc_feature (32)..(396): Homolog of NCBI NO: 21593294 NR Description: putative carboxyl-terminal peptidase [Arabidopsis
  misc_feature (1)..(326): Homolog of NCBI NO: 15236476 NR Description: putative protein; protein id: At4g23360.1
  misc_feature (40)..(396): Homolog of NCBI NO: 30103019 NR Description: unknown protein [Oryza sativa (japonica
MRSCTKLILLNFFTITLILVTESRRTIPLKNEKQELKKLLNHINKPAIKSFQTKHGYILDCIDIQKQLAFDHPLLKNHSIQLKPTIIPKWTRDKNTQKSSSLPFRQDEDISCPHGTVIIKRTTLEDLIQIQRLKYLGVKYTTSKDKDFLNMTGRHFAIAEYYRDNYGATGNINLWDPPVNPDQFSLASIYVENGFRDSLQSISAGWIVSPKLNQNNSGLFTYWTADGHEKTGCYNTVCPGFVQVSSKLALGTLARPTSTYDGEQYYLQAIIYQDNITGNWWFLIKNEPIGYWPKSLFHVQGLAYGASRVFWGGEVFSALRQSTSPLMGSGHFPKEGFKKAAFVNGLKVIDREIEKIRSPPVKDLRLFANSPKCYKVETKTGVGEEWSSAIFYGGPGGCTIT

SEQ ID NO: 96443 - protein, 251 aa, Arabidopsis thaliana
  peptide (1)..(251): Ceres Seq. ID no. 12733310
  misc_feature (15)..(205): Pfam Name: Arabidopsis proteins of unknown function Pfam Description: Arabidopsis proteins of unknown function
  misc_feature (1)..(251): Homolog of NCBI NO: 15225313 NR Description: hypothetical protein; protein id: At2g20170.1
  misc_feature (1)..(248): Homolog of NCBI NO: 30686176 NR Description: expressed protein [Arabidopsis thaliana] unknown protein [Arabidopsis thaliana]
  misc_feature (1)..(248): Homolog of NCBI NO: 7485564 NR Description: hypothetical protein F16G20.90 - Arabidopsis >gi|3451064|emb|CAA20460.1| putative protein [Arabidopsis >gi|7269187|emb|CAB79294.1| putative protein [Arabidopsis
  misc_feature (1)..(248): Homolog of NCBI NO: 15236480 NR Description: putative protein; protein id: At4g23380.1
  misc_feature (1)..(248): Homolog of NCBI NO: 15236474 NR Description: putative protein; protein id: At4g23350.1
  misc_feature (1)..(246): Homolog of NCBI NO: 18400044 NR Description: expressed protein; protein id: At3g13510.1, by cDNA: 37810., supported by cDNA: gi_18700164 [Arabidopsis >gi|9280303|dbj|BAB01758.1| gb|AAC16072.1~gene_id:MRP15.17~strong
  misc_feature (1)..(246): Homolog of NCBI NO: 21593294 NR Description: putative carboxyl-terminal peptidase [Arabidopsis
  misc_feature (1)..(176): Homolog of NCBI NO: 15236476 NR Description: putative protein; protein id: At4g23360.1
  misc_feature (1)..(246): Homolog of NCBI NO: 30103019 NR Description: unknown protein [Oryza sativa (japonica
  misc_feature (1)..(246): Homolog of NCBI NO: 34393299 NR Description: putative DD1A protein [Oryza sativa (japonica
MTGRHFAIAEYYRDNYGATGNINLWDPPVNPDQFSLASIYVENGFRDSLQSISAGWIVSPKLNQNNSGLFTYWTADGHEKTGCYNTVCPGFVQVSSKLALGTLARPTSTYDGEQYYLQAIIYQDNITGNWWFLIKNEPIGYWPKSLFHVQGLAYGASRVFWGGEVFSALRQSTSPLMGSGHFPKEGFKKAAFVNGLKVIDREIEKIRSPPVKDLRLFANSPKCYKVETKTGVGEEWSSAIFYGGPGGCTIT

SEQ ID NO: 96444 - DNA, 1473 bp, Arabidopsis thaliana
  misc_feature (1)..(1473): Ceres Seq. ID no. 12733311
  misc_feature: MA Experiment ID: 20000180 Result: Down-regulated in Transcription
  misc_feature: MA Experiment 20000180 PARAMETER Experiment Name: At_Germinating_Seeds_P Parameter: Age (hr) Value: 24 vs. 0
  misc_feature: MA Experiment 20000180 PARAMETER Experiment Name: At_Germinating_Seeds_P Parameter: Tissue Value: Germinating Seeds
  misc_feature: MA Experiment ID: 20000185 Result: Down-regulated in Transcription
  misc_feature: MA Experiment 20000185 PARAMETER Experiment Name: At_Roots__P Parameter: Age (day) Value: 7 vs. 21
  misc_feature: MA Experiment 20000185 PARAMETER Experiment Name: At_Roots__P Parameter: Organism Value: A. thaliana
  misc_feature: MA Experiment 20000185 PARAMETER Experiment Name: At_Roots__P Parameter: Tissue Value: Roots vs. Whole Plant
  misc_feature: MA Experiment ID: 20000264 Result: Down-regulated in Transcription
  misc_feature: MA Experiment 20000264 PARAMETER Experiment Name: At_Open_Flower_P Parameter: Age (day) Value: 21
  misc_feature: MA Experiment 20000264 PARAMETER Experiment Name: At_Open_Flower_P Parameter: Plant Line Value: WS
  misc_feature: MA Experiment 20000264 PARAMETER Experiment Name: At_Open_Flower_P Parameter: Tissue Value: Open Flower vs. Whole Plant
  misc_feature: MA Experiment ID: 20000438 Result: Up-regulated in Transcription
  misc_feature: MA Experiment 20000438 PARAMETER Experiment Name: At_Shoots__P Parameter: Age (day) Value: 14
  misc_feature: MA Experiment 20000438 PARAMETER Experiment Name: At_Shoots__P Parameter: Tissue Value: Shoots vs. Whole Plant
atgcatcattttgtccctgacttcgataccgatgatgattatgtcaacaaccataattcttctttgaatcatcttcctagaaaatccattactactatgggtgaagatgatgatcttatggagcttttatggcagaacggtcaagttgttgttcaaaaccagagacttcacaccaagaaaccttcttcttctccaccgaagcttcttccttctatggatcctcagcagcaaccttcttcagatcagaatctttttattcaagaagatgaaatgacttcttggcttcattatcctctccgtgacgatgatttctgctcagatcttctcttctccgccgcacctactgcgacggctaccgcgacggtgagtcaagtcaccgccgcgagaccgccagtatcttcgacgaatgagtcgaggccgccggtgaggaacttcatgaatttctcgaggctgagaggggattttaataacggtagaggtggtgaatctggaccgttgctttcgaaggcggttgtgagagaatctacgcaggtaagtcctagcgcaacaccgtcggcggcggcgagtgaatccggtttaacacggcggacggatggtactgacagttccgccgtagctggaggcggcgcgtataatcggaagggaaaagcagtggctatgacggcgccggcgatcgagataaccggtacatcgtcatctgtagtgtcaaagagcgaaatcgaaccggagaagacgaacgtcgatgataggaaacgaaaagagagagaagccaccactactgatgaaactgaatcccgtagcgaggaaacaaaacaagcacgtgtatcaacaacatctaccaagagatctcgtgctgctgaagttcataatctctctgaaagaaaacggagagataggatcaatgagagaatgaaagctttgcaagaacttatacctcgctgcaacaagtcagataaagcttcgatgctagatgaagctattgagtacatgaaatctcttcagcttcaaatacagatgatgtcaatgggatgtggaatgatgccaatgatgtatccgggcatgcaacagtacatgcctcatatggcgatgggtatgggtatgaaccagcctattcctcctccttccttcatgccattccccaacatgttagccgctcaaagacctttgcctacacaaactcacatggccgggtcaggaccgcaataccctgttcatgcttctgacccgtcaagagtctttgtaccgaaccagcagtatgatccaacctcgggccagcctcagtatccagctggttacacggatccatatcagcagttccgcggtctccacccgacccaaccacctcagtttcagaatcaagcaacatcgtacccaagttcgagcagggtgagtagtagtaaggaatctgaggatcacggaaaccacacaacagaatcaagcaacatcgtatccaagttcgagcagggtgagtag

SEQ ID NO: 96445 - protein, 490 aa, Arabidopsis thaliana
  peptide (1)..(490): Ceres Seq. ID no. 12733312
  misc_feature (285)..(334): Pfam Name: Helix-loop-helix DNA-binding domain Pfam Description: Helix-loop-helix DNA-binding domain
  misc_feature (1)..(490): Homolog of NCBI NO: 25411969 NR Description: hypothetical protein At2g20180 [imported] - thaliana >gi|4580456|gb|AAD24380.1| unknown protein [Arabidopsis
  misc_feature (1)..(477): Homolog of NCBI NO: 30680909 NR Description: (bHLH015) putative bHLH transcription factor thaliana] >gi|26051284|gb|AAN78308.1| putative bHLH transcription
  misc_feature (72)..(477): Homolog of NCBI NO: 30680903 NR Description: (bHLH015) putative bHLH transcription factor
  misc_feature (26)..(400): Homolog of NCBI NO: 7485527 NR Description: hypothetical protein F16A16.100 - Arabidopsis >gi|4218119|emb|CAA22973.1| putative protein [Arabidopsis >gi|7269734|emb|CAB81467.1| putative protein [Arabidopsis
  misc_feature (297)..(467): Homolog of NCBI NO: 26185713 NR Description: putative bHLH transcription factor [Arabidopsis
  misc_feature (26)..(338): Homolog of NCBI NO: 30688111 NR Description: expressed protein [Arabidopsis thaliana]
  misc_feature (266)..(382): Homolog of NCBI NO: 33111973 NR Description: putative bHLH127 transcription factor
  misc_feature (32)..(134): Homolog of NCBI NO: 33111973 NR Description: putative bHLH127 transcription factor
  misc_feature (36)..(459): Homolog of NCBI NO: 15235427 NR Description: putative protein; protein id: At4g28800.1
  misc_feature (37)..(386): Homolog of NCBI NO: 30689218 NR Description: transcription factor (BHLH9) -related
MHHFVPDFDTDDDYVNNHNSSLNHLPRKSITTMGEDDDLMELLWQNGQVVVQNQRLHTKKPSSSPPKLLPSMDPQQQPSSDQNLFIQEDEMTSWLHYPLRDDDFCSDLLFSAAPTATATATVSQVTAARPPVSSTNESRPPVRNFMNFSRLRGDFNNGRGGESGPLLSKAVVRESTQVSPSATPSAAASESGLTRRTDGTDSSAVAGGGAYNRKGKAVAMTAPAIEITGTSSSVVSKSEIEPEKTNVDDRKRKEREATTTDETESRSEETKQARVSTTSTKRSRAAEVHNLSERKRRDRINERMKALQELIPRCNKSDKASMLDEAIEYMKSLQLQIQMMSMGCGMMPMMYPGMQQYMPHMAMGMGMNQPIPPPSFMPFPNMLAAQRPLPTQTHMAGSGPQYPVHASDPSRVFVPNQQYDPTSGQPQYPAGYTDPYQQFRGLHPTQPPQFQNQATSYPSSSRVSSSKESEDHGNHTTESSNIVSKFEQGE

SEQ ID NO: 96446 - protein, 458 aa, Arabidopsis thaliana
  peptide (1)..(458): Ceres Seq. ID no. 12733313
  misc_feature (253)..(302): Pfam Name: Helix-loop-helix DNA-binding domain Pfam Description: Helix-loop-helix DNA-binding domain
  misc_feature (1)..(458): Homolog of NCBI NO: 25411969 NR Description: hypothetical protein At2g20180 [imported] - thaliana >gi|4580456|gb|AAD24380.1| unknown protein [Arabidopsis
  misc_feature (1)..(445): Homolog of NCBI NO: 30680909 NR Description: (bHLH015) putative bHLH transcription factor thaliana] >gi|26051284|gb|AAN78308.1| putative bHLH transcription
  misc_feature (40)..(445): Homolog of NCBI NO: 30680903 NR Description: (bHLH015) putative bHLH transcription factor
  misc_feature (1)..(368): Homolog of NCBI NO: 7485527 NR Description: hypothetical protein F16A16.100 - Arabidopsis >gi|4218119|emb|CAA22973.1| putative protein [Arabidopsis >gi|7269734|emb|CAB81467.1| putative protein [Arabidopsis
  misc_feature (265)..(435): Homolog of NCBI NO: 26185713 NR Description: putative bHLH transcription factor [Arabidopsis
  misc_feature (1)..(306): Homolog of NCBI NO: 30688111 NR Description: expressed protein [Arabidopsis thaliana]
  misc_feature (234)..(350): Homolog of NCBI NO: 33111973 NR Description: putative bHLH127 transcription factor
  misc_feature (1)..(102): Homolog of NCBI NO: 33111973 NR Description: putative bHLH127 transcription factor
  misc_feature (4)..(427): Homolog of NCBI NO: 15235427 NR Description: putative protein; protein id: At4g28800.1
  misc_feature (5)..(354): Homolog of NCBI NO: 30689218 NR Description: transcription factor (BHLH9) -related
MGEDDDLMELLWQNGQVVVQNQRLHTKKPSSSPPKLLPSMDPQQQPSSDQNLFIQEDEMTSWLHYPLRDDDFCSDLLFSAAPTATATATVSQVTAARPPVSSTNESRPPVRNFMNFSRLRGDFNNGRGGESGPLLSKAVVRESTQVSPSATPSAAASESGLTRRTDGTDSSAVAGGGAYNRKGKAVAMTAPAIEITGTSSSVVSKSEIEPEKTNVDDRKRKEREATTTDETESRSEETKQARVSTTSTKRSRAAEVHNLSERKRRDRINERMKALQELIPRCNKSDKASMLDEAIEYMKSLQLQIQMMSMGCGMMPMMYPGMQQYMPHMAMGMGMNQPIPPPSFMPFPNMLAAQRPLPTQTHMAGSGPQYPVHASDPSRVFVPNQQYDPTSGQPQYPAGYTDPYQQFRGLHPTQPPQFQNQATSYPSSSRVSSSKESEDHGNHTTESSNIVSKFEQGE

SEQ ID NO: 96447 - protein, 451 aa, Arabidopsis thaliana
  peptide (1)..(451): Ceres Seq. ID no. 12733314
  misc_feature (246)..(295): Pfam Name: Helix-loop-helix DNA-binding domain Pfam Description: Helix-loop-helix DNA-binding domain
  misc_feature (1)..(451): Homolog of NCBI NO: 25411969 NR Description: hypothetical protein At2g20180 [imported] - thaliana >gi|4580456|gb|AAD24380.1| unknown protein [Arabidopsis
  misc_feature (1)..(438): Homolog of NCBI NO: 30680909 NR Description: (bHLH015) putative bHLH transcription factor thaliana] >gi|26051284|gb|AAN78308.1| putative bHLH transcription
  misc_feature (33)..(438): Homolog of NCBI NO: 30680903 NR Description: (bHLH015) putative bHLH transcription factor
  misc_feature (1)..(361): Homolog of NCBI NO: 7485527 NR Description: hypothetical protein F16A16.100 - Arabidopsis >gi|4218119|emb|CAA22973.1| putative protein [Arabidopsis >gi|7269734|emb|CAB81467.1| putative protein [Arabidopsis
  misc_feature (258)..(428): Homolog of NCBI NO: 26185713 NR Description: putative bHLH transcription factor [Arabidopsis
  misc_feature (1)..(299): Homolog of NCBI NO: 30688111 NR Description: expressed protein [Arabidopsis thaliana]
  misc_feature (227)..(343): Homolog of NCBI NO: 33111973 NR Description: putative bHLH127 transcription factor
  misc_feature (1)..(95): Homolog of NCBI NO: 33111973 NR Description: putative bHLH127 transcription factor
  misc_feature (1)..(420): Homolog of NCBI NO: 15235427 NR Description: putative protein; protein id: At4g28800.1
  misc_feature (1)..(347): Homolog of NCBI NO: 30689218 NR Description: transcription factor (BHLH9) -related
MELLWQNGQVVVQNQRLHTKKPSSSPPKLLPSMDPQQQPSSDQNLFIQEDEMTSWLHYPLRDDDFCSDLLFSAAPTATATATVSQVTAARPPVSSTNESRPPVRNFMNFSRLRGDFNNGRGGESGPLLSKAVVRESTQVSPSATPSAAASESGLTRRTDGTDSSAVAGGGAYNRKGKAVAMTAPAIEITGTSSSVVSKSEIEPEKTNVDDRKRKEREATTTDETESRSEETKQARVSTTSTKRSRAAEVHNLSERKRRDRINERMKALQELIPRCNKSDKASMLDEAIEYMKSLQLQIQMMSMGCGMMPMMYPGMQQYMPHMAMGMGMNQPIPPPSFMPFPNMLAAQRPLPTQTHMAGSGPQYPVHASDPSRVFVPNQQYDPTSGQPQYPAGYTDPYQQFRGLHPTQPPQFQNQATSYPSSSRVSSSKESEDHGNHTTESSNIVSKFEQGE

SEQ ID NO: 96448 - DNA, 3993 bp, Arabidopsis thaliana
  misc_feature (1)..(3993): Ceres Seq. ID no. 12733315
  misc_feature: MA Experiment ID: 20000235 Result: Up-regulated in Transcription
  misc_feature: MA Experiment 20000235 PARAMETER Experiment Name: At_Siliques_P Parameter: Age (day) Value: 21
  misc_feature: MA Experiment 20000235 PARAMETER Experiment Name: At_Siliques_P Parameter: Organism Value: A. thaliana
  misc_feature: MA Experiment 20000235 PARAMETER Experiment Name: At_Siliques_P Parameter: Plant Line Value: WS
  misc_feature: MA Experiment 20000235 PARAMETER Experiment Name: At_Siliques_P Parameter: Tissue Value: 5-10mm Siliques vs. Whole Plant
  misc_feature: MA Experiment ID: 20000286 Result: Up-regulated in Transcription
  misc_feature: MA Experiment 20000286 PARAMETER Experiment Name: At_Open_Flower_P Parameter: Age (day) Value: 21
  misc_feature: MA Experiment 20000286 PARAMETER Experiment Name: At_Open_Flower_P Parameter: Plant Line Value: WS
  misc_feature: MA Experiment 20000286 PARAMETER Experiment Name: At_Open_Flower_P Parameter: Tissue Value: Half Open vs. Whole Plant
  misc_feature: MA Experiment ID: 20001451 Result: Down-regulated in Transcription
  misc_feature: MA Experiment 20001451 PARAMETER Experiment Name: At_Far-red-induction_P Parameter: Age (day) Value: 7
  misc_feature: MA Experiment 20001451 PARAMETER Experiment Name: At_Far-red-induction_P Parameter: Light Value: Far-red vs. White
  misc_feature: MA Experiment 20001451 PARAMETER Experiment Name: At_Far-red-induction_P Parameter: Organism Value: A. thaliana
  misc_feature: MA Experiment 20001451 PARAMETER Experiment Name: At_Far-red-induction_P Parameter: Plant Line Value: Columbia
  misc_feature: MA Experiment 20001451 PARAMETER Experiment Name: At_Far-red-induction_P Parameter: Timepoint (hr) Value: 24
  misc_feature: MA Experiment 20001451 PARAMETER Experiment Name: At_Far-red-induction_P Parameter: Tissue Value: Whole Plant
atggaggtttcatctccgacgattatagtggagagagctggttcgtatgcttggatgcataagagttggagagttagggaagagtttgcgcgtactgttacatcggcgattggtcttttcgcatctacggaacttcctcttcagcgtgttatacttgctccgatacttcagatgttaaatgaccctaatcaagcagttagggaagctgctattttgtgcattgaggagatgtatatgcaaggtgggtctcaatttcgagaagagcttcaacgtcaccatcttccatcgtatatggtgaaggacattaatgctagactagaacgtattgagccacaactgcgttctacagatggccgtagtgcccaccatgttgttaatgaggtgaaggcatcaagtgtcaatcccaaaaagagcagtcccagggcaaaggctcctacgagggagaactctttatttgggggagatgccgacatcactgaaaaacccattgagccaatcaaagtgtactcagagaaggagttaatacgagaatttgagaaaattgctgcaacactcgtcccagagaaagactggtcaatgcgtatttcagctatgcggagggttgaaggacttgttgcaggaggtgcgactgattactcctgctttcgaggtctcctgaagcaacttgttggtcctttaagtactcaattagctgaccggagatctaccattgttaagcaggcctgtcatctcttgtgtctcttatcaaaagagctactgggagattttgaggcatgcgctgagacgtttattccagtgcttttcaagctggttgtgattactgtgcttgtaattgcagaatctgctgataactgcataaaaacgatgctgcgtaactgcaaagctgcccgtgtacttcctcgcatagctgaatcagcaaaacatgaccgtaatgcaattctgcgagcaagatgttgtgaatatgcattgttaacacttgaacattggcctgatgctccagaaattcaacgatcagttgatttatatgaagatctgattagatgctgtgttgcagatgctatgagtgaggtgcgggcaactgctagaatgtgctacagaatgtttgcaaaaacttggccggatcgttctcgccggttgttttcgtcctttgaccctgtcattcaaaggctaataaatgaagaagatggtggaattcataggagacacgcctcaccatctgtccgtgagagacattcccagccttcattttctcagacgtctgctccttctaacctacctggctatggaacatcagctatagtcgctatggatagaagttcaaatttatcatctggaggatctctttcttctgggttactcctttcgcaatcaaaggatgtcaataaaggttctgaacgtagtctggaaagtgtgttacaatcaagcaagcagaaggtcagtgcaattgaaagtatgctccgaggactgcatatatctgatagacaaaatcctgcagcccttcgttcaagtagtttggatctaggagttgaccctccatcgtctcgtgatcctcctttccatgctgttgctccagcatccaatagtcacacaagtagcgcagctgctgaatcaacacatagtatcaacaaaggcagtaatcgcaatggtggccttggtttgtcagatatcatcacccaaattcaagcttcaaaggactcaggaagatcatcttaccgtggcaatctgttgtccgagtctcatcctactttttcatccttgaccgctaaacggggctcagagagaaatgagagaagttctcttgaggaaagcaatgatgccagagaggtgaggcggtttatggctggtcattttgaccgacagcagatggatactgcttatagagatttgactttcagggaatcaaacgctagccatgttcccaatttccagaggccacttttgaggaagaatgtagggggaagaatgtctgcaggccggaggaggagttttgatgatagccaactgcaaattggtgacatatcaaattttgttgatggtccagcttccctgaacgaggcccttaacgacggactgaactcaagttctgattggtgtgccagagttgcagcttttaattttctccaaactctgctgcagcaaggcccaaaaggtgctcaagaagtaattcaaagttttgagaaagtaatgaaactatttctccggcatttggatgatcctcaccacaaggtcgcacaagcagcactgtcgacacttgcagatcttataccatcttgccgaaagccttttgagagctacatggaaagagtcctaccccatgtgttttcacggctaattgaccctaaagaagtagttagacaaccttgctcctcaaccttggaaattgtcagcaaaacctacagtgtggattcccttttacctgcattgcttcgttcactggatgaacagagatcaccaaaggctaaattagctgtgattgaatttgccatcaactccttcaacaggtacgctggtaaccctgaaatttcgggtaatagtggcatcttaaagttgtggctggcaaagttgacgccattaacccgcgacaaaaataccaagttgaaagaagcttccattacttgcatcatatctgtttacaatcattatgattctgcgggactgctaaattacattcttagtttgtcggttgaggagcaaaactctctgagaagagccctcaaacaatatactccccgcatcgaggtggacctgttaaactatatgcagagtaaaaaggaaaaacagagaattaagtcttatgacccatctgatgccattgggacatcatctgaggaaggatatgctggtgcctccaagaagaatatattccttggccggtattctgggggttctattgacagtgatagtggcaggaagtggagttcttcccaggagccaacaatgatcactggtggtgttggtcaaaatgtttccagtggaacccaggaaaagctgtatcagaacgttagaactgggatcagttcagctagtgatctgttgaaccccaaggattctgattacacatttgcttcagctggtcagaattcgatatcaagaactagccccaatggaagctcagaaaacatcgaaatcttggatgacttatctccaccacatttggagaaaaatggtctaaatctgacaagcgttgattccttggaaggaagacatgaaaatgaggtctcccgcgaattagatttaggtcactacatgctcacatctattaaggtcaacacaacaccggaatctggacctagcattcctcagattctacatatgatcaacgggagtgatggaagcccttcttctagcaagaaatctggactccagcaattaattgaagcctctgtagctaacgaggaatcagtttggaccaagtacttcaatcaaattttgacggttgttcttgaagtgctcgatgacgaagatttttcaatcaaagagcttgctctttcattgatttctgaaatgctaaagagccagaaagatgccatggaagactctgttgaaatagtgatcgaaaagctgcttcatgtctcaaaggacaccgttccaaaagtttccactgaagctgagcaatgtttgaccacagtcttgtcccaatacgatcctttcagatgcttaagcgttattgtcccattattggtgacggaagatgagaaaactcttgtcgcttgcataaattgtttaacgaagcttgtgggtaggctctcgcaagaggaattaatggatcaattgtcgtcttttttgcctgcggtttttgaagcatttgggagccaaagcgcggatgtccgcaagacagtggtgttctgtctagtagacatatatataatgcttgggaaagcatttttgccgtatttggaaggtctaaacagcacgcaggttcgtctagtgaccatctatgcaaaccggatctcgcaggctagaaacggtgcccctatcgacgcagacacctga

SEQ ID NO: 96449 - protein, 1330 aa, Arabidopsis thaliana
  peptide (1)..(1330): Ceres Seq. ID no. 12733316
  misc_feature (980)..(1330): Homolog of NCBI NO: 25411970 NR Description: hypothetical protein At2g20190 [imported] - thaliana >gi|4580455|gb|AAD24379.1| unknown protein [Arabidopsis
  misc_feature (130)..(552): Homolog of NCBI NO: 7513102 NR Description: KIAA0622 protein - human (fragment)
  misc_feature (1117)..(1329): Homolog of NCBI NO: 7513102 NR Description: KIAA0622 protein - human (fragment)
  misc_feature (130)..(552): Homolog of NCBI NO: 31563537 NR Description: CLIP-associating protein 1; Drosophila 'multiple
  misc_feature (1117)..(1329): Homolog of NCBI NO: 31563537 NR Description: CLIP-associating protein 1; Drosophila 'multiple
  misc_feature (126)..(628): Homolog of NCBI NO: 26335757 NR Description: unnamed protein product [Mus musculus]
  misc_feature (1117)..(1329): Homolog of NCBI NO: 26335757 NR Description: unnamed protein product [Mus musculus]
  misc_feature (126)..(670): Homolog of NCBI NO: 16758540 NR Description: CLIP-associating protein 2 [Rattus norvegicus]
  misc_feature (1117)..(1329): Homolog of NCBI NO: 16758540 NR Description: CLIP-associating protein 2 [Rattus norvegicus]
  misc_feature (140)..(461): Homolog of NCBI NO: 7513045 NR Description: hypothetical protein KIAA0627 - human (fragment)
MEVSSPTIIVERAGSYAWMHKSWRVREEFARTVTSAIGLFASTELPLQRVILAPILQMLNDPNQAVREAAILCIEEMYMQGGSQFREELQRHHLPSYMVKDINARLERIEPQLRSTDGRSAHHVVNEVKASSVNPKKSSPRAKAPTRENSLFGGDADITEKPIEPIKVYSEKELIREFEKIAATLVPEKDWSMRISAMRRVEGLVAGGATDYSCFRGLLKQLVGPLSTQLADRRSTIVKQACHLLCLLSKELLGDFEACAETFIPVLFKLVVITVLVIAESADNCIKTMLRNCKAARVLPRIAESAKHDRNAILRARCCEYALLTLEHWPDAPEIQRSVDLYEDLIRCCVADAMSEVRATARMCYRMFAKTWPDRSRRLFSSFDPVIQRLINEEDGGIHRRHASPSVRERHSQPSFSQTSAPSNLPGYGTSAIVAMDRSSNLSSGGSLSSGLLLSQSKDVNKGSERSLESVLQSSKQKVSAIESMLRGLHISDRQNPAALRSSSLDLGVDPPSSRDPPFHAVAPASNSHTSSAAAESTHSINKGSNRNGGLGLSDIITQIQASKDSGRSSYRGNLLSESHPTFSSLTAKRGSERNERSSLEESNDAREVRRFMAGHFDRQQMDTAYRDLTFRESNASHVPNFQRPLLRKNVGGRMSAGRRRSFDDSQLQIGDISNFVDGPASLNEALNDGLNSSSDWCARVAAFNFLQTLLQQGPKGAQEVIQSFEKVMKLFLRHLDDPHHKVAQAALSTLADLIPSCRKPFESYMERVLPHVFSRLIDPKEVVRQPCSSTLEIVSKTYSVDSLLPALLRSLDEQRSPKAKLAVIEFAINSFNRYAGNPEISGNSGILKLWLAKLTPLTRDKNTKLKEASITCIISVYNHYDSAGLLNYILSLSVEEQNSLRRALKQYTPRIEVDLLNYMQSKKEKQRIKSYDPSDAIGTSSEEGYAGASKKNIFLGRYSGGSIDSDSGRKWSSSQEPTMITGGVGQNVSSGTQEKLYQNVRTGISSASDLLNPKDSDYTFASAGQNSISRTSPNGSSENIEILDDLSPPHLEKNGLNLTSVDSLEGRHENEVSRELDLGHYMLTSIKVNTTPESGPSIPQILHMINGSDGSPSSSKKSGLQQLIEASVANEESVWTKYFNQILTVVLEVLDDEDFSIKELALSLISEMLKSQKDAMEDSVEIVIEKLLHVSKDTVPKVSTEAEQCLTTVLSQYDPFRCLSVIVPLLVTEDEKTLVACINCLTKLVGRLSQEELMDQLSSFLPAVFEAFGSQSADVRKTVVFCLVDIYIMLGKAFLPYLEGLNSTQVRLVTIYANRISQARNGAPIDADT

SEQ ID NO: 96450 - protein, 1312 aa, Arabidopsis thaliana
  peptide (1)..(1312): Ceres Seq. ID no. 12733317
  misc_feature (962)..(1312): Homolog of NCBI NO: 25411970 NR Description: hypothetical protein At2g20190 [imported] - thaliana >gi|4580455|gb|AAD24379.1| unknown protein [Arabidopsis
  misc_feature (112)..(534): Homolog of NCBI NO: 7513102 NR Description: KIAA0622 protein - human (fragment)
  misc_feature (1099)..(1311): Homolog of NCBI NO: 7513102 NR Description: KIAA0622 protein - human (fragment)
  misc_feature (112)..(534): Homolog of NCBI NO: 31563537 NR Description: CLIP-associating protein 1; Drosophila 'multiple
  misc_feature (1099)..(1311): Homolog of NCBI NO: 31563537 NR Description: CLIP-associating protein 1; Drosophila 'multiple
  misc_feature (108)..(610): Homolog of NCBI NO: 26335757 NR Description: unnamed protein product [Mus musculus]
  misc_feature (1099)..(1311): Homolog of NCBI NO: 26335757 NR Description: unnamed protein product [Mus musculus]
  misc_feature (108)..(652): Homolog of NCBI NO: 16758540 NR Description: CLIP-associating protein 2 [Rattus norvegicus]
  misc_feature (1099)..(1311): Homolog of NCBI NO: 16758540 NR Description: CLIP-associating protein 2 [Rattus norvegicus]
  misc_feature (122)..(443): Homolog of NCBI NO: 7513045 NR Description: hypothetical protein KIAA0627 - human (fragment)
MHKSWRVREEFARTVTSAIGLFASTELPLQRVILAPILQMLNDPNQAVREAAILCIEEMYMQGGSQFREELQRHHLPSYMVKDINARLERIEPQLRSTDGRSAHHVVNEVKASSVNPKKSSPRAKAPTRENSLFGGDADITEKPIEPIKVYSEKELIREFEKIAATLVPEKDWSMRISAMRRVEGLVAGGATDYSCFRGLLKQLVGPLSTQLADRRSTIVKQACHLLCLLSKELLGDFEACAETFIPVLFKLVVITVLVIAESADNCIKTMLRNCKAARVLPRIAESAKHDRNAILRARCCEYALLTLEHWPDAPEIQRSVDLYEDLIRCCVADAMSEVRATARMCYRMFAKTWPDRSRRLFSSFDPVIQRLINEEDGGIHRRHASPSVRERHSQPSFSQTSAPSNLPGYGTSAIVAMDRSSNLSSGGSLSSGLLLSQSKDVNKGSERSLESVLQSSKQKVSAIESMLRGLHISDRQNPAALRSSSLDLGVDPPSSRDPPFHAVAPASNSHTSSAAAESTHSINKGSNRNGGLGLSDIITQIQASKDSGRSSYRGNLLSESHPTFSSLTAKRGSERNERSSLEESNDAREVRRFMAGHFDRQQMDTAYRDLTFRESNASHVPNFQRPLLRKNVGGRMSAGRRRSFDDSQLQIGDISNFVDGPASLNEALNDGLNSSSDWCARVAAFNFLQTLLQQGPKGAQEVIQSFEKVMKLFLRHLDDPHHKVAQAALSTLADLIPSCRKPFESYMERVLPHVFSRLIDPKEVVRQPCSSTLEIVSKTYSVDSLLPALLRSLDEQRSPKAKLAVIEFAINSFNRYAGNPEISGNSGILKLWLAKLTPLTRDKNTKLKEASITCIISVYNHYDSAGLLNYILSLSVEEQNSLRRALKQYTPRIEVDLLNYMQSKKEKQRIKSYDPSDAIGTSSEEGYAGASKKNIFLGRYSGGSIDSDSGRKWSSSQEPTMITGGVGQNVSSGTQEKLYQNVRTGISSASDLLNPKDSDYTFASAGQNSISRTSPNGSSENIEILDDLSPPHLEKNGLNLTSVDSLEGRHENEVSRELDLGHYMLTSIKVNTTPESGPSIPQILHMINGSDGSPSSSKKSGLQQLIEASVANEESVWTKYFNQILTVVLEVLDDEDFSIKELALSLISEMLKSQKDAMEDSVEIVIEKLLHVSKDTVPKVSTEAEQCLTTVLSQYDPFRCLSVIVPLLVTEDEKTLVACINCLTKLVGRLSQEELMDQLSSFLPAVFEAFGSQSADVRKTVVFCLVDIYIMLGKAFLPYLEGLNSTQVRLVTIYANRISQARNGAPIDADT

SEQ ID NO: 96451 - protein, 1273 aa, Arabidopsis thaliana
  peptide (1)..(1273): Ceres Seq. ID no. 12733318
  misc_feature (923)..(1273): Homolog of NCBI NO: 25411970 NR Description: hypothetical protein At2g20190 [imported] - thaliana >gi|4580455|gb|AAD24379.1| unknown protein [Arabidopsis
  misc_feature (73)..(495): Homolog of NCBI NO: 7513102 NR Description: KIAA0622 protein - human (fragment)
  misc_feature (1060)..(1272): Homolog of NCBI NO: 7513102 NR Description: KIAA0622 protein - human (fragment)
  misc_feature (73)..(495): Homolog of NCBI NO: 31563537 NR Description: CLIP-associating protein 1; Drosophila 'multiple
  misc_feature (1060)..(1272): Homolog of NCBI NO: 31563537 NR Description: CLIP-associating protein 1; Drosophila 'multiple
  misc_feature (69)..(571): Homolog of NCBI NO: 26335757 NR Description: unnamed protein product [Mus musculus]
  misc_feature (1060)..(1272): Homolog of NCBI NO: 26335757 NR Description: unnamed protein product [Mus musculus]
  misc_feature (69)..(613): Homolog of NCBI NO: 16758540 NR Description: CLIP-associating protein 2 [Rattus norvegicus]
  misc_feature (1060)..(1272): Homolog of NCBI NO: 16758540 NR Description: CLIP-associating protein 2 [Rattus norvegicus]
  misc_feature (83)..(404): Homolog of NCBI NO: 7513045 NR Description: hypothetical protein KIAA0627 - human (fragment)
MLNDPNQAVREAAILCIEEMYMQGGSQFREELQRHHLPSYMVKDINARLERIEPQLRSTDGRSAHHVVNEVKASSVNPKKSSPRAKAPTRENSLFGGDADITEKPIEPIKVYSEKELIREFEKIAATLVPEKDWSMRISAMRRVEGLVAGGATDYSCFRGLLKQLVGPLSTQLADRRSTIVKQACHLLCLLSKELLGDFEACAETFIPVLFKLVVITVLVIAESADNCIKTMLRNCKAARVLPRIAESAKHDRNAILRARCCEYALLTLEHWPDAPEIQRSVDLYEDLIRCCVADAMSEVRATARMCYRMFAKTWPDRSRRLFSSFDPVIQRLINEEDGGIHRRHASPSVRERHSQPSFSQTSAPSNLPGYGTSAIVAMDRSSNLSSGGSLSSGLLLSQSKDVNKGSERSLESVLQSSKQKVSAIESMLRGLHISDRQNPAALRSSSLDLGVDPPSSRDPPFHAVAPASNSHTSSAAAESTHSINKGSNRNGGLGLSDIITQIQASKDSGRSSYRGNLLSESHPTFSSLTAKRGSERNERSSLEESNDAREVRRFMAGHFDRQQMDTAYRDLTFRESNASHVPNFQRPLLRKNVGGRMSAGRRRSFDDSQLQIGDISNFVDGPASLNEALNDGLNSSSDWCARVAAFNFLQTLLQQGPKGAQEVIQSFEKVMKLFLRHLDDPHHKVAQAALSTLADLIPSCRKPFESYMERVLPHVFSRLIDPKEVVRQPCSSTLEIVSKTYSVDSLLPALLRSLDEQRSPKAKLAVIEFAINSFNRYAGNPEISGNSGILKLWLAKLTPLTRDKNTKLKEASITCIISVYNHYDSAGLLNYILSLSVEEQNSLRRALKQYTPRIEVDLLNYMQSKKEKQRIKSYDPSDAIGTSSEEGYAGASKKNIFLGRYSGGSIDSDSGRKWSSSQEPTMITGGVGQNVSSGTQEKLYQNVRTGISSASDLLNPKDSDYTFASAGQNSISRTSPNGSSENIEILDDLSPPHLEKNGLNLTSVDSLEGRHENEVSRELDLGHYMLTSIKVNTTPESGPSIPQILHMINGSDGSPSSSKKSGLQQLIEASVANEESVWTKYFNQILTVVLEVLDDEDFSIKELALSLISEMLKSQKDAMEDSVEIVIEKLLHVSKDTVPKVSTEAEQCLTTVLSQYDPFRCLSVIVPLLVTEDEKTLVACINCLTKLVGRLSQEELMDQLSSFLPAVFEAFGSQSADVRKTVVFCLVDIYIMLGKAFLPYLEGLNSTQVRLVTIYANRISQARNGAPIDADT

SEQ ID NO: 96452 - DNA, 1824 bp, Arabidopsis thaliana
  misc_feature (1)..(1824): Ceres Seq. ID no. 12733326
  misc_feature: MA Experiment ID: 20000173 Result: Down-regulated in Transcription
  misc_feature: MA Experiment 20000173 PARAMETER Experiment Name: At_42deg_Heat_P Parameter: Age (day) Value: 14
  misc_feature: MA Experiment 20000173 PARAMETER Experiment Name: At_42deg_Heat_P Parameter: Organism Value: A. thaliana
  misc_feature: MA Experiment 20000173 PARAMETER Experiment Name: At_42deg_Heat_P Parameter: Plant Line Value: WS
  misc_feature: MA Experiment 20000173 PARAMETER Experiment Name: At_42deg_Heat_P Parameter: Temperature (deg C) Value: 42 vs. 22
  misc_feature: MA Experiment 20000173 PARAMETER Experiment Name: At_42deg_Heat_P Parameter: Timepoint (hr) Value: 6
  misc_feature: MA Experiment 20000173 PARAMETER Experiment Name: At_42deg_Heat_P Parameter: Tissue Value: Aerial
  misc_feature: MA Experiment ID: 20000227 Result: Down-regulated in Transcription
  misc_feature: MA Experiment 20000227 PARAMETER Experiment Name: At_Root-Tips-vs-Tops_P Parameter: Tissue Value: Root Tips vs. Root Tops
  misc_feature: MA Experiment ID: 20000451 Result: Down-regulated in Transcription
  misc_feature: MA Experiment 20000451 PARAMETER Experiment Name: At_CS6879_Shoots-Roots_P Parameter: Age (day) Value: 14
  misc_feature: MA Experiment 20000451 PARAMETER Experiment Name: At_CS6879_Shoots-Roots_P Parameter: Organism Value: A. thaliana
  misc_feature: MA Experiment 20000451 PARAMETER Experiment Name: At_CS6879_Shoots-Roots_P Parameter: Plant Line Value: CS6879 vs. WS
  misc_feature: MA Experiment 20000451 PARAMETER Experiment Name: At_CS6879_Shoots-Roots_P Parameter: Tissue Value: Roots
  misc_feature: MA Experiment ID: 20000495 Result: Down-regulated in Transcription
  misc_feature: MA Experiment 20000495 PARAMETER Experiment Name: At_Guard_Cells_P Parameter: Harvest Date Value: 8/2/2002
  misc_feature: MA Experiment 20000495 PARAMETER Experiment Name: At_Guard_Cells_P Parameter: Organism Value: A. thaliana
  misc_feature: MA Experiment 20000495 PARAMETER Experiment Name: At_Guard_Cells_P Parameter: Tissue Value: Guard Cells vs. Leaves
  misc_feature: MA Experiment ID: 20001248 Result: Down-regulated in Transcription
  misc_feature: MA Experiment 20001248 PARAMETER Experiment Name: At_Far-red-induction_P Parameter: Age (day) Value: 7
  misc_feature: MA Experiment 20001248 PARAMETER Experiment Name: At_Far-red-induction_P Parameter: Light Value: Far-red vs. White
  misc_feature: MA Experiment 20001248 PARAMETER Experiment Name: At_Far-red-induction_P Parameter: Organism Value: A. thaliana
  misc_feature: MA Experiment 20001248 PARAMETER Experiment Name: At_Far-red-induction_P Parameter: Plant Line Value: Columbia
  misc_feature: MA Experiment 20001248 PARAMETER Experiment Name: At_Far-red-induction_P Parameter: Timepoint (hr) Value: 4
  misc_feature: MA Experiment 20001248 PARAMETER Experiment Name: At_Far-red-induction_P Parameter: Tissue Value: Whole Plant
  misc_feature: MA Experiment ID: 20001450 Result: Down-regulated in Transcription
  misc_feature: MA Experiment 20001450 PARAMETER Experiment Name: At_Far-red-induction_P Parameter: Age (day) Value: 7
  misc_feature: MA Experiment 20001450 PARAMETER Experiment Name: At_Far-red-induction_P Parameter: Light Value: Far-red vs. White
  misc_feature: MA Experiment 20001450 PARAMETER Experiment Name: At_Far-red-induction_P Parameter: Organism Value: A. thaliana
  misc_feature: MA Experiment 20001450 PARAMETER Experiment Name: At_Far-red-induction_P Parameter: Plant Line Value: Columbia
  misc_feature: MA Experiment 20001450 PARAMETER Experiment Name: At_Far-red-induction_P Parameter: Timepoint (hr) Value: 8
  misc_feature: MA Experiment 20001450 PARAMETER Experiment Name: At_Far-red-induction_P Parameter: Tissue Value: Whole Plant
  misc_feature: MA Experiment ID: 20001451 Result: Down-regulated in Transcription
  misc_feature: MA Experiment 20001451 PARAMETER Experiment Name: At_Far-red-induction_P Parameter: Age (day) Value: 7
  misc_feature: MA Experiment 20001451 PARAMETER Experiment Name: At_Far-red-induction_P Parameter: Light Value: Far-red vs. White
  misc_feature: MA Experiment 20001451 PARAMETER Experiment Name: At_Far-red-induction_P Parameter: Organism Value: A. thaliana
  misc_feature: MA Experiment 20001451 PARAMETER Experiment Name: At_Far-red-induction_P Parameter: Plant Line Value: Columbia
  misc_feature: MA Experiment 20001451 PARAMETER Experiment Name: At_Far-red-induction_P Parameter: Timepoint (hr) Value: 24
  misc_feature: MA Experiment 20001451 PARAMETER Experiment Name: At_Far-red-induction_P Parameter: Tissue Value: Whole Plant
  misc_feature: MA Experiment ID: 20001557 Result: Down-regulated in Transcription
  misc_feature: MA Experiment 20001557 PARAMETER Experiment Name: At_Drought_Soil_Dry_P Parameter: Age (day) Value: 27
  misc_feature: MA Experiment 20001557 PARAMETER Experiment Name: At_Drought_Soil_Dry_P Parameter: Organism Value: A. thaliana
  misc_feature: MA Experiment 20001557 PARAMETER Experiment Name: At_Drought_Soil_Dry_P Parameter: Plant Line Value: WS
  misc_feature: MA Experiment 20001557 PARAMETER Experiment Name: At_Drought_Soil_Dry_P Parameter: Post Timepoint (hr) Value: 3
  misc_feature: MA Experiment 20001557 PARAMETER Experiment Name: At_Drought_Soil_Dry_P Parameter: Post-Treatment Value: Re-Water vs. No Drought
  misc_feature: MA Experiment 20001557 PARAMETER Experiment Name: At_Drought_Soil_Dry_P Parameter: Timepoint (day) Value: 13
  misc_feature: MA Experiment 20001557 PARAMETER Experiment Name: At_Drought_Soil_Dry_P Parameter: Treatment Value: Drought vs. No Drought
  misc_feature: MA Experiment ID: 20001558 Result: Down-regulated in Transcription
  misc_feature: MA Experiment 20001558 PARAMETER Experiment Name: At_Drought_Soil_Dry_P Parameter: Age (day) Value: 27
  misc_feature: MA Experiment 20001558 PARAMETER Experiment Name: At_Drought_Soil_Dry_P Parameter: Organism Value: A. thaliana
  misc_feature: MA Experiment 20001558 PARAMETER Experiment Name: At_Drought_Soil_Dry_P Parameter: Plant Line Value: WS
  misc_feature: MA Experiment 20001558 PARAMETER Experiment Name: At_Drought_Soil_Dry_P Parameter: Post Timepoint (hr) Value: 6
  misc_feature: MA Experiment 20001558 PARAMETER Experiment Name: At_Drought_Soil_Dry_P Parameter: Post-Treatment Value: Re-Water vs. No Drought
  misc_feature: MA Experiment 20001558 PARAMETER Experiment Name: At_Drought_Soil_Dry_P Parameter: Timepoint (day) Value: 13
  misc_feature: MA Experiment 20001558 PARAMETER Experiment Name: At_Drought_Soil_Dry_P Parameter: Treatment Value: Drought vs. No Drought
  misc_feature: MA Experiment ID: 20001560 Result: Down-regulated in Transcription
  misc_feature: MA Experiment 20001560 PARAMETER Experiment Name: At_Drought_Soil_Dry_P Parameter: Age (day) Value: 28
  misc_feature: MA Experiment 20001560 PARAMETER Experiment Name: At_Drought_Soil_Dry_P Parameter: Organism Value: A. thaliana
  misc_feature: MA Experiment 20001560 PARAMETER Experiment Name: At_Drought_Soil_Dry_P Parameter: Plant Line Value: WS
  misc_feature: MA Experiment 20001560 PARAMETER Experiment Name: At_Drought_Soil_Dry_P Parameter: Post Timepoint (hr) Value: None
  misc_feature: MA Experiment 20001560 PARAMETER Experiment Name: At_Drought_Soil_Dry_P Parameter: Post-Treatment Value: None
  misc_feature: MA Experiment 20001560 PARAMETER Experiment Name: At_Drought_Soil_Dry_P Parameter: Timepoint (day) Value: 14
  misc_feature: MA Experiment 20001560 PARAMETER Experiment Name: At_Drought_Soil_Dry_P Parameter: Treatment Value: Drought vs. No Drought
  misc_feature: MA Experiment ID: 20001905 Result: Down-regulated in Transcription
  misc_feature: MA Experiment 20001905 PARAMETER Experiment Name: At_Drought_Reproduction_P Parameter: Age (day) Value: 40
  misc_feature: MA Experiment 20001905 PARAMETER Experiment Name: At_Drought_Reproduction_P Parameter: Organism Value: A. thaliana
  misc_feature: MA Experiment 20001905 PARAMETER Experiment Name: At_Drought_Reproduction_P Parameter: Plant Line Value: WS
  misc_feature: MA Experiment 20001905 PARAMETER Experiment Name: At_Drought_Reproduction_P Parameter: Timepoint (day) Value: 10
  misc_feature: MA Experiment 20001905 PARAMETER Experiment Name: At_Drought_Reproduction_P Parameter: Tissue Value: Rosettes
  misc_feature: MA Experiment 20001905 PARAMETER Experiment Name: At_Drought_Reproduction_P Parameter: Treatment Value: Drought vs. No Drought
  misc_feature: MA Experiment ID: 20001906 Result: Down-regulated in Transcription
  misc_feature: MA Experiment 20001906 PARAMETER Experiment Name: At_Drought_Reproduction_P Parameter: Age (day) Value: 35
  misc_feature: MA Experiment 20001906 PARAMETER Experiment Name: At_Drought_Reproduction_P Parameter: Organism Value: A. thaliana
  misc_feature: MA Experiment 20001906 PARAMETER Experiment Name: At_Drought_Reproduction_P Parameter: Plant Line Value: WS
  misc_feature: MA Experiment 20001906 PARAMETER Experiment Name: At_Drought_Reproduction_P Parameter: Timepoint (day) Value: 5
  misc_feature: MA Experiment 20001906 PARAMETER Experiment Name: At_Drought_Reproduction_P Parameter: Tissue Value: Siliques
  misc_feature: MA Experiment 20001906 PARAMETER Experiment Name: At_Drought_Reproduction_P Parameter: Treatment Value: Drought vs. No Drought
  misc_feature: MA Experiment ID: 20001911 Result: Down-regulated in Transcription
  misc_feature: MA Experiment 20001911 PARAMETER Experiment Name: At_Drought_Reproduction_P Parameter: Age (day) Value: 40
  misc_feature: MA Experiment 20001911 PARAMETER Experiment Name: At_Drought_Reproduction_P Parameter: Organism Value: A. thaliana
  misc_feature: MA Experiment 20001911 PARAMETER Experiment Name: At_Drought_Reproduction_P Parameter: Plant Line Value: WS
  misc_feature: MA Experiment 20001911 PARAMETER Experiment Name: At_Drought_Reproduction_P Parameter: Timepoint (day) Value: 10
  misc_feature: MA Experiment 20001911 PARAMETER Experiment Name: At_Drought_Reproduction_P Parameter: Tissue Value: Flowers
  misc_feature: MA Experiment 20001911 PARAMETER Experiment Name: At_Drought_Reproduction_P Parameter: Treatment Value: Drought vs. No Drought
aaatcaatcagagagagagcttctgagacataaacatcaattcaaatcgacgcaagcaaagaaagcaaaatggaaaatggaagcgggaaggtgttgaagccgatggactcagagcaattgagagagtacggacatctgatggttgatttcattgctgattactacaaaaccatcgaagatttccctgttcttagccaagttcagcctggttatcttcataagcttttgcctgattctgcacctgaccaccctgaaactctggaccaagttcttgatgatgttcgagcaaagatattgcctggagtaacgcattggcaaagcccgagtttctttgcttattatccttctaacagcagtgttgctgggttcttgggtgagatgttgagtgctggtcttggcattgttggttttagttgggttacttctccagctgccacagagctagaaatgatcgttcttgattgggttgctaaacttctcaacctacccgagcagtttatgtccaaaggaaatggaggtggagttatacaagggtcagctagtgaagctgttcttgttgttctgattgctgcacgcgacaaggttttaagaagcgttggcaaaaacgcgcttgagaagctcgttgtctactcctctgaccagactcattcagctttacagaaggcttgccagattgctggaatccatccagagaattgcagggtgctgacaacagactcttctacaaattacgctctgcgtccagaatcgcttcaagaagctgtttctagggatcttgaagctggattgattccattcttcttatgtgctaatgttgggaccacttcttcaaccgcagttgatccattagctgcactggggaagattgctaatagcaatggaatttggtttcacgtggatgcagcatatgctggaagtgcctgtatatgtccagagtatcggcaatacattgacggtgtagaaactgcagactcttttaacatgaatgctcacaaatggttcctcactaacttcgattgttcccttctttgggtaaaggatcaagattctcttacattagctctttcaacaaatccagagtttctcaaaaacaaggcctctcaggcaaacttggttgttgattacaaagattggcaaatccctctcggacgaagattcagatcattgaaactatggatggttttaaggctctatggatctgagaccttgaagagctatataagaaaccatatcaaactggctaaagaattcgaacaacttgtctctcaagatcctaacttcgagattgtcacacctcggatctttgctcttgtctgtttccgcctcgtgcctgtgaaagacgaagaaaagaagtgtaataaccgaaaccgtgaactcctagacgcagtgaactcttcagggaaactcttcatgtcgcacactgctttatcggggaaaatcgtactacgttgcgcaataggagcgccattgacggaggagaagcacgttaaggaggcgtggaagattattcaggaagaagcatcttacttgcttcacaagtaaatatgataaaacagtaaaagaataaaacggtttttgccaacaaaacgaagcacttcggtttggtttggtttaatttgataatataataataaaacagaaaattgcttaagtaagacttatcaacttcggtttgatttcggtacactttagtaaggtgatctttcttgtgtgtattttatcctctattttttttttttaccaattgtgtgtattttatctatttggtttgggtttattttgtggttaattaatgtaagcaatgataataaaatgttctatttt

SEQ ID NO: 96453 - protein, 490 aa, Arabidopsis thaliana
  peptide (1)..(490): Ceres Seq. ID no. 12733327
  misc_feature (46)..(420): Pfam Name: Pyridoxal-dependent decarboxylase conserved domain Pfam Description: Pyridoxal-dependent decarboxylase conserved
  misc_feature (1)..(490): Homolog of NCBI NO: 5911780 NR Description: tyrosine decarboxylase [Arabidopsis thaliana]
  misc_feature (12)..(490): Homolog of NCBI NO: 25290992 NR Description: probable tyrosine decarboxylase [imported] - thaliana >gi|4512701|gb|AAD21754.1| putative tyrosine
  misc_feature (1)..(394): Homolog of NCBI NO: 5911778 NR Description: tyrosine decarboxylase [Arabidopsis thaliana]
  misc_feature (3)..(485): Homolog of NCBI NO: 15235393 NR Description: aromatic amino-acid decarboxylase - like protein;
  misc_feature (8)..(421): Homolog of NCBI NO: 12620328 NR Description: tyrosine/dopa decarboxylase [Thalictrum flavum
  misc_feature (425)..(488): Homolog of NCBI NO: 12620328 NR Description: tyrosine/dopa decarboxylase [Thalictrum flavum
  misc_feature (11)..(488): Homolog of NCBI NO: 3282527 NR Description: tyrosine/dopa decarboxylase [Papaver somniferum]
  misc_feature (9)..(488): Homolog of NCBI NO: 169673 NR Description: tyrosine decarboxylase >gi|169675|gb|AAA33862.1|
  misc_feature (9)..(488): Homolog of NCBI NO: 1174829 NR Description: TYROSINE DECARBOXYLASE 3
  misc_feature (9)..(488): Homolog of NCBI NO: 1174830 NR Description: TYROSINE DECARBOXYLASE 4
MENGSGKVLKPMDSEQLREYGHLMVDFIADYYKTIEDFPVLSQVQPGYLHKLLPDSAPDHPETLDQVLDDVRAKILPGVTHWQSPSFFAYYPSNSSVAGFLGEMLSAGLGIVGFSWVTSPAATELEMIVLDWVAKLLNLPEQFMSKGNGGGVIQGSASEAVLVVLIAARDKVLRSVGKNALEKLVVYSSDQTHSALQKACQIAGIHPENCRVLTTDSSTNYALRPESLQEAVSRDLEAGLIPFFLCANVGTTSSTAVDPLAALGKIANSNGIWFHVDAAYAGSACICPEYRQYIDGVETADSFNMNAHKWFLTNFDCSLLWVKDQDSLTLALSTNPEFLKNKASQANLVVDYKDWQIPLGRRFRSLKLWMVLRLYGSETLKSYIRNHIKLAKEFEQLVSQDPNFEIVTPRIFALVCFRLVPVKDEEKKCNNRNRELLDAVNSSGKLFMSHTALSGKIVLRCAIGAPLTEEKHVKEAWKIIQEEASYLLHK

SEQ ID NO: 96454 - protein, 479 aa, Arabidopsis thaliana; identical to SEQ ID NO: 88107
  peptide (1)..(479): Ceres Seq. ID no. 12733328
  misc_feature (35)..(409): Pfam Name: Pyridoxal-dependent decarboxylase conserved domain Pfam Description: Pyridoxal-dependent decarboxylase conserved
  misc_feature (1)..(479): Homolog of NCBI NO: 5911780 NR Description: tyrosine decarboxylase [Arabidopsis thaliana]
  misc_feature (1)..(479): Homolog of NCBI NO: 25290992 NR Description: probable tyrosine decarboxylase [imported] - thaliana >gi|4512701|gb|AAD21754.1| putative tyrosine
  misc_feature (1)..(383): Homolog of NCBI NO: 5911778 NR Description: tyrosine decarboxylase [Arabidopsis thaliana]
  misc_feature (1)..(474): Homolog of NCBI NO: 15235393 NR Description: aromatic amino-acid decarboxylase - like protein;
  misc_feature (1)..(410): Homolog of NCBI NO: 12620328 NR Description: tyrosine/dopa decarboxylase [Thalictrum flavum
  misc_feature (414)..(477): Homolog of NCBI NO: 12620328 NR Description: tyrosine/dopa decarboxylase [Thalictrum flavum
  misc_feature (1)..(477): Homolog of NCBI NO: 3282527 NR Description: tyrosine/dopa decarboxylase [Papaver somniferum]
  misc_feature (1)..(477): Homolog of NCBI NO: 169673 NR Description: tyrosine decarboxylase >gi|169675|gb|AAA33862.1|
  misc_feature (1)..(477): Homolog of NCBI NO: 1174829 NR Description: TYROSINE DECARBOXYLASE 3
  misc_feature (1)..(477): Homolog of NCBI NO: 1174830 NR Description: TYROSINE DECARBOXYLASE 4

SEQ ID NO: 96455 - protein, 467 aa, Arabidopsis thaliana; identical to SEQ ID NO: 88108
  peptide (1)..(467): Ceres Seq. ID no. 12733329
  misc_feature (23)..(397): Pfam Name: Pyridoxal-dependent decarboxylase conserved domain Pfam Description: Pyridoxal-dependent decarboxylase conserved
  misc_feature (1)..(467): Homolog of NCBI NO: 5911780 NR Description: tyrosine decarboxylase [Arabidopsis thaliana]
  misc_feature (1)..(467): Homolog of NCBI NO: 25290992 NR Description: probable tyrosine decarboxylase [imported] - thaliana >gi|4512701|gb|AAD21754.1| putative tyrosine
  misc_feature (1)..(371): Homolog of NCBI NO: 5911778 NR Description: tyrosine decarboxylase [Arabidopsis thaliana]
  misc_feature (1)..(462): Homolog of NCBI NO: 15235393 NR Description: aromatic amino-acid decarboxylase - like protein;
  misc_feature (1)..(398): Homolog of NCBI NO: 12620328 NR Description: tyrosine/dopa decarboxylase [Thalictrum flavum
  misc_feature (402)..(465): Homolog of NCBI NO: 12620328 NR Description: tyrosine/dopa decarboxylase [Thalictrum flavum
  misc_feature (1)..(465): Homolog of NCBI NO: 3282527 NR Description: tyrosine/dopa decarboxylase [Papaver somniferum]
  misc_feature (1)..(465): Homolog of NCBI NO: 169673 NR Description: tyrosine decarboxylase >gi|169675|gb|AAA33862.1|
  misc_feature (1)..(465): Homolog of NCBI NO: 1174829 NR Description: TYROSINE DECARBOXYLASE 3
  misc_feature (1)..(465): Homolog of NCBI NO: 1174830 NR Description: TYROSINE DECARBOXYLASE 4

SEQ ID NO: 96456 - DNA, 1803 bp, Arabidopsis thaliana
  misc_feature (1)..(1803): Ceres Seq. ID no. 12733333
  misc_feature: MA Experiment ID: 20000213 Result: Up-regulated in Transcription
  misc_feature: MA Experiment 20000213 PARAMETER Experiment Name: At_4deg_Cold_P Parameter: Timepoint (hr) Value: 2
  misc_feature: MA Experiment ID: 20000227 Result: Up-regulated in Transcription
  misc_feature: MA Experiment 20000227 PARAMETER Experiment Name: At_Root-Tips-vs-Tops_P Parameter: Tissue Value: Root Tips vs. Root Tops
  misc_feature: MA Experiment ID: 20000234 Result: Up-regulated in Transcription
  misc_feature: MA Experiment 20000234 PARAMETER Experiment Name: At_Siliques_P Parameter: Age (day) Value: 21
  misc_feature: MA Experiment 20000234 PARAMETER Experiment Name: At_Siliques_P Parameter: Organism Value: A. thaliana
  misc_feature: MA Experiment 20000234 PARAMETER Experiment Name: At_Siliques_P Parameter: Plant Line Value: WS
  misc_feature: MA Experiment 20000234 PARAMETER Experiment Name: At_Siliques_P Parameter: Tissue Value: Less Than 5mm Siliques vs. Whole Plant
atggagaagggaaatggaaaaaatcagactaatcgaatctgtttgttggttgctttgtcactctttttctgggcattgttgttgtacttccattttgttgtcttagggactagtaacattgataaacagctccaattgcaacctagttatgctcaatctcagccatcatcagtctctcttcgtgttgataaattccctatagagcctcatgcagctccatcgaaaccacctcccaaagagcctttagttactatcgataagccaatactccctcctgcaccagtagccaattctagttccacctttaagccacctagaattgttgagagcgggaagaaacaggagttttcgtttataagagccttgaagacagtagacaacaagagtgacccttgtggagggaagtacatttatgttcacaatctaccctcaaagttcaatgaggatatgcttagagactgtaagaagcttagtctctggactaacatgtgtaagttcacaaccaatgctggccttgggccgccgcttgagaatgttgaaggtgtcttctctgatgaaggttggtatgcgactaatcagtttgctgttgatgtgatattcagcaaccggatgaagcagtacaaatgtttgacaaatgattcttcccttgctgctgccatctttgtgccgttctatgctggattcgacattgctaggtatctgtggggatacaatatctcgagaagggatgctgcttcgcttgagttggtcgattggctcatgaagcggcctgagtgggatataatgaggggaaaagatcatttccttgtggcgggtaggataacgtgggattttaggagattgtctgaagaagaaactgattggggcaacaagcttctcttcttaccggctgccaagaacatgtctatgcttgtggttgagtcgagcccatggaatgctaatgattttgggatcccgtacccaacctacttccacccagcaaaggactcagaggtttttgaatggcaagaccggatgagaaacctggaaaggaagtggcttttctcgtttgcaggagccccacgacctgacaatccgaaatctatcagagggcagatcattgatcaatgtcgaaactcaaatgttggcaaattattagaatgcgattttggggagagcaaatgccatgcaccaagcagcattatgcaaatgtttcaaagctctctcttctgcctgcagccacagggagactcttacacccgaagatcggcatttgactcaatgcttgccggttgtataccggtcttcttccatccgggttcagcctacacgcaatacacgtggcatctacccaagaactacacaacctactcggtattcatccccgaggatgatgttcggaagagaaacataagcatcgaggagcgactcctccagattccagccaagcaggtcaagataatgagagagaatgtcatcaacctcatcccaaggctgatctacgcagacccgagatcagaactggagacgcagaaagatgcatttgatgtctcggtacaggctgtgatagacaaggtgactcggttaaggaagaacatgatcgagggccgaaccgagtatgactacttcgtggaggagaacagctggaagtatgcgttgctggaggaaggccaacgggaagcagggggccatgtgtgggacccgttcttctccaaaccaaagcccggagaagatggcagcagcgatggtaatggaggcacgactatttcagcagatgcagctaagaattcatggaagagtgagcagagagataagacacagtga

SEQ ID NO: 96457 - protein, 600 aa, Arabidopsis thaliana
  peptide (1)..(600): Ceres Seq. ID no. 12733334
  misc_feature (137)..(485): Pfam Name: Exostosin family Pfam Description: Exostosin family
  misc_feature (1)..(596): Homolog of NCBI NO: 27497206 NR Description: Unknown protein [Oryza sativa (japonica
  misc_feature (49)..(564): Homolog of NCBI NO: 37535066 NR Description: hypothetical protein [Oryza sativa (japonica group)] >gi|22165082|gb|AAM93699.1| hypothetical protein [Oryza
  misc_feature (118)..(564): Homolog of NCBI NO: 37535064 NR Description: putative exostosin family protein [Oryza sativa
  misc_feature (132)..(526): Homolog of NCBI NO: 27497204 NR Description: Hypothetical protein [Oryza sativa (japonica
  misc_feature (95)..(566): Homolog of NCBI NO: 15227020 NR Description: hypothetical protein; protein id: At2g29040.1
  misc_feature (126)..(523): Homolog of NCBI NO: 27497203 NR Description: Hypothetical protein [Oryza sativa (japonica
  misc_feature (100)..(551): Homolog of NCBI NO: 29824391 NR Description: unknown protein [Arabidopsis thaliana]
  misc_feature (117)..(562): Homolog of NCBI NO: 37535048 NR Description: hypothetical protein [Oryza sativa (japonica group)] >gi|14140285|gb|AAK54291.1| hypothetical protein [Oryza
  misc_feature (119)..(543): Homolog of NCBI NO: 15225735 NR Description: hypothetical protein; protein id: At2g32750.1
  misc_feature (130)..(530): Homolog of NCBI NO: 37535054 NR Description: hypothetical protein [Oryza sativa (japonica group)] >gi|14140279|gb|AAK54285.1| hypothetical protein [Oryza
MEKGNGKNQTNRICLLVALSLFFWALLLYFHFVVLGTSNIDKQLQLQPSYAQSQPSSVSLRVDKFPIEPHAAPSKPPPKEPLVTIDKPILPPAPVANSSSTFKPPRIVESGKKQEFSFIRALKTVDNKSDPCGGKYIYVHNLPSKFNEDMLRDCKKLSLWTNMCKFTTNAGLGPPLENVEGVFSDEGWYATNQFAVDVIFSNRMKQYKCLTNDSSLAAAIFVPFYAGFDIARYLWGYNISRRDAASLELVDWLMKRPEWDIMRGKDHFLVAGRITWDFRRLSEEETDWGNKLLFLPAAKNMSMLVVESSPWNANDFGIPYPTYFHPAKDSEVFEWQDRMRNLERKWLFSFAGAPRPDNPKSIRGQIIDQCRNSNVGKLLECDFGESKCHAPSSIMQMFQSSLFCLQPQGDSYTRRSAFDSMLAGCIPVFFHPGSAYTQYTWHLPKNYTTYSVFIPEDDVRKRNISIEERLLQIPAKQVKIMRENVINLIPRLIYADPRSELETQKDAFDVSVQAVIDKVTRLRKNMIEGRTEYDYFVEENSWKYALLEEGQREAGGHVWDPFFSKPKPGEDGSSDGNGGTTISADAAKNSWKSEQRDKTQ

SEQ ID NO: 96458 - protein, 451 aa, Arabidopsis thaliana
  peptide (1)..(451): Ceres Seq. ID no. 12733335
  misc_feature (1)..(336): Pfam Name: Exostosin family Pfam Description: Exostosin family
  misc_feature (1)..(447): Homolog of NCBI NO: 27497206 NR Description: Unknown protein [Oryza sativa (japonica
  misc_feature (1)..(415): Homolog of NCBI NO: 37535066 NR Description: hypothetical protein [Oryza sativa (japonica group)] >gi|22165082|gb|AAM93699.1| hypothetical protein [Oryza
  misc_feature (1)..(415): Homolog of NCBI NO: 37535064 NR Description: putative exostosin family protein [Oryza sativa
  misc_feature (1)..(377): Homolog of NCBI NO: 27497204 NR Description: Hypothetical protein [Oryza sativa (japonica
  misc_feature (1)..(417): Homolog of NCBI NO: 15227020 NR Description: hypothetical protein; protein id: At2g29040.1
  misc_feature (1)..(374): Homolog of NCBI NO: 27497203 NR Description: Hypothetical protein [Oryza sativa (japonica
  misc_feature (1)..(402): Homolog of NCBI NO: 29824391 NR Description: unknown protein [Arabidopsis thaliana]
  misc_feature (1)..(413): Homolog of NCBI NO: 37535048 NR Description: hypothetical protein [Oryza sativa (japonica group)] >gi|14140285|gb|AAK54291.1| hypothetical protein [Oryza
  misc_feature (1)..(394): Homolog of NCBI NO: 15225735 NR Description: hypothetical protein; protein id: At2g32750.1
  misc_feature (1)..(381): Homolog of NCBI NO: 37535054 NR Description: hypothetical protein [Oryza sativa (japonica group)] >gi|14140279|gb|AAK54285.1| hypothetical protein [Oryza
MLRDCKKLSLWTNMCKFTTNAGLGPPLENVEGVFSDEGWYATNQFAVDVIFSNRMKQYKCLTNDSSLAAAIFVPFYAGFDIARYLWGYNISRRDAASLELVDWLMKRPEWDIMRGKDHFLVAGRITWDFRRLSEEETDWGNKLLFLPAAKNMSMLVVESSPWNANDFGIPYPTYFHPAKDSEVFEWQDRMRNLERKWLFSFAGAPRPDNPKSIRGQIIDQCRNSNVGKLLECDFGESKCHAPSSIMQMFQSSLFCLQPQGDSYTRRSAFDSMLAGCIPVFFHPGSAYTQYTWHLPKNYTTYSVFIPEDDVRKRNISIEERLLQIPAKQVKIMRENVINLIPRLIYADPRSELETQKDAFDVSVQAVIDKVTRLRKNMIEGRTEYDYFVEENSWKYALLEEGQREAGGHVWDPFFSKPKPGEDGSSDGNGGTTISADAAKNSWKSEQRDKTQ

SEQ ID NO: 96459 - protein, 438 aa, Arabidopsis thaliana
  peptide (1)..(438): Ceres Seq. ID no. 12733336
  misc_feature (1)..(323): Pfam Name: Exostosin family Pfam Description: Exostosin family
  misc_feature (1)..(434): Homolog of NCBI NO: 27497206 NR Description: Unknown protein [Oryza sativa (japonica
  misc_feature (1)..(402): Homolog of NCBI NO: 37535066 NR Description: hypothetical protein [Oryza sativa (japonica group)] >gi|22165082|gb|AAM93699.1| hypothetical protein [Oryza
  misc_feature (1)..(402): Homolog of NCBI NO: 37535064 NR Description: putative exostosin family protein [Oryza sativa
  misc_feature (1)..(364): Homolog of NCBI NO: 27497204 NR Description: Hypothetical protein [Oryza sativa (japonica
  misc_feature (1)..(404): Homolog of NCBI NO: 15227020 NR Description: hypothetical protein; protein id: At2g29040.1
  misc_feature (1)..(361): Homolog of NCBI NO: 27497203 NR Description: Hypothetical protein [Oryza sativa (japonica
  misc_feature (1)..(389): Homolog of NCBI NO: 29824391 NR Description: unknown protein [Arabidopsis thaliana]
  misc_feature (1)..(400): Homolog of NCBI NO: 37535048 NR Description: hypothetical protein [Oryza sativa (japonica group)] >gi|14140285|gb|AAK54291.1| hypothetical protein [Oryza
  misc_feature (1)..(381): Homolog of NCBI NO: 15225735 NR Description: hypothetical protein; protein id: At2g32750.1
  misc_feature (1)..(368): Homolog of NCBI NO: 37535054 NR Description: hypothetical protein [Oryza sativa (japonica group)] >gi|14140279|gb|AAK54285.1| hypothetical protein [Oryza
MCKFTTNAGLGPPLENVEGVFSDEGWYATNQFAVDVIFSNRMKQYKCLTNDSSLAAAIFVPFYAGFDIARYLWGYNISRRDAASLELVDWLMKRPEWDIMRGKDHFLVAGRITWDFRRLSEEETDWGNKLLFLPAAKNMSMLVVESSPWNANDFGIPYPTYFHPAKDSEVFEWQDRMRNLERKWLFSFAGAPRPDNPKSIRGQIIDQCRNSNVGKLLECDFGESKCHAPSSIMQMFQSSLFCLQPQGDSYTRRSAFDSMLAGCIPVFFHPGSAYTQYTWHLPKNYTTYSVFIPEDDVRKRNISIEERLLQIPAKQVKIMRENVINLIPRLIYADPRSELETQKDAFDVSVQAVIDKVTRLRKNMIEGRTEYDYFVEENSWKYALLEEGQREAGGHVWDPFFSKPKPGEDGSSDGNGGTTISADAAKNSWKSEQRDKTQ

SEQ ID NO: 96460 - DNA, 1791 bp, Arabidopsis thaliana
  misc_feature (1)..(1791): Ceres Seq. ID no. 12733341
  misc_feature: MA Experiment ID: 20000265 Result: Up-regulated in Transcription
  misc_feature: MA Experiment 20000265 PARAMETER Experiment Name: At_Open_Flower_P Parameter: Age (day) Value: 21
  misc_feature: MA Experiment 20000265 PARAMETER Experiment Name: At_Open_Flower_P Parameter: Plant Line Value: WS
  misc_feature: MA Experiment 20000265 PARAMETER Experiment Name: At_Open_Flower_P Parameter: Tissue Value: Closed Flower vs. Whole Plant
  misc_feature: MA Experiment ID: 20000286 Result: Up-regulated in Transcription
  misc_feature: MA Experiment 20000286 PARAMETER Experiment Name: At_Open_Flower_P Parameter: Age (day) Value: 21
  misc_feature: MA Experiment 20000286 PARAMETER Experiment Name: At_Open_Flower_P Parameter: Plant Line Value: WS
  misc_feature: MA Experiment 20000286 PARAMETER Experiment Name: At_Open_Flower_P Parameter: Tissue Value: Half Open vs. Whole Plant
atggattctgcaaagggttggtttcagaagcggcagatgcgtggaggatccagatataaaggtgcttcaggtggtgctggtggaggtggaagtaatggctctgccgatgagcacaacgtcgaaactgatgaagaagctgtttcaaacactaccaaacagaaagttgcagcagctaaacagtacattgagaatcattacaaagagcagatgaagattctacaagagaggaaagaaaggcgaagcatgttagagcagaaactggcagatgctgacgtgtctgaagaagatcaaaataatcttctcaagtttttagagaagaaggagacagagtacatgcgccttcaacgccataagttaggtgttgctgattttgatttgcttacaatgattgggaaaggtgcatttggggaggttagagtttgtagagaaaagacgacaggtcaagtttatgcaatgaaaaagctcaagaaggctgagatgcttcgcagaggccaggttgaacatgtgagagcagagaggaacttacttgcggaagtggacagtaactacatagtgaagctctactgttcatttcaagacgatgaccatctttaccttgtgatggagtatttgcctggtggagatatgatgactcttcttatgcgcaaagatactttgacagaagaggaggccaagttctatgtcgctgagacagttctcgctatcgagtccatccacaggcacaattacatccacagggatatcaagccagacaacttgctgcttgacagatatgggcatctaagactttcagattttggattgtgtaaacctttggactgcagtgccattggagaaaacgatttttcaaacaattccaatggatctacggagcaagaggctggatcaactgctccaaaacgcacacagcaggaacaacttgaacattggcagaggaacaggagaacgctagcttattccacagttggcacaccagattacatagctccagaagttctgttgaagaaaggctatgggatggagtgtgactggtggtctcttggtgctataatgtacgaaatgctagtaggatatccgccgttttattcagatgatcctatgtcaacctgtagaaagatagtaaactggaaaagtcatttgaagtttccagaggaagcaatattgtcaagggaagcaaaggatcttattaacagtctgttgtgcagtgtcagacgtaggcttggttccaaaggtgctgatgaattaaaggctcatacatggtttgaaactgttgattgggatacaatattcgatatggatgcagcttttgttccagaggtcaatgacgatttagacactcagaattttgagaagtttgacgagtctgaatcggaaactcagacatcatccaagtctggcccgtggaggaagatgttgtcgtcaaaagacataaacttcgtagggtatacatacaagaactttgagattgttaatgattaccaagttcctggaatgggtacacacttacttgatcactgcggagttgaagaagaagaaaaagtcgacgcgaccaatggtcaagtcactcttcggtacccaacaacctcgtttactggtccaaaatttggctatttccatgtgaatcttgaatataatggatcatcggagacctcagattcatcggaaacaacgtcgagaccgccttgtgatcgacctcctcctgctcctccggttgttcagggaagctttctgaaacttctaccaccagaacttgaagtgagaccaaagcaagaaggatctgaagcttgctaa

SEQ ID NO: 96461 - protein, 596 aa, Arabidopsis thaliana
  peptide (1)..(596): Ceres Seq. ID no. 12733342
  misc_feature (124)..(421): Pfam Name: Protein kinase domain Pfam Description: Protein kinase domain
  misc_feature (1)..(498): Homolog of NCBI NO: 7339534 NR Description: protein kinase MK6 [Mesembryanthemum crystallinum]
  misc_feature (1)..(498): Homolog of NCBI NO: 15219591 NR Description: putative protein kinase; protein id: At1g03920.1,
  misc_feature (1)..(498): Homolog of NCBI NO: 25287691 NR Description: hypothetical protein [imported] - Arabidopsis >gi|4204296|gb|AAD10677.1| putative protien kinase [Arabidopsis
  misc_feature (1)..(498): Homolog of NCBI NO: 1076632 NR Description: protein kinase PKTL7 (EC 2.7.1.-) - common
  misc_feature (1)..(498): Homolog of NCBI NO: 22331282 NR Description: putative protein kinase; protein id: At3g23310.1, by cDNA: gi_20465360 [Arabidopsis thaliana] protein kinase [Arabidopsis thaliana] >gi|17381026|gb|AAL36325.1|
  misc_feature (1)..(498): Homolog of NCBI NO: 37535354 NR Description: putative protein kinase [Oryza sativa (japonica group)] >gi|13129502|gb|AAK13156.1| putative protein kinase
  misc_feature (1)..(498): Homolog of NCBI NO: 30682806 NR Description: protein kinase [Arabidopsis thaliana] protein kinase [Arabidopsis thaliana] >gi|22135803|gb|AAM91088.1| [Arabidopsis thaliana] >gi|23308449|gb|AAN18194.1|
  misc_feature (85)..(498): Homolog of NCBI NO: 541816 NR Description: protein kinase (EC 2.7.1.-) - common ice plant
  misc_feature (82)..(498): Homolog of NCBI NO: 7446413 NR Description: probable protein kinase - Arabidopsis thaliana
  misc_feature (82)..(498): Homolog of NCBI NO: 25287694 NR Description: protein kinase [imported] - Arabidopsis thaliana protein kinase [Arabidopsis thaliana] >gi|7268140|emb|CAB78477.1|
MDSAKGWFQKRQMRGGSRYKGASGGAGGGGSNGSADEHNVETDEEAVSNTTKQKVAAAKQYIENHYKEQMKILQERKERRSMLEQKLADADVSEEDQNNLLKFLEKKETEYMRLQRHKLGVADFDLLTMIGKGAFGEVRVCREKTTGQVYAMKKLKKAEMLRRGQVEHVRAERNLLAEVDSNYIVKLYCSFQDDDHLYLVMEYLPGGDMMTLLMRKDTLTEEEAKFYVAETVLAIESIHRHNYIHRDIKPDNLLLDRYGHLRLSDFGLCKPLDCSAIGENDFSNNSNGSTEQEAGSTAPKRTQQEQLEHWQRNRRTLAYSTVGTPDYIAPEVLLKKGYGMECDWWSLGAIMYEMLVGYPPFYSDDPMSTCRKIVNWKSHLKFPEEAILSREAKDLINSLLCSVRRRLGSKGADELKAHTWFETVDWDTIFDMDAAFVPEVNDDLDTQNFEKFDESESETQTSSKSGPWRKMLSSKDINFVGYTYKNFEIVNDYQVPGMGTHLLDHCGVEEEEKVDATNGQVTLRYPTTSFTGPKFGYFHVNLEYNGSSETSDSSETTSRPPCDRPPPAPPVVQGSFLKLLPPELEVRPKQEGSEAC

SEQ ID NO: 96462 - protein, 584 aa, Arabidopsis thaliana
  peptide (1)..(584): Ceres Seq. ID no. 12733343
  misc_feature (112)..(409): Pfam Name: Protein kinase domain Pfam Description: Protein kinase domain
  misc_feature (1)..(486): Homolog of NCBI NO: 7339534 NR Description: protein kinase MK6 [Mesembryanthemum crystallinum]
  misc_feature (1)..(486): Homolog of NCBI NO: 15219591 NR Description: putative protein kinase; protein id: At1g03920.1,
  misc_feature (1)..(486): Homolog of NCBI NO: 25287691 NR Description: hypothetical protein [imported] - Arabidopsis >gi|4204296|gb|AAD10677.1| putative protien kinase [Arabidopsis
  misc_feature (1)..(486): Homolog of NCBI NO: 1076632 NR Description: protein kinase PKTL7 (EC 2.7.1.-) - common
  misc_feature (1)..(486): Homolog of NCBI NO: 22331282 NR Description: putative protein kinase; protein id: At3g23310.1, by cDNA: gi_20465360 [Arabidopsis thaliana] protein kinase [Arabidopsis thaliana] >gi|17381026|gb|AAL36325.1|
  misc_feature (1)..(486): Homolog of NCBI NO: 37535354 NR Description: putative protein kinase [Oryza sativa (japonica group)] >gi|13129502|gb|AAK13156.1| putative protein kinase
  misc_feature (1)..(486): Homolog of NCBI NO: 30682806 NR Description: protein kinase [Arabidopsis thaliana] protein kinase [Arabidopsis thaliana] >gi|22135803|gb|AAM91088.1| [Arabidopsis thaliana] >gi|23308449|gb|AAN18194.1|
  misc_feature (73)..(486): Homolog of NCBI NO: 541816 NR Description: protein kinase (EC 2.7.1.-) - common ice plant
  misc_feature (70)..(486): Homolog of NCBI NO: 7446413 NR Description: probable protein kinase - Arabidopsis thaliana
  misc_feature (70)..(486): Homolog of NCBI NO: 25287694 NR Description: protein kinase [imported] - Arabidopsis thaliana protein kinase [Arabidopsis thaliana] >gi|7268140|emb|CAB78477.1|
MRGGSRYKGASGGAGGGGSNGSADEHNVETDEEAVSNTTKQKVAAAKQYIENHYKEQMKILQERKERRSMLEQKLADADVSEEDQNNLLKFLEKKETEYMRLQRHKLGVADFDLLTMIGKGAFGEVRVCREKTTGQVYAMKKLKKAEMLRRGQVEHVRAERNLLAEVDSNYIVKLYCSFQDDDHLYLVMEYLPGGDMMTLLMRKDTLTEEEAKFYVAETVLAIESIHRHNYIHRDIKPDNLLLDRYGHLRLSDFGLCKPLDCSAIGENDFSNNSNGSTEQEAGSTAPKRTQQEQLEHWQRNRRTLAYSTVGTPDYIAPEVLLKKGYGMECDWWSLGAIMYEMLVGYPPFYSDDPMSTCRKIVNWKSHLKFPEEAILSREAKDLINSLLCSVRRRLGSKGADELKAHTWFETVDWDTIFDMDAAFVPEVNDDLDTQNFEKFDESESETQTSSKSGPWRKMLSSKDINFVGYTYKNFEIVNDYQVPGMGTHLLDHCGVEEEEKVDATNGQVTLRYPTTSFTGPKFGYFHVNLEYNGSSETSDSSETTSRPPCDRPPPAPPVVQGSFLKLLPPELEVRPKQEGSEAC

SEQ ID NO: 96463 - protein, 527 aa, Arabidopsis thaliana
  peptide (1)..(527): Ceres Seq. ID no. 12733344
  misc_feature (55)..(352): Pfam Name: Protein kinase domain Pfam Description: Protein kinase domain
  misc_feature (1)..(429): Homolog of NCBI NO: 7339534 NR Description: protein kinase MK6 [Mesembryanthemum crystallinum]
  misc_feature (1)..(429): Homolog of NCBI NO: 15219591 NR Description: putative protein kinase; protein id: At1g03920.1,
  misc_feature (1)..(429): Homolog of NCBI NO: 25287691 NR Description: hypothetical protein [imported] - Arabidopsis >gi|4204296|gb|AAD10677.1| putative protien kinase [Arabidopsis
  misc_feature (1)..(429): Homolog of NCBI NO: 1076632 NR Description: protein kinase PKTL7 (EC 2.7.1.-) - common
  misc_feature (1)..(429): Homolog of NCBI NO: 22331282 NR Description: putative protein kinase; protein id: At3g23310.1, by cDNA: gi_20465360 [Arabidopsis thaliana] protein kinase [Arabidopsis thaliana] >gi|17381026|gb|AAL36325.1|
  misc_feature (1)..(429): Homolog of NCBI NO: 37535354 NR Description: putative protein kinase [Oryza sativa (japonica group)] >gi|13129502|gb|AAK13156.1| putative protein kinase
  misc_feature (1)..(429): Homolog of NCBI NO: 30682806 NR Description: protein kinase [Arabidopsis thaliana] protein kinase [Arabidopsis thaliana] >gi|22135803|gb|AAM91088.1| [Arabidopsis thaliana] >gi|23308449|gb|AAN18194.1|
  misc_feature (16)..(429): Homolog of NCBI NO: 541816 NR Description: protein kinase (EC 2.7.1.-) - common ice plant
  misc_feature (13)..(429): Homolog of NCBI NO: 7446413 NR Description: probable protein kinase - Arabidopsis thaliana
  misc_feature (13)..(429): Homolog of NCBI NO: 25287694 NR Description: protein kinase [imported] - Arabidopsis thaliana protein kinase [Arabidopsis thaliana] >gi|7268140|emb|CAB78477.1|
MKILQERKERRSMLEQKLADADVSEEDQNNLLKFLEKKETEYMRLQRHKLGVADFDLLTMIGKGAFGEVRVCREKTTGQVYAMKKLKKAEMLRRGQVEHVRAERNLLAEVDSNYIVKLYCSFQDDDHLYLVMEYLPGGDMMTLLMRKDTLTEEEAKFYVAETVLAIESIHRHNYIHRDIKPDNLLLDRYGHLRLSDFGLCKPLDCSAIGENDFSNNSNGSTEQEAGSTAPKRTQQEQLEHWQRNRRTLAYSTVGTPDYIAPEVLLKKGYGMECDWWSLGAIMYEMLVGYPPFYSDDPMSTCRKIVNWKSHLKFPEEAILSREAKDLINSLLCSVRRRLGSKGADELKAHTWFETVDWDTIFDMDAAFVPEVNDDLDTQNFEKFDESESETQTSSKSGPWRKMLSSKDINFVGYTYKNFEIVNDYQVPGMGTHLLDHCGVEEEEKVDATNGQVTLRYPTTSFTGPKFGYFHVNLEYNGSSETSDSSETTSRPPCDRPPPAPPVVQGSFLKLLPPELEVRPKQEGSEAC

SEQ ID NO: 96464 - DNA, 744 bp, Arabidopsis thaliana
  misc_feature (1)..(744): Ceres Seq. ID no. 12733355
  misc_feature: MA Experiment ID: 20000180 Result: Up-regulated in Transcription
  misc_feature: MA Experiment 20000180 PARAMETER Experiment Name: At_Germinating_Seeds_P Parameter: Age (hr) Value: 24 vs. 0
  misc_feature: MA Experiment 20000180 PARAMETER Experiment Name: At_Germinating_Seeds_P Parameter: Tissue Value: Germinating Seeds
  misc_feature: MA Experiment ID: 20000527 Result: Down-regulated in Transcription
  misc_feature: MA Experiment 20000527 PARAMETER Experiment Name: At_10percent_PEG_P Parameter: Age (day) Value: 20
  misc_feature: MA Experiment 20000527 PARAMETER Experiment Name: At_10percent_PEG_P Parameter: Organism Value: A. thaliana
  misc_feature: MA Experiment 20000527 PARAMETER Experiment Name: At_10percent_PEG_P Parameter: Plant Line Value: WS
  misc_feature: MA Experiment 20000527 PARAMETER Experiment Name: At_10percent_PEG_P Parameter: Timepoint (day) Value: 20
  misc_feature: MA Experiment 20000527 PARAMETER Experiment Name: At_10percent_PEG_P Parameter: Tissue Value: Whole Plant
  misc_feature: MA Experiment 20000527 PARAMETER Experiment Name: At_10percent_PEG_P Parameter: Treatment Value: 10percent PEG vs. No Treatment
atgtcctcgtcactattctcttatgttgtcctcttaatcttccttttcaccatcccatacattcaaagccagcccactgctccagctccaaccactgaaaaaagtcccatcaatctcacagcgattcttgaagctggtcaccaatttaccacattaatacaactcctcaacacaactcaagtcgggtttcaggtaagtgtacaactcaatagctctgaccaagggatgactatatttgccccaacagataacgcattcaacaagcttaaacccggaaccctaaacagtctgacatatcaacaacaaatccagctcatgctctaccatatcattccaaaatactactctctaagcgatcttctcttagcaagtaatcccgttagaactcaggctacgggacaagacggaggtgtttttgggttaaatttcacaggacaagcacaaagcaaccaagtgaatgtttccaccggtgttgttgagactcggatcaataatgcattaaggcaacagtttcctctagcagtttacgtggtggacagtgtgttgttgccggaggagttattcggaacaaagaccactcccaccggagctcctgccccgaaatcctcaacttcatcgtctgatgccgattctccagctgctgatgatgagcacaaatctgccggatcaagcgtgaagaggacaagtctagggattgttgttagctttgcattgttttgttgctcggttatatatattgcttga

SEQ ID NO: 96465 - protein, 247 aa, Arabidopsis thaliana
  peptide (1)..(247): Ceres Seq. ID no. 12733356
  misc_feature (41)..(184): Pfam Name: Fasciclin domain Pfam Description: Fasciclin domain
  misc_feature (1)..(247): Homolog of NCBI NO: 18399381 NR Description: fasciclin-like arabinogalactan-protein (FLA6); id: At2g20520.1, supported by cDNA: gi_13377779 [Arabidopsis
  misc_feature (25)..(247): Homolog of NCBI NO: 25350183 NR Description: probable surface protein [imported] - Arabidopsis
  misc_feature (23)..(245): Homolog of NCBI NO: 18379157 NR Description: fasciclin-like arabinogalactan-protein (FLA9); id: At1g03870.1, supported by cDNA: 39763., supported by cDNA: [Arabidopsis thaliana] >gi|25350180|pir||D86169 hypothetical
  misc_feature (23)..(245): Homolog of NCBI NO: 24417458 NR Description: unknown [Arabidopsis thaliana]
  misc_feature (9)..(240): Homolog of NCBI NO: 15241423 NR Description: fasciclin-like arabinogalactan-protein, putative protein id: At5g44130.1, supported by cDNA: gi_16648846, by cDNA: gi_20466118 [Arabidopsis thaliana]
  misc_feature (9)..(246): Homolog of NCBI NO: 34910950 NR Description: putative arabinogalactan-like protein [Oryza
  misc_feature (13)..(247): Homolog of NCBI NO: 2129473 NR Description: arabinogalactan-like protein - loblolly pine
  misc_feature (2)..(231): Homolog of NCBI NO: 15242651 NR Description: fasciclin-like arabinogalactan-protein (FLA11); id: At5g03170.1, supported by cDNA: 14950., supported by cDNA:
  misc_feature (2)..(231): Homolog of NCBI NO: 21553523 NR Description: arabinogalactan protein-like [Arabidopsis
  misc_feature (8)..(247): Homolog of NCBI NO: 15239344 NR Description: fasciclin-like arabinogalactan-protein (FLA12); id: At5g60490.1, supported by cDNA: 15239., supported by cDNA:
MSSSLFSYVVLLIFLFTIPYIQSQPTAPAPTTEKSPINLTAILEAGHQFTTLIQLLNTTQVGFQVSVQLNSSDQGMTIFAPTDNAFNKLKPGTLNSLTYQQQIQLMLYHIIPKYYSLSDLLLASNPVRTQATGQDGGVFGLNFTGQAQSNQVNVSTGVVETRINNALRQQFPLAVYVVDSVLLPEELFGTKTTPTGAPAPKSSTSSSDADSPAADDEHKSAGSSVKRTSLGIVVSFALFCCSVIYIA

SEQ ID NO: 96466 - protein, 172 aa, Arabidopsis thaliana
  peptide (1)..(172): Ceres Seq. ID no. 12733357
  misc_feature (1)..(109): Pfam Name: Fasciclin domain Pfam Description: Fasciclin domain
  misc_feature (1)..(172): Homolog of NCBI NO: 18399381 NR Description: fasciclin-like arabinogalactan-protein (FLA6); id: At2g20520.1, supported by cDNA: gi_13377779 [Arabidopsis
  misc_feature (1)..(172): Homolog of NCBI NO: 25350183 NR Description: probable surface protein [imported] - Arabidopsis
  misc_feature (1)..(170): Homolog of NCBI NO: 18379157 NR Description: fasciclin-like arabinogalactan-protein (FLA9); id: At1g03870.1, supported by cDNA: 39763., supported by cDNA: [Arabidopsis thaliana] >gi|25350180|pir||D86169 hypothetical
  misc_feature (1)..(170): Homolog of NCBI NO: 24417458 NR Description: unknown [Arabidopsis thaliana]
  misc_feature (1)..(165): Homolog of NCBI NO: 15241423 NR Description: fasciclin-like arabinogalactan-protein, putative protein id: At5g44130.1, supported by cDNA: gi_16648846, by cDNA: gi_20466118 [Arabidopsis thaliana]
  misc_feature (1)..(171): Homolog of NCBI NO: 34910950 NR Description: putative arabinogalactan-like protein [Oryza
  misc_feature (1)..(172): Homolog of NCBI NO: 2129473 NR Description: arabinogalactan-like protein - loblolly pine
  misc_feature (1)..(156): Homolog of NCBI NO: 15242651 NR Description: fasciclin-like arabinogalactan-protein (FLA11); id: At5g03170.1, supported by cDNA: 14950., supported by cDNA:
  misc_feature (1)..(156): Homolog of NCBI NO: 21553523 NR Description: arabinogalactan protein-like [Arabidopsis
  misc_feature (1)..(172): Homolog of NCBI NO: 15239344 NR Description: fasciclin-like arabinogalactan-protein (FLA12); id: At5g60490.1, supported by cDNA: 15239., supported by cDNA:
MTIFAPTDNAFNKLKPGTLNSLTYQQQIQLMLYHIIPKYYSLSDLLLASNPVRTQATGQDGGVFGLNFTGQAQSNQVNVSTGVVETRINNALRQQFPLAVYVVDSVLLPEELFGTKTTPTGAPAPKSSTSSSDADSPAADDEHKSAGSSVKRTSLGIVVSFALFCCSVIYIA

SEQ ID NO: 96467 - protein, 142 aa, Arabidopsis thaliana
  peptide (1)..(142): Ceres Seq. ID no. 12733358
  misc_feature (1)..(79): Pfam Name: Fasciclin domain Pfam Description: Fasciclin domain
  misc_feature (1)..(142): Homolog of NCBI NO: 18399381 NR Description: fasciclin-like arabinogalactan-protein (FLA6); id: At2g20520.1, supported by cDNA: gi_13377779 [Arabidopsis
  misc_feature (1)..(142): Homolog of NCBI NO: 25350183 NR Description: probable surface protein [imported] - Arabidopsis
  misc_feature (1)..(140): Homolog of NCBI NO: 18379157 NR Description: fasciclin-like arabinogalactan-protein (FLA9); id: At1g03870.1, supported by cDNA: 39763., supported by cDNA: [Arabidopsis thaliana] >gi|25350180|pir||D86169 hypothetical
  misc_feature (1)..(140): Homolog of NCBI NO: 24417458 NR Description: unknown [Arabidopsis thaliana]
  misc_feature (1)..(135): Homolog of NCBI NO: 15241423 NR Description: fasciclin-like arabinogalactan-protein, putative protein id: At5g44130.1, supported by cDNA: gi_16648846, by cDNA: gi_20466118 [Arabidopsis thaliana]
  misc_feature (1)..(141): Homolog of NCBI NO: 34910950 NR Description: putative arabinogalactan-like protein [Oryza
  misc_feature (1)..(142): Homolog of NCBI NO: 2129473 NR Description: arabinogalactan-like protein - loblolly pine
  misc_feature (1)..(126): Homolog of NCBI NO: 15242651 NR Description: fasciclin-like arabinogalactan-protein (FLA11); id: At5g03170.1, supported by cDNA: 14950., supported by cDNA:
  misc_feature (1)..(126): Homolog of NCBI NO: 21553523 NR Description: arabinogalactan protein-like [Arabidopsis
  misc_feature (1)..(142): Homolog of NCBI NO: 15239344 NR Description: fasciclin-like arabinogalactan-protein (FLA12); id: At5g60490.1, supported by cDNA: 15239., supported by cDNA:
MLYHIIPKYYSLSDLLLASNPVRTQATGQDGGVFGLNFTGQAQSNQVNVSTGVVETRINNALRQQFPLAVYVVDSVLLPEELFGTKTTPTGAPAPKSSTSSSDADSPAADDEHKSAGSSVKRTSLGIVVSFALFCCSVIYIA

SEQ ID NO: 96468 - DNA, 1473 bp, Arabidopsis thaliana
  misc_feature (1)..(1473): Ceres Seq. ID no. 12733377
  misc_feature: MA Experiment ID: 20000173 Result: Down-regulated in Transcription
  misc_feature: MA Experiment 20000173 PARAMETER Experiment Name: At_42deg_Heat_P Parameter: Age (day) Value: 14
  misc_feature: MA Experiment 20000173 PARAMETER Experiment Name: At_42deg_Heat_P Parameter: Organism Value: A. thaliana
  misc_feature: MA Experiment 20000173 PARAMETER Experiment Name: At_42deg_Heat_P Parameter: Plant Line Value: WS
  misc_feature: MA Experiment 20000173 PARAMETER Experiment Name: At_42deg_Heat_P Parameter: Temperature (deg C) Value: 42 vs. 22
  misc_feature: MA Experiment 20000173 PARAMETER Experiment Name: At_42deg_Heat_P Parameter: Timepoint (hr) Value: 6
  misc_feature: MA Experiment 20000173 PARAMETER Experiment Name: At_42deg_Heat_P Parameter: Tissue Value: Aerial
  misc_feature: MA Experiment ID: 20000180 Result: Down-regulated in Transcription
  misc_feature: MA Experiment 20000180 PARAMETER Experiment Name: At_Germinating_Seeds_P Parameter: Age (hr) Value: 24 vs. 0
  misc_feature: MA Experiment 20000180 PARAMETER Experiment Name: At_Germinating_Seeds_P Parameter: Tissue Value: Germinating Seeds
  misc_feature: MA Experiment ID: 20000227 Result: Up-regulated in Transcription
  misc_feature: MA Experiment 20000227 PARAMETER Experiment Name: At_Root-Tips-vs-Tops_P Parameter: Tissue Value: Root Tips vs. Root Tops
  misc_feature: MA Experiment ID: 20000234 Result: Up-regulated in Transcription
  misc_feature: MA Experiment 20000234 PARAMETER Experiment Name: At_Siliques_P Parameter: Age (day) Value: 21
  misc_feature: MA Experiment 20000234 PARAMETER Experiment Name: At_Siliques_P Parameter: Organism Value: A. thaliana
  misc_feature: MA Experiment 20000234 PARAMETER Experiment Name: At_Siliques_P Parameter: Plant Line Value: WS
  misc_feature: MA Experiment 20000234 PARAMETER Experiment Name: At_Siliques_P Parameter: Tissue Value: Less Than 5mm Siliques vs. Whole Plant
  misc_feature: MA Experiment ID: 20000235 Result: Up-regulated in Transcription
  misc_feature: MA Experiment 20000235 PARAMETER Experiment Name: At_Siliques_P Parameter: Age (day) Value: 21
  misc_feature: MA Experiment 20000235 PARAMETER Experiment Name: At_Siliques_P Parameter: Organism Value: A. thaliana
  misc_feature: MA Experiment 20000235 PARAMETER Experiment Name: At_Siliques_P Parameter: Plant Line Value: WS
  misc_feature: MA Experiment 20000235 PARAMETER Experiment Name: At_Siliques_P Parameter: Tissue Value: 5-10mm Siliques vs. Whole Plant
  misc_feature: MA Experiment ID: 20000264 Result: Up-regulated in Transcription
  misc_feature: MA Experiment 20000264 PARAMETER Experiment Name: At_Open_Flower_P Parameter: Age (day) Value: 21
  misc_feature: MA Experiment 20000264 PARAMETER Experiment Name: At_Open_Flower_P Parameter: Plant Line Value: WS
  misc_feature: MA Experiment 20000264 PARAMETER Experiment Name: At_Open_Flower_P Parameter: Tissue Value: Open Flower vs. Whole Plant
  misc_feature: MA Experiment ID: 20000265 Result: Up-regulated in Transcription
  misc_feature: MA Experiment 20000265 PARAMETER Experiment Name: At_Open_Flower_P Parameter: Age (day) Value: 21
  misc_feature: MA Experiment 20000265 PARAMETER Experiment Name: At_Open_Flower_P Parameter: Plant Line Value: WS
  misc_feature: MA Experiment 20000265 PARAMETER Experiment Name: At_Open_Flower_P Parameter: Tissue Value: Closed Flower vs. Whole Plant
  misc_feature: MA Experiment ID: 20000286 Result: Up-regulated in Transcription
  misc_feature: MA Experiment 20000286 PARAMETER Experiment Name: At_Open_Flower_P Parameter: Age (day) Value: 21
  misc_feature: MA Experiment 20000286 PARAMETER Experiment Name: At_Open_Flower_P Parameter: Plant Line Value: WS
  misc_feature: MA Experiment 20000286 PARAMETER Experiment Name: At_Open_Flower_P Parameter: Tissue Value: Half Open vs. Whole Plant
  misc_feature: MA Experiment ID: 20000437 Result: Down-regulated in Transcription
  misc_feature: MA Experiment 20000437 PARAMETER Experiment Name: At_Drought_P Parameter: Age (day) Value: 8
  misc_feature: MA Experiment 20000437 PARAMETER Experiment Name: At_Drought_P Parameter: Organism Value: A. thaliana
  misc_feature: MA Experiment 20000437 PARAMETER Experiment Name: At_Drought_P Parameter: Plant Line Value: WS
  misc_feature: MA Experiment 20000437 PARAMETER Experiment Name: At_Drought_P Parameter: Timepoint (hr) Value: 24
  misc_feature: MA Experiment 20000437 PARAMETER Experiment Name: At_Drought_P Parameter: Tissue Value: Whole Plant
  misc_feature: MA Experiment 20000437 PARAMETER Experiment Name: At_Drought_P Parameter: Treatment Value: Drought vs. No Drought
  misc_feature: MA Experiment ID: 20000495 Result: Up-regulated in Transcription
  misc_feature: MA Experiment 20000495 PARAMETER Experiment Name: At_Guard_Cells_P Parameter: Harvest Date Value: 8/2/2002
  misc_feature: MA Experiment 20000495 PARAMETER Experiment Name: At_Guard_Cells_P Parameter: Organism Value: A. thaliana
  misc_feature: MA Experiment 20000495 PARAMETER Experiment Name: At_Guard_Cells_P Parameter: Tissue Value: Guard Cells vs. Leaves
  misc_feature: MA Experiment ID: 20001247 Result: Down-regulated in Transcription
  misc_feature: MA Experiment 20001247 PARAMETER Experiment Name: At_Far-red-induction_P Parameter: Age (day) Value: 7
  misc_feature: MA Experiment 20001247 PARAMETER Experiment Name: At_Far-red-induction_P Parameter: Light Value: Far-red vs. White
  misc_feature: MA Experiment 20001247 PARAMETER Experiment Name: At_Far-red-induction_P Parameter: Organism Value: A. thaliana
  misc_feature: MA Experiment 20001247 PARAMETER Experiment Name: At_Far-red-induction_P Parameter: Plant Line Value: Columbia
  misc_feature: MA Experiment 20001247 PARAMETER Experiment Name: At_Far-red-induction_P Parameter: Timepoint (hr) Value: 1
  misc_feature: MA Experiment 20001247 PARAMETER Experiment Name: At_Far-red-induction_P Parameter: Tissue Value: Whole Plant
  misc_feature: MA Experiment ID: 20001450 Result: Down-regulated in Transcription
  misc_feature: MA Experiment 20001450 PARAMETER Experiment Name: At_Far-red-induction_P Parameter: Age (day) Value: 7
  misc_feature: MA Experiment 20001450 PARAMETER Experiment Name: At_Far-red-induction_P Parameter: Light Value: Far-red vs. White
  misc_feature: MA Experiment 20001450 PARAMETER Experiment Name: At_Far-red-induction_P Parameter: Organism Value: A. thaliana
  misc_feature: MA Experiment 20001450 PARAMETER Experiment Name: At_Far-red-induction_P Parameter: Plant Line Value: Columbia
  misc_feature: MA Experiment 20001450 PARAMETER Experiment Name: At_Far-red-induction_P Parameter: Timepoint (hr) Value: 8
  misc_feature: MA Experiment 20001450 PARAMETER Experiment Name: At_Far-red-induction_P Parameter: Tissue Value: Whole Plant
  misc_feature: MA Experiment ID: 20001451 Result: Down-regulated in Transcription
  misc_feature: MA Experiment 20001451 PARAMETER Experiment Name: At_Far-red-induction_P Parameter: Age (day) Value: 7
  misc_feature: MA Experiment 20001451 PARAMETER Experiment Name: At_Far-red-induction_P Parameter: Light Value: Far-red vs. White
  misc_feature: MA Experiment 20001451 PARAMETER Experiment Name: At_Far-red-induction_P Parameter: Organism Value: A. thaliana
  misc_feature: MA Experiment 20001451 PARAMETER Experiment Name: At_Far-red-induction_P Parameter: Plant Line Value: Columbia
  misc_feature: MA Experiment 20001451 PARAMETER Experiment Name: At_Far-red-induction_P Parameter: Timepoint (hr) Value: 24
  misc_feature: MA Experiment 20001451 PARAMETER Experiment Name: At_Far-red-induction_P Parameter: Tissue Value: Whole Plant
  misc_feature: MA Experiment ID: 20001556 Result: Up-regulated in Transcription
  misc_feature: MA Experiment 20001556 PARAMETER Experiment Name: At_Drought_Soil_Dry_P Parameter: Age (day) Value: 26
  misc_feature: MA Experiment 20001556 PARAMETER Experiment Name: At_Drought_Soil_Dry_P Parameter: Organism Value: A. thaliana
  misc_feature: MA Experiment 20001556 PARAMETER Experiment Name: At_Drought_Soil_Dry_P Parameter: Plant Line Value: WS
  misc_feature: MA Experiment 20001556 PARAMETER Experiment Name: At_Drought_Soil_Dry_P Parameter: Post Timepoint (hr) Value: None
  misc_feature: MA Experiment 20001556 PARAMETER Experiment Name: At_Drought_Soil_Dry_P Parameter: Post-Treatment Value: None
  misc_feature: MA Experiment 20001556 PARAMETER Experiment Name: At_Drought_Soil_Dry_P Parameter: Timepoint (day) Value: 12
  misc_feature: MA Experiment 20001556 PARAMETER Experiment Name: At_Drought_Soil_Dry_P Parameter: Treatment Value: Drought vs. No Drought
  misc_feature: MA Experiment ID: 20001557 Result: Up-regulated in Transcription
  misc_feature: MA Experiment 20001557 PARAMETER Experiment Name: At_Drought_Soil_Dry_P Parameter: Age (day) Value: 27
  misc_feature: MA Experiment 20001557 PARAMETER Experiment Name: At_Drought_Soil_Dry_P Parameter: Organism Value: A. thaliana
  misc_feature: MA Experiment 20001557 PARAMETER Experiment Name: At_Drought_Soil_Dry_P Parameter: Plant Line Value: WS
  misc_feature: MA Experiment 20001557 PARAMETER Experiment Name: At_Drought_Soil_Dry_P Parameter: Post Timepoint (hr) Value: 3
  misc_feature: MA Experiment 20001557 PARAMETER Experiment Name: At_Drought_Soil_Dry_P Parameter: Post-Treatment Value: Re-Water vs. No Drought
  misc_feature: MA Experiment 20001557 PARAMETER Experiment Name: At_Drought_Soil_Dry_P Parameter: Timepoint (day) Value: 13
  misc_feature: MA Experiment 20001557 PARAMETER Experiment Name: At_Drought_Soil_Dry_P Parameter: Treatment Value: Drought vs. No Drought
  misc_feature: MA Experiment ID: 20001558 Result: Up-regulated in Transcription
  misc_feature: MA Experiment 20001558 PARAMETER Experiment Name: At_Drought_Soil_Dry_P Parameter: Age (day) Value: 27
  misc_feature: MA Experiment 20001558 PARAMETER Experiment Name: At_Drought_Soil_Dry_P Parameter: Organism Value: A. thaliana
  misc_feature: MA Experiment 20001558 PARAMETER Experiment Name: At_Drought_Soil_Dry_P Parameter: Plant Line Value: WS
  misc_feature: MA Experiment 20001558 PARAMETER Experiment Name: At_Drought_Soil_Dry_P Parameter: Post Timepoint (hr) Value: 6
  misc_feature: MA Experiment 20001558 PARAMETER Experiment Name: At_Drought_Soil_Dry_P Parameter: Post-Treatment Value: Re-Water vs. No Drought
  misc_feature: MA Experiment 20001558 PARAMETER Experiment Name: At_Drought_Soil_Dry_P Parameter: Timepoint (day) Value: 13
  misc_feature: MA Experiment 20001558 PARAMETER Experiment Name: At_Drought_Soil_Dry_P Parameter: Treatment Value: Drought vs. No Drought
  misc_feature: MA Experiment ID: 20001560 Result: Up-regulated in Transcription
  misc_feature: MA Experiment 20001560 PARAMETER Experiment Name: At_Drought_Soil_Dry_P Parameter: Age (day) Value: 28
  misc_feature: MA Experiment 20001560 PARAMETER Experiment Name: At_Drought_Soil_Dry_P Parameter: Organism Value: A. thaliana
  misc_feature: MA Experiment 20001560 PARAMETER Experiment Name: At_Drought_Soil_Dry_P Parameter: Plant Line Value: WS
  misc_feature: MA Experiment 20001560 PARAMETER Experiment Name: At_Drought_Soil_Dry_P Parameter: Post Timepoint (hr) Value: None
  misc_feature: MA Experiment 20001560 PARAMETER Experiment Name: At_Drought_Soil_Dry_P Parameter: Post-Treatment Value: None
  misc_feature: MA Experiment 20001560 PARAMETER Experiment Name: At_Drought_Soil_Dry_P Parameter: Timepoint (day) Value: 14
  misc_feature: MA Experiment 20001560 PARAMETER Experiment Name: At_Drought_Soil_Dry_P Parameter: Treatment Value: Drought vs. No Drought
atgaagcatcttcttcttcttcgtcttgttcttccaaagccaaattacattctcagaaggagcttccttttccactccggcaagaccacaccatcgccgttggacccttacgacactctgcagcgtcgggtcgcgagatccggagatccctctgcttcgattatcaaagtgttggatggatggcttgatcaagggaatctggttaagacttcggagctccatagcatcatcaagatgcttcgaaagttcagccgtttctctcacgctctccagatatcagattggatgagtgagcatagagttcatgagatctctgaaggagatgttgcgattcggcttgatttgattgctaaagttggtggtttgggagaagcagagaagtttttcgaaactattcctatggagaggaggaactaccatctctacggtgctctcttgaactgctatgcgagcaagaaggtgttgcacaaagctgagcaagtgtttcaggagatgaaagagcttggcttccttaaaggttgtcttccctacaatgtgatgctgaatctctatgtccggactgggaaatacacaatggttgagaagctgctgcgcgaaatggaggatgagactgtgaagccagacatcttcacagtgaacacgcggttgcatgcttattcggttgtatctgatgtagaggggatggagaagtttcttatgcgttgtgaggctgaccaggggcttcatttggactggcgcacttacgccgatacagcgaatggctacataaaggctggattaactgaaaaggctctagagatgctgcgtaaatcagagcagatggtgaatgctcagaaaagaaagcatgcctatgaggttctcatgtcattctatggagctgcaggtaagaaagaagaggtgtaccgtctctggagcttgtacaaggagctggacgggttctacaacactggatacataagcgtgatcagtgcactcttgaagatggatgacatagaggaggtggagaaaattatggaagagtgggaagctggacactcccttttcgatattcggatcccacacttgttaataacgggttactgcaagaaaggaatgatggagaaggcagaggaagtagtaaatatattggtccagaagtggagagtggaggatacaagcacatgggagcgtttagctcttgggtacaagatggcgggtaaaatggagaaggcggtggagaaatggaagagagcaatagaggtgagcaagccagggtggagaccacaccaggttgtgctgatgagctgtgtggattatctggagggtcaaagagacatggagggtttgagaaagattttgagactgttaagcgagcgaggacacatttcatacgatcagctactgtacgacatgaacggtgctggactgagttggaagatagtcgatgcaatgggaaaaggtcgatacgttgaggaaagagaagtacgaatctag

SEQ ID NO: 96469 - protein, 490 aa, Arabidopsis thaliana
  peptide (1)..(490): Ceres Seq. ID no. 12733378
  misc_feature (140)..(174): Pfam Name: PPR repeat Pfam Description: PPR repeat
  misc_feature (1)..(490): Homolog of NCBI NO: 15225409 NR Description: hypothetical protein; protein id: At2g20710.1
  misc_feature (31)..(449): Homolog of NCBI NO: 37535776 NR Description: putative leaf protein [Oryza sativa (japonica group)] >gi|22165054|gb|AAM93671.1| putative leaf protein [Oryza
  misc_feature (28)..(449): Homolog of NCBI NO: 37535774 NR Description: putative leaf protein [Oryza sativa (japonica group)] >gi|22165052|gb|AAM93669.1| putative leaf protein [Oryza
  misc_feature (15)..(374): Homolog of NCBI NO: 15217811 NR Description: hypothetical protein; protein id: At1g28020.1
  misc_feature (25)..(449): Homolog of NCBI NO: 34393591 NR Description: putative DNA-binding protein [Oryza sativa
  misc_feature (39)..(447): Homolog of NCBI NO: 22328859 NR Description: unknown protein; protein id: At4g21705.1 thaliana] >gi|28393142|gb|AAO42004.1| unknown protein thaliana] >gi|28827500|gb|AAO50594.1| unknown protein
  misc_feature (33)..(455): Homolog of NCBI NO: 22329290 NR Description: hypothetical protein; protein id: At1g02150.1, by cDNA: gi_20453084 [Arabidopsis thaliana]
  misc_feature (33)..(455): Homolog of NCBI NO: 20453085 NR Description: At1g02150/T7I23.8 [Arabidopsis thaliana]
  misc_feature (38)..(489): Homolog of NCBI NO: 17064738 NR Description: Unknown protein [Arabidopsis thaliana]
  misc_feature (38)..(489): Homolog of NCBI NO: 15235508 NR Description: hypothetical protein; protein id: At4g02820.1, by cDNA: gi_17064737 [Arabidopsis thaliana]
MKHLLLLRLVLPKPNYILRRSFLFHSGKTTPSPLDPYDTLQRRVARSGDPSASIIKVLDGWLDQGNLVKTSELHSIIKMLRKFSRFSHALQISDWMSEHRVHEISEGDVAIRLDLIAKVGGLGEAEKFFETIPMERRNYHLYGALLNCYASKKVLHKAEQVFQEMKELGFLKGCLPYNVMLNLYVRTGKYTMVEKLLREMEDETVKPDIFTVNTRLHAYSVVSDVEGMEKFLMRCEADQGLHLDWRTYADTANGYIKAGLTEKALEMLRKSEQMVNAQKRKHAYEVLMSFYGAAGKKEEVYRLWSLYKELDGFYNTGYISVISALLKMDDIEEVEKIMEEWEAGHSLFDIRIPHLLITGYCKKGMMEKAEEVVNILVQKWRVEDTSTWERLALGYKMAGKMEKAVEKWKRAIEVSKPGWRPHQVVLMSCVDYLEGQRDMEGLRKILRLLSERGHISYDQLLYDMNGAGLSWKIVDAMGKGRYVEEREVRI

SEQ ID NO: 96470 - protein, 412 aa, Arabidopsis thaliana
  peptide (1)..(412): Ceres Seq. ID no. 12733379
  misc_feature (62)..(96): Pfam Name: PPR repeat Pfam Description: PPR repeat
  misc_feature (1)..(412): Homolog of NCBI NO: 15225409 NR Description: hypothetical protein; protein id: At2g20710.1
  misc_feature (1)..(371): Homolog of NCBI NO: 37535776 NR Description: putative leaf protein [Oryza sativa (japonica group)] >gi|22165054|gb|AAM93671.1| putative leaf protein [Oryza
  misc_feature (1)..(371): Homolog of NCBI NO: 37535774 NR Description: putative leaf protein [Oryza sativa (japonica group)] >gi|22165052|gb|AAM93669.1| putative leaf protein [Oryza
  misc_feature (1)..(296): Homolog of NCBI NO: 15217811 NR Description: hypothetical protein; protein id: At1g28020.1
  misc_feature (1)..(371): Homolog of NCBI NO: 34393591 NR Description: putative DNA-binding protein [Oryza sativa
  misc_feature (1)..(369): Homolog of NCBI NO: 22328859 NR Description: unknown protein; protein id: At4g21705.1 thaliana] >gi|28393142|gb|AAO42004.1| unknown protein thaliana] >gi|28827500|gb|AAO50594.1| unknown protein
  misc_feature (1)..(377): Homolog of NCBI NO: 22329290 NR Description: hypothetical protein; protein id: At1g02150.1, by cDNA: gi_20453084 [Arabidopsis thaliana]
  misc_feature (1)..(377): Homolog of NCBI NO: 20453085 NR Description: At1g02150/T7I23.8 [Arabidopsis thaliana]
  misc_feature (1)..(411): Homolog of NCBI NO: 17064738 NR Description: Unknown protein [Arabidopsis thaliana]
  misc_feature (1)..(411): Homolog of NCBI NO: 15235508 NR Description: hypothetical protein; protein id: At4g02820.1, by cDNA: gi_17064737 [Arabidopsis thaliana]
MLRKFSRFSHALQISDWMSEHRVHEISEGDVAIRLDLIAKVGGLGEAEKFFETIPMERRNYHLYGALLNCYASKKVLHKAEQVFQEMKELGFLKGCLPYNVMLNLYVRTGKYTMVEKLLREMEDETVKPDIFTVNTRLHAYSVVSDVEGMEKFLMRCEADQGLHLDWRTYADTANGYIKAGLTEKALEMLRKSEQMVNAQKRKHAYEVLMSFYGAAGKKEEVYRLWSLYKELDGFYNTGYISVISALLKMDDIEEVEKIMEEWEAGHSLFDIRIPHLLITGYCKKGMMEKAEEVVNILVQKWRVEDTSTWERLALGYKMAGKMEKAVEKWKRAIEVSKPGWRPHQVVLMSCVDYLEGQRDMEGLRKILRLLSERGHISYDQLLYDMNGAGLSWKIVDAMGKGRYVEEREVRI

SEQ ID NO: 96471 - protein, 395 aa, Arabidopsis thaliana
  peptide (1)..(395): Ceres Seq. ID no. 12733380
  misc_feature (45)..(79): Pfam Name: PPR repeat Pfam Description: PPR repeat
  misc_feature (1)..(395): Homolog of NCBI NO: 15225409 NR Description: hypothetical protein; protein id: At2g20710.1
  misc_feature (1)..(354): Homolog of NCBI NO: 37535776 NR Description: putative leaf protein [Oryza sativa (japonica group)] >gi|22165054|gb|AAM93671.1| putative leaf protein [Oryza
  misc_feature (1)..(354): Homolog of NCBI NO: 37535774 NR Description: putative leaf protein [Oryza sativa (japonica group)] >gi|22165052|gb|AAM93669.1| putative leaf protein [Oryza
  misc_feature (1)..(279): Homolog of NCBI NO: 15217811 NR Description: hypothetical protein; protein id: At1g28020.1
  misc_feature (1)..(354): Homolog of NCBI NO: 34393591 NR Description: putative DNA-binding protein [Oryza sativa
  misc_feature (1)..(352): Homolog of NCBI NO: 22328859 NR Description: unknown protein; protein id: At4g21705.1 thaliana] >gi|28393142|gb|AAO42004.1| unknown protein thaliana] >gi|28827500|gb|AAO50594.1| unknown protein
  misc_feature (1)..(360): Homolog of NCBI NO: 22329290 NR Description: hypothetical protein; protein id: At1g02150.1, by cDNA: gi_20453084 [Arabidopsis thaliana]
  misc_feature (1)..(360): Homolog of NCBI NO: 20453085 NR Description: At1g02150/T7I23.8 [Arabidopsis thaliana]
  misc_feature (1)..(394): Homolog of NCBI NO: 17064738 NR Description: Unknown protein [Arabidopsis thaliana]
  misc_feature (1)..(394): Homolog of NCBI NO: 15235508 NR Description: hypothetical protein; protein id: At4g02820.1, by cDNA: gi_17064737 [Arabidopsis thaliana]
MSEHRVHEISEGDVAIRLDLIAKVGGLGEAEKFFETIPMERRNYHLYGALLNCYASKKVLHKAEQVFQEMKELGFLKGCLPYNVMLNLYVRTGKYTMVEKLLREMEDETVKPDIFTVNTRLHAYSVVSDVEGMEKFLMRCEADQGLHLDWRTYADTANGYIKAGLTEKALEMLRKSEQMVNAQKRKHAYEVLMSFYGAAGKKEEVYRLWSLYKELDGFYNTGYISVISALLKMDDIEEVEKIMEEWEAGHSLFDIRIPHLLITGYCKKGMMEKAEEVVNILVQKWRVEDTSTWERLALGYKMAGKMEKAVEKWKRAIEVSKPGWRPHQVVLMSCVDYLEGQRDMEGLRKILRLLSERGHISYDQLLYDMNGAGLSWKIVDAMGKGRYVEEREVRI

SEQ ID NO: 96472 - DNA, 1546 bp, Arabidopsis thaliana
  misc_feature (1)..(1546): Ceres Seq. ID no. 12733381
  misc_feature: MA Experiment ID: 20000436 Result: Up-regulated in Transcription
  misc_feature: MA Experiment 20000436 PARAMETER Experiment Name: At_Drought_P Parameter: Age (day) Value: 7
  misc_feature: MA Experiment 20000436 PARAMETER Experiment Name: At_Drought_P Parameter: Organism Value: A. thaliana
  misc_feature: MA Experiment 20000436 PARAMETER Experiment Name: At_Drought_P Parameter: Plant Line Value: WS
  misc_feature: MA Experiment 20000436 PARAMETER Experiment Name: At_Drought_P Parameter: Timepoint (hr) Value: 12
  misc_feature: MA Experiment 20000436 PARAMETER Experiment Name: At_Drought_P Parameter: Tissue Value: Whole Plant
  misc_feature: MA Experiment 20000436 PARAMETER Experiment Name: At_Drought_P Parameter: Treatment Value: Drought vs. No Drought
  misc_feature: MA Experiment ID: 20000437 Result: Up-regulated in Transcription
  misc_feature: MA Experiment 20000437 PARAMETER Experiment Name: At_Drought_P Parameter: Age (day) Value: 8
  misc_feature: MA Experiment 20000437 PARAMETER Experiment Name: At_Drought_P Parameter: Organism Value: A. thaliana
  misc_feature: MA Experiment 20000437 PARAMETER Experiment Name: At_Drought_P Parameter: Plant Line Value: WS
  misc_feature: MA Experiment 20000437 PARAMETER Experiment Name: At_Drought_P Parameter: Timepoint (hr) Value: 24
  misc_feature: MA Experiment 20000437 PARAMETER Experiment Name: At_Drought_P Parameter: Tissue Value: Whole Plant
  misc_feature: MA Experiment 20000437 PARAMETER Experiment Name: At_Drought_P Parameter: Treatment Value: Drought vs. No Drought
  misc_feature: MA Experiment ID: 20001559 Result: Up-regulated in Transcription
  misc_feature: MA Experiment 20001559 PARAMETER Experiment Name: At_Drought_Soil_Dry_P Parameter: Age (day) Value: 28
  misc_feature: MA Experiment 20001559 PARAMETER Experiment Name: At_Drought_Soil_Dry_P Parameter: Organism Value: A. thaliana
  misc_feature: MA Experiment 20001559 PARAMETER Experiment Name: At_Drought_Soil_Dry_P Parameter: Plant Line Value: WS
  misc_feature: MA Experiment 20001559 PARAMETER Experiment Name: At_Drought_Soil_Dry_P Parameter: Post Timepoint (hr) Value: 29
  misc_feature: MA Experiment 20001559 PARAMETER Experiment Name: At_Drought_Soil_Dry_P Parameter: Post-Treatment Value: Re-Water vs. No Drought
  misc_feature: MA Experiment 20001559 PARAMETER Experiment Name: At_Drought_Soil_Dry_P Parameter: Timepoint (day) Value: 14
  misc_feature: MA Experiment 20001559 PARAMETER Experiment Name: At_Drought_Soil_Dry_P Parameter: Treatment Value: Drought vs. No Drought
  misc_feature: MA Experiment ID: 20001904 Result: Up-regulated in Transcription
  misc_feature: MA Experiment 20001904 PARAMETER Experiment Name: At_Drought_Reproduction_P Parameter: Age (day) Value: 37
  misc_feature: MA Experiment 20001904 PARAMETER Experiment Name: At_Drought_Reproduction_P Parameter: Organism Value: A. thaliana
  misc_feature: MA Experiment 20001904 PARAMETER Experiment Name: At_Drought_Reproduction_P Parameter: Plant Line Value: WS
  misc_feature: MA Experiment 20001904 PARAMETER Experiment Name: At_Drought_Reproduction_P Parameter: Timepoint (day) Value: 7
  misc_feature: MA Experiment 20001904 PARAMETER Experiment Name: At_Drought_Reproduction_P Parameter: Tissue Value: Rosettes
  misc_feature: MA Experiment 20001904 PARAMETER Experiment Name: At_Drought_Reproduction_P Parameter: Treatment Value: Drought vs. No Drought
  misc_feature: MA Experiment ID: 20001905 Result: Up-regulated in Transcription
  misc_feature: MA Experiment 20001905 PARAMETER Experiment Name: At_Drought_Reproduction_P Parameter: Age (day) Value: 40
  misc_feature: MA Experiment 20001905 PARAMETER Experiment Name: At_Drought_Reproduction_P Parameter: Organism Value: A. thaliana
  misc_feature: MA Experiment 20001905 PARAMETER Experiment Name: At_Drought_Reproduction_P Parameter: Plant Line Value: WS
  misc_feature: MA Experiment 20001905 PARAMETER Experiment Name: At_Drought_Reproduction_P Parameter: Timepoint (day) Value: 10
  misc_feature: MA Experiment 20001905 PARAMETER Experiment Name: At_Drought_Reproduction_P Parameter: Tissue Value: Rosettes
  misc_feature: MA Experiment 20001905 PARAMETER Experiment Name: At_Drought_Reproduction_P Parameter: Treatment Value: Drought vs. No Drought
  misc_feature: MA Experiment ID: 20001911 Result: Up-regulated in Transcription
  misc_feature: MA Experiment 20001911 PARAMETER Experiment Name: At_Drought_Reproduction_P Parameter: Age (day) Value: 40
  misc_feature: MA Experiment 20001911 PARAMETER Experiment Name: At_Drought_Reproduction_P Parameter: Organism Value: A. thaliana
  misc_feature: MA Experiment 20001911 PARAMETER Experiment Name: At_Drought_Reproduction_P Parameter: Plant Line Value: WS
  misc_feature: MA Experiment 20001911 PARAMETER Experiment Name: At_Drought_Reproduction_P Parameter: Timepoint (day) Value: 10
  misc_feature: MA Experiment 20001911 PARAMETER Experiment Name: At_Drought_Reproduction_P Parameter: Tissue Value: Flowers
  misc_feature: MA Experiment 20001911 PARAMETER Experiment Name: At_Drought_Reproduction_P Parameter: Treatment Value: Drought vs. No Drought
gtcgtttagtctttcttctagaacacaaaatcgattttgagctttaacggaaagagacgacaatggcgggtcggttcttcgataacgtgatgcctgatttcgtgaaggagaaggaaagtgtatctggaggagatacgcttaggaatctgcttgctatgccgtattcgtctctctcgcagcagctcaagcggtccgctttggatctcaaagaaaccgtagtgattgaaacttggggttttagtggacagactgttgaagacttcactctttactctggaactcttggagctgcgtttttactctttagagcttatcaggttactggcaacgccaacgatctttccctctgcttggaaatcgtcaaagcttgtgatactgcttctgcttcctcaggggatgttacttttctctgtggccgagctggtgtttgtggtcttggcgctgttgcagctaagctttctggtgaggaagatttgctcaattactatttgggacaatttcgtctgataagactatctagtgatcttcctaacgagcttttgtatggaagagttggttatctatgggcttgtctgtttatcaacaagtacatcggcaaagaaactttgtcttcagataccatccgcgaagttgctcaggagattatcaaggaaggaagatcaatggctaagaaaggaagctcaccgcttatgtttgaatggtatggcaaaaggtactggggtgcagcacatggacttgctggtattatgcacgtattgatggatgttcagctgaagcctgacgaggcagaagatgtgaagggaacccttaagtatatgatcaagaatcggtttccaagtggaaattaccctgctagtgaagaggataagaagaaagatattcttgtgcattggtgtcatggagcccctgggattgccctcacacttgggaaggcggctgaggtttttggggagagagagtttctggaagcgagtgcagctgcagcagaggtggtttggaaccgtggattgctcaagcgcgtggggatctgtcatggaataagtgggaacgcatatgtttttcttgcgctttacagagctacgggaaggagtgagtatctataccgtgcaaaagcctttgccagtttcctgcttgatagaggccccaagttactctcaaaaggagaaatgcatggaggtgatagtccttattccttgtttgaaggcgttgcaggcatggcctatctcttccttgacatggtcgacccatctgaagccaggttcccaggttacgagctttaaacttcttgatcgataacaatctccgtccatcaaatccttctctcttgttatggaggatgcacaaggtaagagagggtgtgagtgtatgtgtgtttagtactagcaaaatcttcttgttgtttgatggtgaataagtttgagttgatatatagccgaactgtccggagagcctgtaactttatgagtgttagaaggagagtgtgaaacatgaagtgaacacaaaggttctgtcatttctgtatatattgtcttttgagttgagtatc

SEQ ID NO: 96473 - protein, 405 aa, Arabidopsis thaliana
  peptide (1)..(405): Ceres Seq. ID no. 12733382
  misc_feature (48)..(405): Pfam Name: Lanthionine synthetase C-like protein Pfam Description: Lanthionine synthetase C-like protein
  misc_feature (1)..(405): Homolog of NCBI NO: 30681129 NR Description: expressed protein [Arabidopsis thaliana] unknown protein [Arabidopsis thaliana]
  misc_feature (48)..(405): Homolog of NCBI NO: 25411993 NR Description: hypothetical protein At2g20770 [imported] - thaliana >gi|4454471|gb|AAD20918.1| hypothetical protein
  misc_feature (10)..(405): Homolog of NCBI NO: 15219126 NR Description: putative G protein-coupled receptor; protein id: [Arabidopsis thaliana] >gi|25405614|pir||E96570 hypothetical
  misc_feature (1)..(405): Homolog of NCBI NO: 37535720 NR Description: putative lanthionine synthetase [Oryza sativa
  misc_feature (58)..(405): Homolog of NCBI NO: 8489877 NR Description: putative 7-transmembrane G-protein-coupled
  misc_feature (54)..(405): Homolog of NCBI NO: 15238395 NR Description: G protein-coupled receptor-like protein; protein At5g65280.1, supported by cDNA: gi_15451139, supported by cDNA:
  misc_feature (54)..(405): Homolog of NCBI NO: 15451140 NR Description: G protein-coupled receptor-like protein
  misc_feature (41)..(405): Homolog of NCBI NO: 19526936 NR Description: RIKEN cDNA 1700003F10 [Mus musculus]
  misc_feature (58)..(405): Homolog of NCBI NO: 21489937 NR Description: LanC (bacterial lantibiotic synthetase component
  misc_feature (1)..(405): Homolog of NCBI NO: 5174445 NR Description: lanthionine synthetase C-like protein 1; LanC
MAGRFFDNVMPDFVKEKESVSGGDTLRNLLAMPYSSLSQQLKRSALDLKETVVIETWGFSGQTVEDFTLYSGTLGAAFLLFRAYQVTGNANDLSLCLEIVKACDTASASSGDVTFLCGRAGVCGLGAVAAKLSGEEDLLNYYLGQFRLIRLSSDLPNELLYGRVGYLWACLFINKYIGKETLSSDTIREVAQEIIKEGRSMAKKGSSPLMFEWYGKRYWGAAHGLAGIMHVLMDVQLKPDEAEDVKGTLKYMIKNRFPSGNYPASEEDKKKDILVHWCHGAPGIALTLGKAAEVFGEREFLEASAAAAEVVWNRGLLKRVGICHGISGNAYVFLALYRATGRSEYLYRAKAFASFLLDRGPKLLSKGEMHGGDSPYSLFEGVAGMAYLFLDMVDPSEARFPGYEL

SEQ ID NO: 96474 - protein, 396 aa, Arabidopsis thaliana
  peptide (1)..(396): Ceres Seq. ID no. 12733383
  misc_feature (39)..(396): Pfam Name: Lanthionine synthetase C-like protein Pfam Description: Lanthionine synthetase C-like protein
  misc_feature (1)..(396): Homolog of NCBI NO: 30681129 NR Description: expressed protein [Arabidopsis thaliana] unknown protein [Arabidopsis thaliana]
  misc_feature (39)..(396): Homolog of NCBI NO: 25411993 NR Description: hypothetical protein At2g20770 [imported] - thaliana >gi|4454471|gb|AAD20918.1| hypothetical protein
  misc_feature (1)..(396): Homolog of NCBI NO: 15219126 NR Description: putative G protein-coupled receptor; protein id: [Arabidopsis thaliana] >gi|25405614|pir||E96570 hypothetical
  misc_feature (1)..(396): Homolog of NCBI NO: 37535720 NR Description: putative lanthionine synthetase [Oryza sativa
  misc_feature (49)..(396): Homolog of NCBI NO: 8489877 NR Description: putative 7-transmembrane G-protein-coupled
  misc_feature (45)..(396): Homolog of NCBI NO: 15238395 NR Description: G protein-coupled receptor-like protein; protein At5g65280.1, supported by cDNA: gi_15451139, supported by cDNA:
  misc_feature (45)..(396): Homolog of NCBI NO: 15451140 NR Description: G protein-coupled receptor-like protein
  misc_feature (32)..(396): Homolog of NCBI NO: 19526936 NR Description: RIKEN cDNA 1700003F10 [Mus musculus]
  misc_feature (49)..(396): Homolog of NCBI NO: 21489937 NR Description: LanC (bacterial lantibiotic synthetase component
  misc_feature (1)..(396): Homolog of NCBI NO: 5174445 NR Description: lanthionine synthetase C-like protein 1; LanC
MPDFVKEKESVSGGDTLRNLLAMPYSSLSQQLKRSALDLKETVVIETWGFSGQTVEDFTLYSGTLGAAFLLFRAYQVTGNANDLSLCLEIVKACDTASASSGDVTFLCGRAGVCGLGAVAAKLSGEEDLLNYYLGQFRLIRLSSDLPNELLYGRVGYLWACLFINKYIGKETLSSDTIREVAQEIIKEGRSMAKKGSSPLMFEWYGKRYWGAAHGLAGIMHVLMDVQLKPDEAEDVKGTLKYMIKNRFPSGNYPASEEDKKKDILVHWCHGAPGIALTLGKAAEVFGEREFLEASAAAAEVVWNRGLLKRVGICHGISGNAYVFLALYRATGRSEYLYRAKAFASFLLDRGPKLLSKGEMHGGDSPYSLFEGVAGMAYLFLDMVDPSEARFPGYEL

SEQ ID NO: 96475 - protein, 374 aa, Arabidopsis thaliana
  peptide (1)..(374): Ceres Seq. ID no. 12733384
  misc_feature (17)..(374): Pfam Name: Lanthionine synthetase C-like protein Pfam Description: Lanthionine synthetase C-like protein
  misc_feature (1)..(374): Homolog of NCBI NO: 30681129 NR Description: expressed protein [Arabidopsis thaliana] unknown protein [Arabidopsis thaliana]
  misc_feature (17)..(374): Homolog of NCBI NO: 25411993 NR Description: hypothetical protein At2g20770 [imported] - thaliana >gi|4454471|gb|AAD20918.1| hypothetical protein
  misc_feature (1)..(374): Homolog of NCBI NO: 15219126 NR Description: putative G protein-coupled receptor; protein id: [Arabidopsis thaliana] >gi|25405614|pir||E96570 hypothetical
  misc_feature (1)..(374): Homolog of NCBI NO: 37535720 NR Description: putative lanthionine synthetase [Oryza sativa
  misc_feature (27)..(374): Homolog of NCBI NO: 8489877 NR Description: putative 7-transmembrane G-protein-coupled
  misc_feature (23)..(374): Homolog of NCBI NO: 15238395 NR Description: G protein-coupled receptor-like protein; protein At5g65280.1, supported by cDNA: gi_15451139, supported by cDNA:
  misc_feature (23)..(374): Homolog of NCBI NO: 15451140 NR Description: G protein-coupled receptor-like protein
  misc_feature (10)..(374): Homolog of NCBI NO: 19526936 NR Description: RIKEN cDNA 1700003F10 [Mus musculus]
  misc_feature (27)..(374): Homolog of NCBI NO: 21489937 NR Description: LanC (bacterial lantibiotic synthetase component
  misc_feature (1)..(374): Homolog of NCBI NO: 5174445 NR Description: lanthionine synthetase C-like protein 1; LanC
MPYSSLSQQLKRSALDLKETVVIETWGFSGQTVEDFTLYSGTLGAAFLLFRAYQVTGNANDLSLCLEIVKACDTASASSGDVTFLCGRAGVCGLGAVAAKLSGEEDLLNYYLGQFRLIRLSSDLPNELLYGRVGYLWACLFINKYIGKETLSSDTIREVAQEIIKEGRSMAKKGSSPLMFEWYGKRYWGAAHGLAGIMHVLMDVQLKPDEAEDVKGTLKYMIKNRFPSGNYPASEEDKKKDILVHWCHGAPGIALTLGKAAEVFGEREFLEASAAAAEVVWNRGLLKRVGICHGISGNAYVFLALYRATGRSEYLYRAKAFASFLLDRGPKLLSKGEMHGGDSPYSLFEGVAGMAYLFLDMVDPSEARFPGYEL

SEQ ID NO: 96476 - DNA, 2588 bp, Arabidopsis thaliana
  misc_feature (1)..(2588): Ceres Seq. ID no. 12733404
  misc_feature: MA Experiment ID: 20000173 Result: Down-regulated in Transcription
  misc_feature: MA Experiment 20000173 PARAMETER Experiment Name: At_42deg_Heat_P Parameter: Age (day) Value: 14
  misc_feature: MA Experiment 20000173 PARAMETER Experiment Name: At_42deg_Heat_P Parameter: Organism Value: A. thaliana
  misc_feature: MA Experiment 20000173 PARAMETER Experiment Name: At_42deg_Heat_P Parameter: Plant Line Value: WS
  misc_feature: MA Experiment 20000173 PARAMETER Experiment Name: At_42deg_Heat_P Parameter: Temperature (deg C) Value: 42 vs. 22
  misc_feature: MA Experiment 20000173 PARAMETER Experiment Name: At_42deg_Heat_P Parameter: Timepoint (hr) Value: 6
  misc_feature: MA Experiment 20000173 PARAMETER Experiment Name: At_42deg_Heat_P Parameter: Tissue Value: Aerial
  misc_feature: MA Experiment ID: 20000495 Result: Up-regulated in Transcription
  misc_feature: MA Experiment 20000495 PARAMETER Experiment Name: At_Guard_Cells_P Parameter: Harvest Date Value: 8/2/2002
  misc_feature: MA Experiment 20000495 PARAMETER Experiment Name: At_Guard_Cells_P Parameter: Organism Value: A. thaliana
  misc_feature: MA Experiment 20000495 PARAMETER Experiment Name: At_Guard_Cells_P Parameter: Tissue Value: Guard Cells vs. Leaves
  misc_feature: MA Experiment ID: 20000573 Result: Down-regulated in Transcription
  misc_feature: MA Experiment 20000573 PARAMETER Experiment Name: At_100uM_ABA_Mutants__P Parameter: Organism Value: A. thaliana
  misc_feature: MA Experiment 20000573 PARAMETER Experiment Name: At_100uM_ABA_Mutants__P Parameter: Plant Line Value: CS22 vs. Ler wt
  misc_feature: MA Experiment 20000573 PARAMETER Experiment Name: At_100uM_ABA_Mutants__P Parameter: Timepoint (hr) Value: N/A
  misc_feature: MA Experiment 20000573 PARAMETER Experiment Name: At_100uM_ABA_Mutants__P Parameter: Tissue Value: Whole Plant
  misc_feature: MA Experiment 20000573 PARAMETER Experiment Name: At_100uM_ABA_Mutants__P Parameter: Treatment Value: None
  misc_feature: MA Experiment ID: 20000574 Result: Down-regulated in Transcription
  misc_feature: MA Experiment 20000574 PARAMETER Experiment Name: At_100uM_ABA_Mutants__P Parameter: Organism Value: A. thaliana
  misc_feature: MA Experiment 20000574 PARAMETER Experiment Name: At_100uM_ABA_Mutants__P Parameter: Plant Line Value: CS23 vs. Ler wt
  misc_feature: MA Experiment 20000574 PARAMETER Experiment Name: At_100uM_ABA_Mutants__P Parameter: Timepoint (hr) Value: N/A
  misc_feature: MA Experiment 20000574 PARAMETER Experiment Name: At_100uM_ABA_Mutants__P Parameter: Tissue Value: Whole Plant
  misc_feature: MA Experiment 20000574 PARAMETER Experiment Name: At_100uM_ABA_Mutants__P Parameter: Treatment Value: None
  misc_feature: MA Experiment ID: 20000794 Result: Down-regulated in Transcription
  misc_feature: MA Experiment 20000794 PARAMETER Experiment Name: At_Petals_P Parameter: Age (day) Value: 23-25 days
  misc_feature: MA Experiment 20000794 PARAMETER Experiment Name: At_Petals_P Parameter: Plant Line Value: WS
  misc_feature: MA Experiment 20000794 PARAMETER Experiment Name: At_Petals_P Parameter: Tissue Value: Petals vs. Whole plant
  misc_feature: MA Experiment ID: 20001558 Result: Up-regulated in Transcription
  misc_feature: MA Experiment 20001558 PARAMETER Experiment Name: At_Drought_Soil_Dry_P Parameter: Age (day) Value: 27
  misc_feature: MA Experiment 20001558 PARAMETER Experiment Name: At_Drought_Soil_Dry_P Parameter: Organism Value: A. thaliana
  misc_feature: MA Experiment 20001558 PARAMETER Experiment Name: At_Drought_Soil_Dry_P Parameter: Plant Line Value: WS
  misc_feature: MA Experiment 20001558 PARAMETER Experiment Name: At_Drought_Soil_Dry_P Parameter: Post Timepoint (hr) Value: 6
  misc_feature: MA Experiment 20001558 PARAMETER Experiment Name: At_Drought_Soil_Dry_P Parameter: Post-Treatment Value: Re-Water vs. No Drought
  misc_feature: MA Experiment 20001558 PARAMETER Experiment Name: At_Drought_Soil_Dry_P Parameter: Timepoint (day) Value: 13
  misc_feature: MA Experiment 20001558 PARAMETER Experiment Name: At_Drought_Soil_Dry_P Parameter: Treatment Value: Drought vs. No Drought
gatgagatctgggagagacaacaacatctgcttcctgggttttctctcctttgcccttatctcccttccctccttgtcacttgctcttaccaatcctgacgatgttgcggctattaacagtctcttccttgcactggagtctcctcttctccccggttgggttgcatctggaggtgacccatgtggtgagagctggcaaggtgttctatgtaatgcttcccaagtagaaacaataattctcatcagtgccaatcttggaggagagcttggtgttggcttaaacatgtttacctctcttaaagcaatggattttagcaacaatcacattggaggaagtatcccatccacgttgcctgtttcattgcagaacttgtttctttcaggtaacaactttacaggaaccatcccagaatctctttcctccttaaaatctttgtctgtcatgtccttgaacaataaccttttgtctggcaagatacccgatgtctttcaagaccttggccttatgatcaatatagatttgtctagcaacaatctgagtggaccattacctccttccatgcagaatctttcgactcttacatccttgcttttgcagaacaatcatctttcaggagagcttgatgttcttcaagatcttcccctcaaggacttgaacgttgagaacaacctcttcaatggacctataccagaaaagttgttgagtataccaaatttcataaaaggcggtaatctgtttaacgtcactattgctccatcgccttcacctgaaacacctccaagtccaacatcacctaagcggccattttttggaccaccatctcccaatgcatcagctggtcatggtcaggcacacgtgagatcacccccttctgatcatcacccatcccgaccaactcctcaagggaaagaagactcatttaccagtaaaagaattatttggatatccattcttggggctttttcatttgtggttttggccttggtatgtctactttgtgggagaaaatgtctcagaaaaagagaagacagtgaacaactatccaaaccgcacctaactagtgaatacgggagggcaagggagggttctcgctcaaatgcttctatgcttcctccatccaatacattcaataaagacaaggaggctagaccaaaagagagagtaggaggtgcttcgaagctgcatggtggggcagaaagaagcgtaggaagtgaatcaaagcaggagagtcatgagatagacatgaatggcaatgctatggatttgatgcatccctcatcaattccacctatcaaaagggtcatcgcaaaggcgactgaacctgctgaagcatctctaaaaaggacaaccagtaaatcccatggtcccttgacagctgtgaagcatttcacggtcgcatctctacaacaacacacaaatagcttttcccacgaaaaccttattggaacaggcatgcttgggagtgtctacagggcagagcttccaggtggaaagctcttcgctgtgaggaagttggataagaagtctcccaatcatgaagaagaaggcaaatttttggagctagtgaataatatagatagaatacggcatgccaatattgtccaactcgtgggtttctgttctgagcacagtcaaaggcttctgatccatgagtattgtaggaacggtacactgcacgatttgctgcatattgatgacaggttgaagattgaactatcatggaatgtccgtgttaggattgcactagaagctgcaaaagctctggagtatctgcatgagatctgtgatccacctagtatccaccgaaatttcaagtctgcaaatattctccttgatgacgatataagggtgcatgtctcagactgcggcttggctcctctaatctcctcaggtgccgtaagtcagttatcgggtcaactcttagcggcctacggatatggagctccagagtttgaatatgggatctatacaatgaaatgtgatgtctacagttttggagtagttatgttagaactcttgacaggtcgcaagtcatatgacaagaaacgggatagaggagagcaatttctggtgagatgggcaatcccacagcttcacgacattgatgcattagcgaagatggtcgacccatccctcaagggtgactatccagccaagtcgctgtcacactttgctgatgtgatatcacgttgtgttcagtcggaaccagagtacaggccactaatgtcagaagtggttcaagacctctcagacatgatccagagagaacatcggagaaatgactcaaatggggataatcagtatacgggaagaagatagtttaaggagattgtctcttatacaaaacaagtggtattattagtattctttagaaagtcgaaaccattgttctttaacgagccttgcttgtattattatatatgtagagtgtgtgagtgtgacacaggcacacagcttactctgctttggccttttagtctatccacaacacccccaatgtatttccaccggattaggattagcaatctctgagtttttccaaaaatccatagtactgctacttcaaattttgaatcttttttctttc

SEQ ID NO: 96477 - protein, 772 aa, Arabidopsis thaliana
  peptide (1)..(772): Ceres Seq. ID no. 12733405
  misc_feature (475)..(749): Pfam Name: Protein kinase domain Pfam Description: Protein kinase domain
  misc_feature (84)..(329): Homolog of NCBI NO: 25411997 NR Description: probable LRR receptor protein kinase [imported] -
  misc_feature (9)..(765): Homolog of NCBI NO: 15236294 NR Description: leucine-rich repeat transmembrane protein kinase, protein id: At4g03390.1 [Arabidopsis thaliana]
  misc_feature (408)..(755): Homolog of NCBI NO: 15217283 NR Description: Putative leucine-rich repeat transmembrane
  misc_feature (25)..(280): Homolog of NCBI NO: 15217283 NR Description: Putative leucine-rich repeat transmembrane
  misc_feature (429)..(755): Homolog of NCBI NO: 29367551 NR Description: putative leucine-rich repeat transmembrane
  misc_feature (25)..(281): Homolog of NCBI NO: 29367551 NR Description: putative leucine-rich repeat transmembrane
  misc_feature (409)..(765): Homolog of NCBI NO: 7489784 NR Description: leucine-rich repeat transmembrane protein kinase
  misc_feature (30)..(262): Homolog of NCBI NO: 7489784 NR Description: leucine-rich repeat transmembrane protein kinase
  misc_feature (422)..(772): Homolog of NCBI NO: 7489783 NR Description: leucine-rich repeat transmembrane protein kinase
  misc_feature (31)..(286): Homolog of NCBI NO: 7489783 NR Description: leucine-rich repeat transmembrane protein kinase
MRSGRDNNICFLGFLSFALISLPSLSLALTNPDDVAAINSLFLALESPLLPGWVASGGDPCGESWQGVLCNASQVETIILISANLGGELGVGLNMFTSLKAMDFSNNHIGGSIPSTLPVSLQNLFLSGNNFTGTIPESLSSLKSLSVMSLNNNLLSGKIPDVFQDLGLMINIDLSSNNLSGPLPPSMQNLSTLTSLLLQNNHLSGELDVLQDLPLKDLNVENNLFNGPIPEKLLSIPNFIKGGNLFNVTIAPSPSPETPPSPTSPKRPFFGPPSPNASAGHGQAHVRSPPSDHHPSRPTPQGKEDSFTSKRIIWISILGAFSFVVLALVCLLCGRKCLRKREDSEQLSKPHLTSEYGRAREGSRSNASMLPPSNTFNKDKEARPKERVGGASKLHGGAERSVGSESKQESHEIDMNGNAMDLMHPSSIPPIKRVIAKATEPAEASLKRTTSKSHGPLTAVKHFTVASLQQHTNSFSHENLIGTGMLGSVYRAELPGGKLFAVRKLDKKSPNHEEEGKFLELVNNIDRIRHANIVQLVGFCSEHSQRLLIHEYCRNGTLHDLLHIDDRLKIELSWNVRVRIALEAAKALEYLHEICDPPSIHRNFKSANILLDDDIRVHVSDCGLAPLISSGAVSQLSGQLLAAYGYGAPEFEYGIYTMKCDVYSFGVVMLELLTGRKSYDKKRDRGEQFLVRWAIPQLHDIDALAKMVDPSLKGDYPAKSLSHFADVISRCVQSEPEYRPLMSEVVQDLSDMIQREHRRNDSNGDNQYTGRR

SEQ ID NO: 96478 - protein, 678 aa, Arabidopsis thaliana
  peptide (1)..(678): Ceres Seq. ID no. 12733406
  misc_feature (381)..(655): Pfam Name: Protein kinase domain Pfam Description: Protein kinase domain
  misc_feature (1)..(235): Homolog of NCBI NO: 25411997 NR Description: probable LRR receptor protein kinase [imported] -
  misc_feature (1)..(671): Homolog of NCBI NO: 15236294 NR Description: leucine-rich repeat transmembrane protein kinase, protein id: At4g03390.1 [Arabidopsis thaliana]
  misc_feature (314)..(661): Homolog of NCBI NO: 15217283 NR Description: Putative leucine-rich repeat transmembrane
  misc_feature (1)..(186): Homolog of NCBI NO: 15217283 NR Description: Putative leucine-rich repeat transmembrane
  misc_feature (335)..(661): Homolog of NCBI NO: 29367551 NR Description: putative leucine-rich repeat transmembrane
  misc_feature (1)..(187): Homolog of NCBI NO: 29367551 NR Description: putative leucine-rich repeat transmembrane
  misc_feature (315)..(671): Homolog of NCBI NO: 7489784 NR Description: leucine-rich repeat transmembrane protein kinase
  misc_feature (1)..(168): Homolog of NCBI NO: 7489784 NR Description: leucine-rich repeat transmembrane protein kinase
  misc_feature (328)..(678): Homolog of NCBI NO: 7489783 NR Description: leucine-rich repeat transmembrane protein kinase
  misc_feature (1)..(192): Homolog of NCBI NO: 7489783 NR Description: leucine-rich repeat transmembrane protein kinase
MFTSLKAMDFSNNHIGGSIPSTLPVSLQNLFLSGNNFTGTIPESLSSLKSLSVMSLNNNLLSGKIPDVFQDLGLMINIDLSSNNLSGPLPPSMQNLSTLTSLLLQNNHLSGELDVLQDLPLKDLNVENNLFNGPIPEKLLSIPNFIKGGNLFNVTIAPSPSPETPPSPTSPKRPFFGPPSPNASAGHGQAHVRSPPSDHHPSRPTPQGKEDSFTSKRIIWISILGAFSFVVLALVCLLCGRKCLRKREDSEQLSKPHLTSEYGRAREGSRSNASMLPPSNTFNKDKEARPKERVGGASKLHGGAERSVGSESKQESHEIDMNGNAMDLMHPSSIPPIKRVIAKATEPAEASLKRTTSKSHGPLTAVKHFTVASLQQHTNSFSHENLIGTGMLGSVYRAELPGGKLFAVRKLDKKSPNHEEEGKFLELVNNIDRIRHANIVQLVGFCSEHSQRLLIHEYCRNGTLHDLLHIDDRLKIELSWNVRVRIALEAAKALEYLHEICDPPSIHRNFKSANILLDDDIRVHVSDCGLAPLISSGAVSQLSGQLLAAYGYGAPEFEYGIYTMKCDVYSFGVVMLELLTGRKSYDKKRDRGEQFLVRWAIPQLHDIDALAKMVDPSLKGDYPAKSLSHFADVISRCVQSEPEYRPLMSEVVQDLSDMIQREHRRNDSNGDNQYTGRR

SEQ ID NO: 96479 - protein, 671 aa, Arabidopsis thaliana
  peptide (1)..(671): Ceres Seq. ID no. 12733407
  misc_feature (374)..(648): Pfam Name: Protein kinase domain Pfam Description: Protein kinase domain
  misc_feature (1)..(228): Homolog of NCBI NO: 25411997 NR Description: probable LRR receptor protein kinase [imported] -
  misc_feature (1)..(664): Homolog of NCBI NO: 15236294 NR Description: leucine-rich repeat transmembrane protein kinase, protein id: At4g03390.1 [Arabidopsis thaliana]
  misc_feature (307)..(654): Homolog of NCBI NO: 15217283 NR Description: Putative leucine-rich repeat transmembrane
  misc_feature (1)..(179): Homolog of NCBI NO: 15217283 NR Description: Putative leucine-rich repeat transmembrane
  misc_feature (328)..(654): Homolog of NCBI NO: 29367551 NR Description: putative leucine-rich repeat transmembrane
  misc_feature (1)..(180): Homolog of NCBI NO: 29367551 NR Description: putative leucine-rich repeat transmembrane
  misc_feature (308)..(664): Homolog of NCBI NO: 7489784 NR Description: leucine-rich repeat transmembrane protein kinase
  misc_feature (1)..(161): Homolog of NCBI NO: 7489784 NR Description: leucine-rich repeat transmembrane protein kinase
  misc_feature (321)..(671): Homolog of NCBI NO: 7489783 NR Description: leucine-rich repeat transmembrane protein kinase
  misc_feature (1)..(185): Homolog of NCBI NO: 7489783 NR Description: leucine-rich repeat transmembrane protein kinase
MDFSNNHIGGSIPSTLPVSLQNLFLSGNNFTGTIPESLSSLKSLSVMSLNNNLLSGKIPDVFQDLGLMINIDLSSNNLSGPLPPSMQNLSTLTSLLLQNNHLSGELDVLQDLPLKDLNVENNLFNGPIPEKLLSIPNFIKGGNLFNVTIAPSPSPETPPSPTSPKRPFFGPPSPNASAGHGQAHVRSPPSDHHPSRPTPQGKEDSFTSKRIIWISILGAFSFVVLALVCLLCGRKCLRKREDSEQLSKPHLTSEYGRAREGSRSNASMLPPSNTFNKDKEARPKERVGGASKLHGGAERSVGSESKQESHEIDMNGNAMDLMHPSSIPPIKRVIAKATEPAEASLKRTTSKSHGPLTAVKHFTVASLQQHTNSFSHENLIGTGMLGSVYRAELPGGKLFAVRKLDKKSPNHEEEGKFLELVNNIDRIRHANIVQLVGFCSEHSQRLLIHEYCRNGTLHDLLHIDDRLKIELSWNVRVRIALEAAKALEYLHEICDPPSIHRNFKSANILLDDDIRVHVSDCGLAPLISSGAVSQLSGQLLAAYGYGAPEFEYGIYTMKCDVYSFGVVMLELLTGRKSYDKKRDRGEQFLVRWAIPQLHDIDALAKMVDPSLKGDYPAKSLSHFADVISRCVQSEPEYRPLMSEVVQDLSDMIQREHRRNDSNGDNQYTGRR

SEQ ID NO: 96480 - DNA, 831 bp, Arabidopsis thaliana
  misc_feature (1)..(831): Ceres Seq. ID no. 12733427
  misc_feature: MA Experiment ID: 20001248 Result: Up-regulated in Transcription
  misc_feature: MA Experiment 20001248 PARAMETER Experiment Name: At_Far-red-induction_P Parameter: Age (day) Value: 7
  misc_feature: MA Experiment 20001248 PARAMETER Experiment Name: At_Far-red-induction_P Parameter: Light Value: Far-red vs. White
  misc_feature: MA Experiment 20001248 PARAMETER Experiment Name: At_Far-red-induction_P Parameter: Organism Value: A. thaliana
  misc_feature: MA Experiment 20001248 PARAMETER Experiment Name: At_Far-red-induction_P Parameter: Plant Line Value: Columbia
  misc_feature: MA Experiment 20001248 PARAMETER Experiment Name: At_Far-red-induction_P Parameter: Timepoint (hr) Value: 4
  misc_feature: MA Experiment 20001248 PARAMETER Experiment Name: At_Far-red-induction_P Parameter: Tissue Value: Whole Plant
  misc_feature: MA Experiment ID: 20001451 Result: Up-regulated in Transcription
  misc_feature: MA Experiment 20001451 PARAMETER Experiment Name: At_Far-red-induction_P Parameter: Age (day) Value: 7
  misc_feature: MA Experiment 20001451 PARAMETER Experiment Name: At_Far-red-induction_P Parameter: Light Value: Far-red vs. White
  misc_feature: MA Experiment 20001451 PARAMETER Experiment Name: At_Far-red-induction_P Parameter: Organism Value: A. thaliana
  misc_feature: MA Experiment 20001451 PARAMETER Experiment Name: At_Far-red-induction_P Parameter: Plant Line Value: Columbia
  misc_feature: MA Experiment 20001451 PARAMETER Experiment Name: At_Far-red-induction_P Parameter: Timepoint (hr) Value: 24
  misc_feature: MA Experiment 20001451 PARAMETER Experiment Name: At_Far-red-induction_P Parameter: Tissue Value: Whole Plant
  misc_feature: MA Experiment ID: 20001558 Result: Down-regulated in Transcription
  misc_feature: MA Experiment 20001558 PARAMETER Experiment Name: At_Drought_Soil_Dry_P Parameter: Age (day) Value: 27
  misc_feature: MA Experiment 20001558 PARAMETER Experiment Name: At_Drought_Soil_Dry_P Parameter: Organism Value: A. thaliana
  misc_feature: MA Experiment 20001558 PARAMETER Experiment Name: At_Drought_Soil_Dry_P Parameter: Plant Line Value: WS
  misc_feature: MA Experiment 20001558 PARAMETER Experiment Name: At_Drought_Soil_Dry_P Parameter: Post Timepoint (hr) Value: 6
  misc_feature: MA Experiment 20001558 PARAMETER Experiment Name: At_Drought_Soil_Dry_P Parameter: Post-Treatment Value: Re-Water vs. No Drought
  misc_feature: MA Experiment 20001558 PARAMETER Experiment Name: At_Drought_Soil_Dry_P Parameter: Timepoint (day) Value: 13
  misc_feature: MA Experiment 20001558 PARAMETER Experiment Name: At_Drought_Soil_Dry_P Parameter: Treatment Value: Drought vs. No Drought
gagagagagagatctgatcggtgatttacttttagttcgtcggagagattttgatcagaatgagcggaggaggagacgtgaacatgagtggtggagacagacgcaagggaacggtgaagtggtttgatacacagaaggggtttggtttcatcacacctagcgacggtggtgacgatctcttcgttcaccagtcttccatcagatctgaaggatttcgtagcctcgcagctgaggaatctgttgagttcgacgttgaggttgacaactccggccgtcccaaggctattgaagtgtctggacccgacggtgctcccgttcagggtaacagcggtggtggtggttcatctggtggacgcggtggttttggcggcggtggtggaagaggagggggacgtggtggaggaagctacggaggaggttatggtggaagaggaagcggtggccgtggaggaggtggtggtgataattcttgctttaagtgcggtgaaccaggtcacatggcgagagaatgctctcaaggtggtggaggatacagcggaggcgggggtggtggaaggtacgggtctggcggcggcggaggaggaggtggtggtggcttaagctgctacagctgtggagagtctgggcactttgcaagggattgcactagcggtggtgctcgttgaagcaaaccagactgtgaagaaggggtaaatcagtcatcgatccctcttctccgtgacttctatcaaattattatctatcttttgttattcgactctcttcaatgttgttttcggaatttattaattaggacttgtggttgttatggttatggttccttgtgatttg

SEQ ID NO: 96481 - protein, 201 aa, Arabidopsis thaliana
  peptide (1)..(201): Ceres Seq. ID no. 12733428
  misc_feature (14)..(81): Pfam Name: 'Cold-shock' DNA-binding domain Pfam Description: 'Cold-shock' DNA-binding domain
  misc_feature (1)..(201): Homolog of NCBI NO: 15226451 NR Description: glycine-rich protein (AtGRP2); protein id: supported by cDNA: gi_1063683, supported by cDNA: gi_16323177
  misc_feature (11)..(199): Homolog of NCBI NO: 15234010 NR Description: glycine-rich protein 2 (GRP2); protein id: supported by cDNA: gi_14326486 [Arabidopsis thaliana]
  misc_feature (12)..(199): Homolog of NCBI NO: 121631 NR Description: Glycine-rich protein 2 >gi|72323|pir||KNNT2S
  misc_feature (13)..(197): Homolog of NCBI NO: 29467522 NR Description: P0582D05.12 [Oryza sativa (japonica
  misc_feature (12)..(199): Homolog of NCBI NO: 21322752 NR Description: cold shock protein-1 [Triticum aestivum]
  misc_feature (12)..(195): Homolog of NCBI NO: 40363759 NR Description: putative glycine-rich protein [Triticum aestivum]
  misc_feature (14)..(201): Homolog of NCBI NO: 7442089 NR Description: glycine-rich protein T13L16.11 - Arabidopsis
  misc_feature (14)..(201): Homolog of NCBI NO: 18398546 NR Description: putative glycine-rich, zinc-finger DNA-binding protein id: At2g17870.1, supported by cDNA: gi_14334919, by cDNA: gi_17104540 [Arabidopsis thaliana]
  misc_feature (37)..(195): Homolog of NCBI NO: 21322752 NR Description: cold shock protein-1 [Triticum aestivum]
  misc_feature (14)..(196): Homolog of NCBI NO: 15233440 NR Description: glycine-rich protein; protein id: At4g36020.1, by cDNA: 122924., supported by cDNA: gi_13926192 [Arabidopsis
MSGGGDVNMSGGDRRKGTVKWFDTQKGFGFITPSDGGDDLFVHQSSIRSEGFRSLAAEESVEFDVEVDNSGRPKAIEVSGPDGAPVQGNSGGGGSSGGRGGFGGGGGRGGGRGGGSYGGGYGGRGSGGRGGGGGDNSCFKCGEPGHMARECSQGGGGYSGGGGGGRYGSGGGGGGGGGGLSCYSCGESGHFARDCTSGGAR

SEQ ID NO: 96482 - protein, 193 aa, Arabidopsis thaliana
  peptide (1)..(193): Ceres Seq. ID no. 12733429
  misc_feature (6)..(73): Pfam Name: 'Cold-shock' DNA-binding domain Pfam Description: 'Cold-shock' DNA-binding domain
  misc_feature (1)..(193): Homolog of NCBI NO: 15226451 NR Description: glycine-rich protein (AtGRP2); protein id: supported by cDNA: gi_1063683, supported by cDNA: gi_16323177
  misc_feature (3)..(191): Homolog of NCBI NO: 15234010 NR Description: glycine-rich protein 2 (GRP2); protein id: supported by cDNA: gi_14326486 [Arabidopsis thaliana]
  misc_feature (4)..(191): Homolog of NCBI NO: 121631 NR Description: Glycine-rich protein 2 >gi|72323|pir||KNNT2S
  misc_feature (5)..(189): Homolog of NCBI NO: 29467522 NR Description: P0582D05.12 [Oryza sativa (japonica
  misc_feature (4)..(191): Homolog of NCBI NO: 21322752 NR Description: cold shock protein-1 [Triticum aestivum]
  misc_feature (4)..(187): Homolog of NCBI NO: 40363759 NR Description: putative glycine-rich protein [Triticum aestivum]
  misc_feature (6)..(193): Homolog of NCBI NO: 7442089 NR Description: glycine-rich protein T13L16.11 - Arabidopsis
  misc_feature (6)..(193): Homolog of NCBI NO: 18398546 NR Description: putative glycine-rich, zinc-finger DNA-binding protein id: At2g17870.1, supported by cDNA: gi_14334919, by cDNA: gi_17104540 [Arabidopsis thaliana]
  misc_feature (29)..(187): Homolog of NCBI NO: 21322752 NR Description: cold shock protein-1 [Triticum aestivum]
  misc_feature (6)..(188): Homolog of NCBI NO: 15233440 NR Description: glycine-rich protein; protein id: At4g36020.1, by cDNA: 122924., supported by cDNA: gi_13926192 [Arabidopsis
MSGGDRRKGTVKWFDTQKGFGFITPSDGGDDLFVHQSSIRSEGFRSLAAEESVEFDVEVDNSGRPKAIEVSGPDGAPVQGNSGGGGSSGGRGGFGGGGGRGGGRGGGSYGGGYGGRGSGGRGGGGGDNSCFKCGEPGHMARECSQGGGGYSGGGGGGRYGSGGGGGGGGGGLSCYSCGESGHFARDCTSGGAR

SEQ ID NO: 96483 - DNA, 1950 bp, Arabidopsis thaliana
  misc_feature (1)..(1950): Ceres Seq. ID no. 12733455
  misc_feature: MA Experiment ID: 20000180 Result: Up-regulated in Transcription
  misc_feature: MA Experiment 20000180 PARAMETER Experiment Name: At_Germinating_Seeds_P Parameter: Age (hr) Value: 24 vs. 0
  misc_feature: MA Experiment 20000180 PARAMETER Experiment Name: At_Germinating_Seeds_P Parameter: Tissue Value: Germinating Seeds
  misc_feature: MA Experiment ID: 20000438 Result: Up-regulated in Transcription
  misc_feature: MA Experiment 20000438 PARAMETER Experiment Name: At_Shoots__P Parameter: Age (day) Value: 14
  misc_feature: MA Experiment 20000438 PARAMETER Experiment Name: At_Shoots__P Parameter: Tissue Value: Shoots vs. Whole Plant
  misc_feature: MA Experiment ID: 20000439 Result: Down-regulated in Transcription
  misc_feature: MA Experiment 20000439 PARAMETER Experiment Name: At_Roots__P Parameter: Age (day) Value: 14 vs. 21
  misc_feature: MA Experiment 20000439 PARAMETER Experiment Name: At_Roots__P Parameter: Organism Value: A. thaliana
  misc_feature: MA Experiment 20000439 PARAMETER Experiment Name: At_Roots__P Parameter: Tissue Value: Roots vs. Whole Plant
  misc_feature: MA Experiment ID: 20001248 Result: Down-regulated in Transcription
  misc_feature: MA Experiment 20001248 PARAMETER Experiment Name: At_Far-red-induction_P Parameter: Age (day) Value: 7
  misc_feature: MA Experiment 20001248 PARAMETER Experiment Name: At_Far-red-induction_P Parameter: Light Value: Far-red vs. White
  misc_feature: MA Experiment 20001248 PARAMETER Experiment Name: At_Far-red-induction_P Parameter: Organism Value: A. thaliana
  misc_feature: MA Experiment 20001248 PARAMETER Experiment Name: At_Far-red-induction_P Parameter: Plant Line Value: Columbia
  misc_feature: MA Experiment 20001248 PARAMETER Experiment Name: At_Far-red-induction_P Parameter: Timepoint (hr) Value: 4
  misc_feature: MA Experiment 20001248 PARAMETER Experiment Name: At_Far-red-induction_P Parameter: Tissue Value: Whole Plant
  misc_feature: MA Experiment ID: 20001450 Result: Down-regulated in Transcription
  misc_feature: MA Experiment 20001450 PARAMETER Experiment Name: At_Far-red-induction_P Parameter: Age (day) Value: 7
  misc_feature: MA Experiment 20001450 PARAMETER Experiment Name: At_Far-red-induction_P Parameter: Light Value: Far-red vs. White
  misc_feature: MA Experiment 20001450 PARAMETER Experiment Name: At_Far-red-induction_P Parameter: Organism Value: A. thaliana
  misc_feature: MA Experiment 20001450 PARAMETER Experiment Name: At_Far-red-induction_P Parameter: Plant Line Value: Columbia
  misc_feature: MA Experiment 20001450 PARAMETER Experiment Name: At_Far-red-induction_P Parameter: Timepoint (hr) Value: 8
  misc_feature: MA Experiment 20001450 PARAMETER Experiment Name: At_Far-red-induction_P Parameter: Tissue Value: Whole Plant
atcagttaatcaacgcaacgccgagaagctttttcaggggtttggtgcgttgaatttgtggatcaagaaacaatgcaaattcaatgcaaaaccctaacttttacagtttcttcgattcctttaacccaaagctaccattcccatcttccctcactttacggtcatggaatccttcattcccgagtttcaggagctccgctgtttccggaccaaagtcatcactgaagctgaacaggtttttaagaaactgtgcaagtacgaatcaggagcttgttgttgatggagaaaccggaaatgggtcgatttcggagctccaaggagatgcagcaaatggttcgatttcgccggtggaagtggaagcagaagtagaagaagtgaaggtagatgatttggcgactcagagcatttggggacagatgaaagagatcgtcatgtttaccggacctgccgcgggattgtggctatgtgggccgttgatgagtctcattgatacggcggtgattggtcaaggaagctcactcgaactcgctgctttaggtcctgctaccgtcatctgtgattatttgtgttatacgttcatgttcctctcagttgcgacttcaaatcttgttgctacctctcttgctcggcaggataaagatgaagtacaacatcagatatcgatcttgcttttcattgggttggcttgtggagtcacgatgatggtgttgacaagactgtttggttcctgggcactaactgcttttacaggggtaaagaatgccgacattgttccagcagctaataaatatgttcagattcgtggtttagcatggccagctgttctcattggatgggttgctcaaagtgcaagtcttggtatgaaagactcatggggacctcttaaggctttggcggttgctagtgcaataaacggtgttggtgatgtggtcttatgcacctttctaggatatggtatagcaggtgcagcttgggcaactatggtgtcacaagttgttgctgcttatatgatgatggacgcattgaacaagaaaggatacagcgcattctcattctgtgttccttctccaagtgaacttttgacgatttttggactcgctgcccctgtctttataactatgatgtcaaaggttttgttctatacgctccttgtgtactttgctacatcaatgggtacaaatatcatagctgctcatcaggttatgcttcagatatataccatgagtacggtttggggggagcctctctctcaaactgcacagtcctttatgcctgagcttttattcggaatcaatcgtaatttgcctaaagctagggtgcttctgaagtcactagttatcatcggagctacgctaggaatagtagtcggaaccattggcacagcagttccatggctgttccctggcatcttcacacgtgacaaggttgtcacatccgagatgcacaaggtcataataccgtattttcttgctttatccatcactccaagtactcacagtcttgaaggcaccttactggctggaagagatcttagatatatcagcttgtcaatgactggatgcttagcggtcgctgggcttctacttatgcttctgagcaatggaggatttggtttgagaggctgctggtatgctctcgtgggattccaatgggctcggttttctctatctcttttccgccttctatcgcgggatggtgtactgtactccgaagatacaagccgatacgctgagaaagtgaaagctgcgtagctcagtaagtcaccgtatacctcacaagaaaaagtataatgaacagagaacagcttcattcagttgtagatcaatgggttactctgtttcaagattgtattctttaagaacatgaaaatgtattcgactgaatagaaaagtcttggcattaataggccctgcttcaactcctgtgattcccctgtatataaaagatgat

SEQ ID NO: 96484 - protein, 555 aa, Arabidopsis thaliana
  peptide (1)..(555): Ceres Seq. ID no. 12733456
  misc_feature (126)..(284): Pfam Name: MatE Pfam Description: MatE
  misc_feature (1)..(555): Homolog of NCBI NO: 18399664 NR Description: expressed protein; protein id: At2g21340.1, by cDNA: 20834., supported by cDNA: gi_17065001 [Arabidopsis >gi|20197910|gb|AAD23682.2| expressed protein [Arabidopsis
  misc_feature (14)..(555): Homolog of NCBI NO: 17065002 NR Description: Unknown protein [Arabidopsis thaliana]
  misc_feature (1)..(555): Homolog of NCBI NO: 21554183 NR Description: enhanced disease susceptibility 5 [Arabidopsis
  misc_feature (89)..(554): Homolog of NCBI NO: 22329250 NR Description: putative protein; protein id: At4g39030.1, by cDNA: gi_16589069 [Arabidopsis thaliana] Enhanced disease susceptibility 5 (Eds5) (Salicylic acid
  misc_feature (89)..(465): Homolog of NCBI NO: 7485793 NR Description: hypothetical protein F19H22.130 - Arabidopsis >gi|4539322|emb|CAB38823.1| putative protein [Arabidopsis >gi|7270886|emb|CAB80566.1| putative protein [Arabidopsis
  misc_feature (221)..(454): Homolog of NCBI NO: 25412030 NR Description: hypothetical protein At2g21340 [imported] -
  misc_feature (1)..(305): Homolog of NCBI NO: 25412030 NR Description: hypothetical protein At2g21340 [imported] -
  misc_feature (113)..(538): Homolog of NCBI NO: 29830828 NR Description: putative DNA-damage-inducible protein F
  misc_feature (193)..(538): Homolog of NCBI NO: 15231918 NR Description: MATE efflux family protein, putative; protein id: supported by cDNA: gi_15912322, supported by cDNA: gi_15982819, by cDNA: gi_19310968 [Arabidopsis thaliana] protein [Arabidopsis
  misc_feature (113)..(205): Homolog of NCBI NO: 15231918 NR Description: MATE efflux family protein, putative; protein id: supported by cDNA: gi_15912322, supported by cDNA: gi_15982819, by cDNA: gi_19310968 [Arabidopsis thaliana] protein [Arabidopsis
MQNPNFYSFFDSFNPKLPFPSSLTLRSWNPSFPSFRSSAVSGPKSSLKLNRFLRNCASTNQELVVDGETGNGSISELQGDAANGSISPVEVEAEVEEVKVDDLATQSIWGQMKEIVMFTGPAAGLWLCGPLMSLIDTAVIGQGSSLELAALGPATVICDYLCYTFMFLSVATSNLVATSLARQDKDEVQHQISILLFIGLACGVTMMVLTRLFGSWALTAFTGVKNADIVPAANKYVQIRGLAWPAVLIGWVAQSASLGMKDSWGPLKALAVASAINGVGDVVLCTFLGYGIAGAAWATMVSQVVAAYMMMDALNKKGYSAFSFCVPSPSELLTIFGLAAPVFITMMSKVLFYTLLVYFATSMGTNIIAAHQVMLQIYTMSTVWGEPLSQTAQSFMPELLFGINRNLPKARVLLKSLVIIGATLGIVVGTIGTAVPWLFPGIFTRDKVVTSEMHKVIIPYFLALSITPSTHSLEGTLLAGRDLRYISLSMTGCLAVAGLLLMLLSNGGFGLRGCWYALVGFQWARFSLSLFRLLSRDGVLYSEDTSRYAEKVKAA

SEQ ID NO: 96485 - protein, 444 aa, Arabidopsis thaliana; identical to SEQ ID NO: 41491
  peptide (1)..(444): Ceres Seq. ID no. 12733457
  misc_feature (15)..(173): Pfam Name: MatE Pfam Description: MatE
  misc_feature (1)..(444): Homolog of NCBI NO: 18399664 NR Description: expressed protein; protein id: At2g21340.1, by cDNA: 20834., supported by cDNA: gi_17065001 [Arabidopsis >gi|20197910|gb|AAD23682.2| expressed protein [Arabidopsis
  misc_feature (1)..(444): Homolog of NCBI NO: 17065002 NR Description: Unknown protein [Arabidopsis thaliana]
  misc_feature (1)..(444): Homolog of NCBI NO: 21554183 NR Description: enhanced disease susceptibility 5 [Arabidopsis
  misc_feature (1)..(443): Homolog of NCBI NO: 22329250 NR Description: putative protein; protein id: At4g39030.1, by cDNA: gi_16589069 [Arabidopsis thaliana] Enhanced disease susceptibility 5 (Eds5) (Salicylic acid
  misc_feature (1)..(354): Homolog of NCBI NO: 7485793 NR Description: hypothetical protein F19H22.130 - Arabidopsis >gi|4539322|emb|CAB38823.1| putative protein [Arabidopsis >gi|7270886|emb|CAB80566.1| putative protein [Arabidopsis
  misc_feature (110)..(343): Homolog of NCBI NO: 25412030 NR Description: hypothetical protein At2g21340 [imported] -
  misc_feature (1)..(194): Homolog of NCBI NO: 25412030 NR Description: hypothetical protein At2g21340 [imported] -
  misc_feature (2)..(427): Homolog of NCBI NO: 29830828 NR Description: putative DNA-damage-inducible protein F
  misc_feature (82)..(427): Homolog of NCBI NO: 15231918 NR Description: MATE efflux family protein, putative; protein id: supported by cDNA: gi_15912322, supported by cDNA: gi_15982819, by cDNA: gi_19310968 [Arabidopsis thaliana] protein [Arabidopsis
  misc_feature (2)..(94): Homolog of NCBI NO: 15231918 NR Description: MATE efflux family protein, putative; protein id: supported by cDNA: gi_15912322, supported by cDNA: gi_15982819, by cDNA: gi_19310968 [Arabidopsis thaliana] protein [Arabidopsis

SEQ ID NO: 96486 - protein, 439 aa, Arabidopsis thaliana; identical to SEQ ID NO: 41492
  peptide (1)..(439): Ceres Seq. ID no. 12733458
  misc_feature (10)..(168): Pfam Name: MatE Pfam Description: MatE
  misc_feature (1)..(439): Homolog of NCBI NO: 18399664 NR Description: expressed protein; protein id: At2g21340.1, by cDNA: 20834., supported by cDNA: gi_17065001 [Arabidopsis >gi|20197910|gb|AAD23682.2| expressed protein [Arabidopsis
  misc_feature (1)..(439): Homolog of NCBI NO: 17065002 NR Description: Unknown protein [Arabidopsis thaliana]
  misc_feature (1)..(439): Homolog of NCBI NO: 21554183 NR Description: enhanced disease susceptibility 5 [Arabidopsis
  misc_feature (1)..(438): Homolog of NCBI NO: 22329250 NR Description: putative protein; protein id: At4g39030.1, by cDNA: gi_16589069 [Arabidopsis thaliana] Enhanced disease susceptibility 5 (Eds5) (Salicylic acid
  misc_feature (1)..(349): Homolog of NCBI NO: 7485793 NR Description: hypothetical protein F19H22.130 - Arabidopsis >gi|4539322|emb|CAB38823.1| putative protein [Arabidopsis >gi|7270886|emb|CAB80566.1| putative protein [Arabidopsis
  misc_feature (105)..(338): Homolog of NCBI NO: 25412030 NR Description: hypothetical protein At2g21340 [imported] -
  misc_feature (1)..(189): Homolog of NCBI NO: 25412030 NR Description: hypothetical protein At2g21340 [imported] -
  misc_feature (1)..(422): Homolog of NCBI NO: 29830828 NR Description: putative DNA-damage-inducible protein F
  misc_feature (77)..(422): Homolog of NCBI NO: 15231918 NR Description: MATE efflux family protein, putative; protein id: supported by cDNA: gi_15912322, supported by cDNA: gi_15982819, by cDNA: gi_19310968 [Arabidopsis thaliana] protein [Arabidopsis
  misc_feature (1)..(89): Homolog of NCBI NO: 15231918 NR Description: MATE efflux family protein, putative; protein id: supported by cDNA: gi_15912322, supported by cDNA: gi_15982819, by cDNA: gi_19310968 [Arabidopsis thaliana] protein [Arabidopsis

SEQ ID NO: 96487 - DNA, 2028 bp, Arabidopsis thaliana
  misc_feature (1)..(2028): Ceres Seq. ID no. 12733487
  misc_feature: MA Experiment ID: 20000180 Result: Up-regulated in Transcription
  misc_feature: MA Experiment 20000180 PARAMETER Experiment Name: At_Germinating_Seeds_P Parameter: Age (hr) Value: 24 vs. 0
  misc_feature: MA Experiment 20000180 PARAMETER Experiment Name: At_Germinating_Seeds_P Parameter: Tissue Value: Germinating Seeds
  misc_feature: MA Experiment ID: 20000227 Result: Up-regulated in Transcription
  misc_feature: MA Experiment 20000227 PARAMETER Experiment Name: At_Root-Tips-vs-Tops_P Parameter: Tissue Value: Root Tips vs. Root Tops
  misc_feature: MA Experiment ID: 20000264 Result: Up-regulated in Transcription
  misc_feature: MA Experiment 20000264 PARAMETER Experiment Name: At_Open_Flower_P Parameter: Age (day) Value: 21
  misc_feature: MA Experiment 20000264 PARAMETER Experiment Name: At_Open_Flower_P Parameter: Plant Line Value: WS
  misc_feature: MA Experiment 20000264 PARAMETER Experiment Name: At_Open_Flower_P Parameter: Tissue Value: Open Flower vs. Whole Plant
  misc_feature: MA Experiment ID: 20000265 Result: Up-regulated in Transcription
  misc_feature: MA Experiment 20000265 PARAMETER Experiment Name: At_Open_Flower_P Parameter: Age (day) Value: 21
  misc_feature: MA Experiment 20000265 PARAMETER Experiment Name: At_Open_Flower_P Parameter: Plant Line Value: WS
  misc_feature: MA Experiment 20000265 PARAMETER Experiment Name: At_Open_Flower_P Parameter: Tissue Value: Closed Flower vs. Whole Plant
  misc_feature: MA Experiment ID: 20000286 Result: Up-regulated in Transcription
  misc_feature: MA Experiment 20000286 PARAMETER Experiment Name: At_Open_Flower_P Parameter: Age (day) Value: 21
  misc_feature: MA Experiment 20000286 PARAMETER Experiment Name: At_Open_Flower_P Parameter: Plant Line Value: WS
  misc_feature: MA Experiment 20000286 PARAMETER Experiment Name: At_Open_Flower_P Parameter: Tissue Value: Half Open vs. Whole Plant
  misc_feature: MA Experiment ID: 20000439 Result: Down-regulated in Transcription
  misc_feature: MA Experiment 20000439 PARAMETER Experiment Name: At_Roots__P Parameter: Age (day) Value: 14 vs. 21
  misc_feature: MA Experiment 20000439 PARAMETER Experiment Name: At_Roots__P Parameter: Organism Value: A. thaliana
  misc_feature: MA Experiment 20000439 PARAMETER Experiment Name: At_Roots__P Parameter: Tissue Value: Roots vs. Whole Plant
  misc_feature: MA Experiment ID: 20000451 Result: Down-regulated in Transcription
  misc_feature: MA Experiment 20000451 PARAMETER Experiment Name: At_CS6879_Shoots-Roots_P Parameter: Age (day) Value: 14
  misc_feature: MA Experiment 20000451 PARAMETER Experiment Name: At_CS6879_Shoots-Roots_P Parameter: Organism Value: A. thaliana
  misc_feature: MA Experiment 20000451 PARAMETER Experiment Name: At_CS6879_Shoots-Roots_P Parameter: Plant Line Value: CS6879 vs. WS
  misc_feature: MA Experiment 20000451 PARAMETER Experiment Name: At_CS6879_Shoots-Roots_P Parameter: Tissue Value: Roots
  misc_feature: MA Experiment ID: 20000794 Result: Up-regulated in Transcription
  misc_feature: MA Experiment 20000794 PARAMETER Experiment Name: At_Petals_P Parameter: Age (day) Value: 23-25 days
  misc_feature: MA Experiment 20000794 PARAMETER Experiment Name: At_Petals_P Parameter: Plant Line Value: WS
  misc_feature: MA Experiment 20000794 PARAMETER Experiment Name: At_Petals_P Parameter: Tissue Value: Petals vs. Whole plant
  misc_feature: MA Experiment ID: 20001451 Result: Up-regulated in Transcription
  misc_feature: MA Experiment 20001451 PARAMETER Experiment Name: At_Far-red-induction_P Parameter: Age (day) Value: 7
  misc_feature: MA Experiment 20001451 PARAMETER Experiment Name: At_Far-red-induction_P Parameter: Light Value: Far-red vs. White
  misc_feature: MA Experiment 20001451 PARAMETER Experiment Name: At_Far-red-induction_P Parameter: Organism Value: A. thaliana
  misc_feature: MA Experiment 20001451 PARAMETER Experiment Name: At_Far-red-induction_P Parameter: Plant Line Value: Columbia
  misc_feature: MA Experiment 20001451 PARAMETER Experiment Name: At_Far-red-induction_P Parameter: Timepoint (hr) Value: 24
  misc_feature: MA Experiment 20001451 PARAMETER Experiment Name: At_Far-red-induction_P Parameter: Tissue Value: Whole Plant
  misc_feature: MA Experiment ID: 20001757 Result: Down-regulated in Transcription
  misc_feature: MA Experiment 20001757 PARAMETER Experiment Name: At_50mM_NH4NO3_L-to-H_P Parameter: Timepoint (hr) Value: 6
  misc_feature: MA Experiment 20001757 PARAMETER Experiment Name: At_50mM_NH4NO3_L-to-H_P Parameter: Tissue Value: Leaf
  misc_feature: MA Experiment 20001757 PARAMETER Experiment Name: At_50mM_NH4NO3_L-to-H_P Parameter: Treatment Value: 50mM NH4NO3 vs 100mM Mannitol
  misc_feature: MA Experiment ID: 20001905 Result: Up-regulated in Transcription
  misc_feature: MA Experiment 20001905 PARAMETER Experiment Name: At_Drought_Reproduction_P Parameter: Age (day) Value: 40
  misc_feature: MA Experiment 20001905 PARAMETER Experiment Name: At_Drought_Reproduction_P Parameter: Organism Value: A. thaliana
  misc_feature: MA Experiment 20001905 PARAMETER Experiment Name: At_Drought_Reproduction_P Parameter: Plant Line Value: WS
  misc_feature: MA Experiment 20001905 PARAMETER Experiment Name: At_Drought_Reproduction_P Parameter: Timepoint (day) Value: 10
  misc_feature: MA Experiment 20001905 PARAMETER Experiment Name: At_Drought_Reproduction_P Parameter: Tissue Value: Rosettes
  misc_feature: MA Experiment 20001905 PARAMETER Experiment Name: At_Drought_Reproduction_P Parameter: Treatment Value: Drought vs. No Drought
  misc_feature: MA Experiment ID: 20001910 Result: Up-regulated in Transcription
  misc_feature: MA Experiment 20001910 PARAMETER Experiment Name: At_Drought_Reproduction_P Parameter: Age (day) Value: 37
  misc_feature: MA Experiment 20001910 PARAMETER Experiment Name: At_Drought_Reproduction_P Parameter: Organism Value: A. thaliana
  misc_feature: MA Experiment 20001910 PARAMETER Experiment Name: At_Drought_Reproduction_P Parameter: Plant Line Value: WS
  misc_feature: MA Experiment 20001910 PARAMETER Experiment Name: At_Drought_Reproduction_P Parameter: Timepoint (day) Value: 7
  misc_feature: MA Experiment 20001910 PARAMETER Experiment Name: At_Drought_Reproduction_P Parameter: Tissue Value: Flowers
  misc_feature: MA Experiment 20001910 PARAMETER Experiment Name: At_Drought_Reproduction_P Parameter: Treatment Value: Drought vs. No Drought
gcgcctttcttcttctccctacaaaaatggcttcttctctttctctttctcttaccagggacaagttacaatgtaaataaaggtcaaaccttttttccaataaaacccttttaatggattgtgctaaaactctctctctctttggattttcaaaacaaagaaatcttaaatccagactttaaccatgacggatacaatgtctgctcatatggatcgacataataagcttgattatgacggctcagaggatgaaaagaaaacaaagctttgttccctcaagaagaaagcaatcaatgcctccaacaaattcaaacactccttcaccaagagaactcgaaggaacagccgagtcatgtctgtctctattgttgacgatattgatcttgaagagcttcaagctgttgacgctttccgtcaagctcttatcctagacgagcttctcccttccaaacacgatgatcatcacatgatgctgaggtttctgagggcaaggaagtttgatcttgagaaagcaaagcaaatgtggactgatatgatccattggaggaaagagtttggtgttgacacaatcatggaggactttgatttcaaggagattgatgaagtcctcaagtactaccctcaaggttaccatggtgttgacaaagatggaaggcctgtttacattgagaggctaggccaagttgatgccacaaagctgatgcaagtcactaccatcgataggtatgtcaagtaccatgtgagagagtttgagaagactttcaatatcaaattaccagcttgttccattgctgccaagaagcatattgatcagagcaccaccatcttggatgtgcaaggcgtggggttgaagagcttcagtaaggctgcaagggatcttcttcagcgtatccagaagatcgatagcgataactaccctgagacattgaaccgtatgttcattatcaacgctggtagtggattcaggcttctgtggagcactgtgaaatctttccttgacccaaagaccaccgcaaagattcacgttcttggcaacaaataccaaagcaagctgcttgagattatcgactccaatgaacttcctgagttcttgggtggtaactgcacttgtgcagacaaaggtggatgtatgcgttctgacaaaggtccatggaacgaccctgacatcttcaagatggttcagaacggagaaggaaagtgcccaaggaagactttgtcaaacattgaagagaagacaatctcagtggacgagaacacaacaatgaaatctgattcctttgcgaagaacaaattcgatgcagagaacacaaaattcataccgatgattgacaaaactgtgaatgcttctacatggcctacaaatctccacaagtcaaactatcctgaacctgaagatttatactctgccgtgaagccatcgcagaggagaggaggagaaggttatttattcgggggagtgatgtctttggtgatggggttaatgactgtggtgaggctaacgaagaacatgccaaggaagctcactgaggctgccatttacggtggtgaagtggacaaagcagagactacaatggtgtcaaaccaagagtatatgtcgatggtgaagagaatggccgagttggaggagaaatgtaggtctttggacaatcagcctgcagcgttctcgccagagaaagaacagattctcaccgctgctctcagccgtgtcgacgagctagagcttcagttggctcagaccaaaaagacgctggaggaaaccatggcaacgcagcatgtgataatggcttatatcgacaagaagaaaaagaagaagaagttctttggattctgaaagacttgataatgcctcaagactttgaagaaacctggaaaaatatatataaatccatatttattatatatataaacataaatattattcgtgaagagtttttacagataaaaatgtgggaaattttctttctgtaaatgttttgttgtttgtccctctggaaatatctgaaagcttatgtttaccacttatcaatt

SEQ ID NO: 96488 - protein, 548 aa, Arabidopsis thaliana
  peptide (1)..(548): Ceres Seq. ID no. 12733488
  misc_feature (146)..(326): Pfam Name: CRAL/TRIO domain Pfam Description: CRAL/TRIO domain
  misc_feature (1)..(548): Homolog of NCBI NO: 18399733 NR Description: putative phosphatidylinositol phophatidylcholine protein; protein id: At2g21540.1, supported by cDNA: gi_16209641 thaliana] >gi|16209642|gb|AAL14382.1| At2g21540/F2G1.19
  misc_feature (1)..(520): Homolog of NCBI NO: 15234966 NR Description: SEC14 - like protein; protein id: At4g39180.1
  misc_feature (1)..(371): Homolog of NCBI NO: 25412048 NR Description: hypothetical protein At2g21540 [imported] - thaliana >gi|4567235|gb|AAD23650.1| putative
  misc_feature (14)..(544): Homolog of NCBI NO: 15236152 NR Description: putative protein; protein id: At4g34580.1
  misc_feature (23)..(548): Homolog of NCBI NO: 18419847 NR Description: expressed protein; protein id: At4g36490.1, by cDNA: gi_15215779 [Arabidopsis thaliana] C7A10_870/C7A10_870 [Arabidopsis thaliana]
  misc_feature (23)..(548): Homolog of NCBI NO: 25407729 NR Description: hypothetical protein AT4g36490 [imported] - thaliana >gi|4006913|emb|CAB16843.1| hypothetical protein thaliana] >gi|7270597|emb|CAB80315.1| hypothetical protein
  misc_feature (24)..(548): Homolog of NCBI NO: 15224125 NR Description: putative phosphatidylinositol/phophatidylcholine protein; protein id: At2g18180.1 [Arabidopsis thaliana]
  misc_feature (23)..(548): Homolog of NCBI NO: 14517816 NR Description: phosphatidylinositol transfer-like protein II
  misc_feature (14)..(548): Homolog of NCBI NO: 18398094 NR Description: putative phosphatidylinositol/phosphatidylcholine protein; protein id: At2g16380.1, supported by cDNA: gi_16612282 thaliana] >gi|16612283|gb|AAL27507.1|AF439836_1
  misc_feature (30)..(363): Homolog of NCBI NO: 14486707 NR Description: phosphatidylinositol transfer-like protein IV
MTDTMSAHMDRHNKLDYDGSEDEKKTKLCSLKKKAINASNKFKHSFTKRTRRNSRVMSVSIVDDIDLEELQAVDAFRQALILDELLPSKHDDHHMMLRFLRARKFDLEKAKQMWTDMIHWRKEFGVDTIMEDFDFKEIDEVLKYYPQGYHGVDKDGRPVYIERLGQVDATKLMQVTTIDRYVKYHVREFEKTFNIKLPACSIAAKKHIDQSTTILDVQGVGLKSFSKAARDLLQRIQKIDSDNYPETLNRMFIINAGSGFRLLWSTVKSFLDPKTTAKIHVLGNKYQSKLLEIIDSNELPEFLGGNCTCADKGGCMRSDKGPWNDPDIFKMVQNGEGKCPRKTLSNIEEKTISVDENTTMKSDSFAKNKFDAENTKFIPMIDKTVNASTWPTNLHKSNYPEPEDLYSAVKPSQRRGGEGYLFGGVMSLVMGLMTVVRLTKNMPRKLTEAAIYGGEVDKAETTMVSNQEYMSMVKRMAELEEKCRSLDNQPAAFSPEKEQILTAALSRVDELELQLAQTKKTLEETMATQHVIMAYIDKKKKKKKFFGF

SEQ ID NO: 96489 - protein, 544 aa, Arabidopsis thaliana
  peptide (1)..(544): Ceres Seq. ID no. 12733489
  misc_feature (142)..(322): Pfam Name: CRAL/TRIO domain Pfam Description: CRAL/TRIO domain
  misc_feature (1)..(544): Homolog of NCBI NO: 18399733 NR Description: putative phosphatidylinositol phophatidylcholine protein; protein id: At2g21540.1, supported by cDNA: gi_16209641 thaliana] >gi|16209642|gb|AAL14382.1| At2g21540/F2G1.19
  misc_feature (1)..(516): Homolog of NCBI NO: 15234966 NR Description: SEC14 - like protein; protein id: At4g39180.1
  misc_feature (1)..(367): Homolog of NCBI NO: 25412048 NR Description: hypothetical protein At2g21540 [imported] - thaliana >gi|4567235|gb|AAD23650.1| putative
  misc_feature (10)..(540): Homolog of NCBI NO: 15236152 NR Description: putative protein; protein id: At4g34580.1
  misc_feature (19)..(544): Homolog of NCBI NO: 18419847 NR Description: expressed protein; protein id: At4g36490.1, by cDNA: gi_15215779 [Arabidopsis thaliana] C7A10_870/C7A10_870 [Arabidopsis thaliana]
  misc_feature (19)..(544): Homolog of NCBI NO: 25407729 NR Description: hypothetical protein AT4g36490 [imported] - thaliana >gi|4006913|emb|CAB16843.1| hypothetical protein thaliana] >gi|7270597|emb|CAB80315.1| hypothetical protein
  misc_feature (20)..(544): Homolog of NCBI NO: 15224125 NR Description: putative phosphatidylinositol/phophatidylcholine protein; protein id: At2g18180.1 [Arabidopsis thaliana]
  misc_feature (19)..(544): Homolog of NCBI NO: 14517816 NR Description: phosphatidylinositol transfer-like protein II
  misc_feature (10)..(544): Homolog of NCBI NO: 18398094 NR Description: putative phosphatidylinositol/phosphatidylcholine protein; protein id: At2g16380.1, supported by cDNA: gi_16612282 thaliana] >gi|16612283|gb|AAL27507.1|AF439836_1
  misc_feature (26)..(359): Homolog of NCBI NO: 14486707 NR Description: phosphatidylinositol transfer-like protein IV
MSAHMDRHNKLDYDGSEDEKKTKLCSLKKKAINASNKFKHSFTKRTRRNSRVMSVSIVDDIDLEELQAVDAFRQALILDELLPSKHDDHHMMLRFLRARKFDLEKAKQMWTDMIHWRKEFGVDTIMEDFDFKEIDEVLKYYPQGYHGVDKDGRPVYIERLGQVDATKLMQVTTIDRYVKYHVREFEKTFNIKLPACSIAAKKHIDQSTTILDVQGVGLKSFSKAARDLLQRIQKIDSDNYPETLNRMFIINAGSGFRLLWSTVKSFLDPKTTAKIHVLGNKYQSKLLEIIDSNELPEFLGGNCTCADKGGCMRSDKGPWNDPDIFKMVQNGEGKCPRKTLSNIEEKTISVDENTTMKSDSFAKNKFDAENTKFIPMIDKTVNASTWPTNLHKSNYPEPEDLYSAVKPSQRRGGEGYLFGGVMSLVMGLMTVVRLTKNMPRKLTEAAIYGGEVDKAETTMVSNQEYMSMVKRMAELEEKCRSLDNQPAAFSPEKEQILTAALSRVDELELQLAQTKKTLEETMATQHVIMAYIDKKKKKKKFFGF

SEQ ID NO: 96490 - protein, 540 aa, Arabidopsis thaliana
  peptide (1)..(540): Ceres Seq. ID no. 12733490
  misc_feature (138)..(318): Pfam Name: CRAL/TRIO domain Pfam Description: CRAL/TRIO domain
  misc_feature (1)..(540): Homolog of NCBI NO: 18399733 NR Description: putative phosphatidylinositol phophatidylcholine protein; protein id: At2g21540.1, supported by cDNA: gi_16209641 thaliana] >gi|16209642|gb|AAL14382.1| At2g21540/F2G1.19
  misc_feature (1)..(512): Homolog of NCBI NO: 15234966 NR Description: SEC14 - like protein; protein id: At4g39180.1
  misc_feature (1)..(363): Homolog of NCBI NO: 25412048 NR Description: hypothetical protein At2g21540 [imported] - thaliana >gi|4567235|gb|AAD23650.1| putative
  misc_feature (6)..(536): Homolog of NCBI NO: 15236152 NR Description: putative protein; protein id: At4g34580.1
  misc_feature (15)..(540): Homolog of NCBI NO: 18419847 NR Description: expressed protein; protein id: At4g36490.1, by cDNA: gi_15215779 [Arabidopsis thaliana] C7A10_870/C7A10_870 [Arabidopsis thaliana]
  misc_feature (15)..(540): Homolog of NCBI NO: 25407729 NR Description: hypothetical protein AT4g36490 [imported] - thaliana >gi|4006913|emb|CAB16843.1| hypothetical protein thaliana] >gi|7270597|emb|CAB80315.1| hypothetical protein
  misc_feature (16)..(540): Homolog of NCBI NO: 15224125 NR Description: putative phosphatidylinositol/phophatidylcholine protein; protein id: At2g18180.1 [Arabidopsis thaliana]
  misc_feature (15)..(540): Homolog of NCBI NO: 14517816 NR Description: phosphatidylinositol transfer-like protein II
  misc_feature (6)..(540): Homolog of NCBI NO: 18398094 NR Description: putative phosphatidylinositol/phosphatidylcholine protein; protein id: At2g16380.1, supported by cDNA: gi_16612282 thaliana] >gi|16612283|gb|AAL27507.1|AF439836_1
  misc_feature (22)..(355): Homolog of NCBI NO: 14486707 NR Description: phosphatidylinositol transfer-like protein IV
MDRHNKLDYDGSEDEKKTKLCSLKKKAINASNKFKHSFTKRTRRNSRVMSVSIVDDIDLEELQAVDAFRQALILDELLPSKHDDHHMMLRFLRARKFDLEKAKQMWTDMIHWRKEFGVDTIMEDFDFKEIDEVLKYYPQGYHGVDKDGRPVYIERLGQVDATKLMQVTTIDRYVKYHVREFEKTFNIKLPACSIAAKKHIDQSTTILDVQGVGLKSFSKAARDLLQRIQKIDSDNYPETLNRMFIINAGSGFRLLWSTVKSFLDPKTTAKIHVLGNKYQSKLLEIIDSNELPEFLGGNCTCADKGGCMRSDKGPWNDPDIFKMVQNGEGKCPRKTLSNIEEKTISVDENTTMKSDSFAKNKFDAENTKFIPMIDKTVNASTWPTNLHKSNYPEPEDLYSAVKPSQRRGGEGYLFGGVMSLVMGLMTVVRLTKNMPRKLTEAAIYGGEVDKAETTMVSNQEYMSMVKRMAELEEKCRSLDNQPAAFSPEKEQILTAALSRVDELELQLAQTKKTLEETMATQHVIMAYIDKKKKKKKFFGF

SEQ ID NO: 96491 - DNA, 1465 bp, Arabidopsis thaliana
  misc_feature (1)..(1465): Ceres Seq. ID no. 12733551
  misc_feature: MA Experiment ID: 20000169 Result: Up-regulated in Transcription
  misc_feature: MA Experiment 20000169 PARAMETER Experiment Name: At_100uM_ABA_P Parameter: Age (day) Value: 14
  misc_feature: MA Experiment 20000169 PARAMETER Experiment Name: At_100uM_ABA_P Parameter: Organism Value: A. thaliana
  misc_feature: MA Experiment 20000169 PARAMETER Experiment Name: At_100uM_ABA_P Parameter: Plant Line Value: WS
  misc_feature: MA Experiment 20000169 PARAMETER Experiment Name: At_100uM_ABA_P Parameter: Timepoint (hr) Value: 6
  misc_feature: MA Experiment 20000169 PARAMETER Experiment Name: At_100uM_ABA_P Parameter: Tissue Value: Aerial
  misc_feature: MA Experiment 20000169 PARAMETER Experiment Name: At_100uM_ABA_P Parameter: Treatment Value: 100uM ABA vs. No Treatment
  misc_feature: MA Experiment ID: 20000180 Result: Up-regulated in Transcription
  misc_feature: MA Experiment 20000180 PARAMETER Experiment Name: At_Germinating_Seeds_P Parameter: Age (hr) Value: 24 vs. 0
  misc_feature: MA Experiment 20000180 PARAMETER Experiment Name: At_Germinating_Seeds_P Parameter: Tissue Value: Germinating Seeds
  misc_feature: MA Experiment ID: 20000184 Result: Down-regulated in Transcription
  misc_feature: MA Experiment 20000184 PARAMETER Experiment Name: At_Shoots__P Parameter: Age (day) Value: 7
  misc_feature: MA Experiment 20000184 PARAMETER Experiment Name: At_Shoots__P Parameter: Tissue Value: Shoots vs. Whole Plant
  misc_feature: MA Experiment ID: 20000234 Result: Down-regulated in Transcription
  misc_feature: MA Experiment 20000234 PARAMETER Experiment Name: At_Siliques_P Parameter: Age (day) Value: 21
  misc_feature: MA Experiment 20000234 PARAMETER Experiment Name: At_Siliques_P Parameter: Organism Value: A. thaliana
  misc_feature: MA Experiment 20000234 PARAMETER Experiment Name: At_Siliques_P Parameter: Plant Line Value: WS
  misc_feature: MA Experiment 20000234 PARAMETER Experiment Name: At_Siliques_P Parameter: Tissue Value: Less Than 5mm Siliques vs. Whole Plant
  misc_feature: MA Experiment ID: 20000264 Result: Down-regulated in Transcription
  misc_feature: MA Experiment 20000264 PARAMETER Experiment Name: At_Open_Flower_P Parameter: Age (day) Value: 21
  misc_feature: MA Experiment 20000264 PARAMETER Experiment Name: At_Open_Flower_P Parameter: Plant Line Value: WS
  misc_feature: MA Experiment 20000264 PARAMETER Experiment Name: At_Open_Flower_P Parameter: Tissue Value: Open Flower vs. Whole Plant
  misc_feature: MA Experiment ID: 20000265 Result: Down-regulated in Transcription
  misc_feature: MA Experiment 20000265 PARAMETER Experiment Name: At_Open_Flower_P Parameter: Age (day) Value: 21
  misc_feature: MA Experiment 20000265 PARAMETER Experiment Name: At_Open_Flower_P Parameter: Plant Line Value: WS
  misc_feature: MA Experiment 20000265 PARAMETER Experiment Name: At_Open_Flower_P Parameter: Tissue Value: Closed Flower vs. Whole Plant
  misc_feature: MA Experiment ID: 20000286 Result: Down-regulated in Transcription
  misc_feature: MA Experiment 20000286 PARAMETER Experiment Name: At_Open_Flower_P Parameter: Age (day) Value: 21
  misc_feature: MA Experiment 20000286 PARAMETER Experiment Name: At_Open_Flower_P Parameter: Plant Line Value: WS
  misc_feature: MA Experiment 20000286 PARAMETER Experiment Name: At_Open_Flower_P Parameter: Tissue Value: Half Open vs. Whole Plant
  misc_feature: MA Experiment ID: 20000438 Result: Down-regulated in Transcription
  misc_feature: MA Experiment 20000438 PARAMETER Experiment Name: At_Shoots__P Parameter: Age (day) Value: 14
  misc_feature: MA Experiment 20000438 PARAMETER Experiment Name: At_Shoots__P Parameter: Tissue Value: Shoots vs. Whole Plant
  misc_feature: MA Experiment ID: 20000439 Result: Up-regulated in Transcription
  misc_feature: MA Experiment 20000439 PARAMETER Experiment Name: At_Roots__P Parameter: Age (day) Value: 14 vs. 21
  misc_feature: MA Experiment 20000439 PARAMETER Experiment Name: At_Roots__P Parameter: Organism Value: A. thaliana
  misc_feature: MA Experiment 20000439 PARAMETER Experiment Name: At_Roots__P Parameter: Tissue Value: Roots vs. Whole Plant
  misc_feature: MA Experiment ID: 20000453 Result: Up-regulated in Transcription
  misc_feature: MA Experiment 20000453 PARAMETER Experiment Name: At_100uM_ABA_P Parameter: Age (day) Value: 15
  misc_feature: MA Experiment 20000453 PARAMETER Experiment Name: At_100uM_ABA_P Parameter: Organism Value: A. thaliana
  misc_feature: MA Experiment 20000453 PARAMETER Experiment Name: At_100uM_ABA_P Parameter: Plant Line Value: WS
  misc_feature: MA Experiment 20000453 PARAMETER Experiment Name: At_100uM_ABA_P Parameter: Timepoint (hr) Value: 24
  misc_feature: MA Experiment 20000453 PARAMETER Experiment Name: At_100uM_ABA_P Parameter: Tissue Value: Aerial
  misc_feature: MA Experiment 20000453 PARAMETER Experiment Name: At_100uM_ABA_P Parameter: Treatment Value: 100uM ABA vs. No Treatment
  misc_feature: MA Experiment ID: 20000495 Result: Up-regulated in Transcription
  misc_feature: MA Experiment 20000495 PARAMETER Experiment Name: At_Guard_Cells_P Parameter: Harvest Date Value: 8/2/2002
  misc_feature: MA Experiment 20000495 PARAMETER Experiment Name: At_Guard_Cells_P Parameter: Organism Value: A. thaliana
  misc_feature: MA Experiment 20000495 PARAMETER Experiment Name: At_Guard_Cells_P Parameter: Tissue Value: Guard Cells vs. Leaves
  misc_feature: MA Experiment ID: 20001450 Result: Up-regulated in Transcription
  misc_feature: MA Experiment 20001450 PARAMETER Experiment Name: At_Far-red-induction_P Parameter: Age (day) Value: 7
  misc_feature: MA Experiment 20001450 PARAMETER Experiment Name: At_Far-red-induction_P Parameter: Light Value: Far-red vs. White
  misc_feature: MA Experiment 20001450 PARAMETER Experiment Name: At_Far-red-induction_P Parameter: Organism Value: A. thaliana
  misc_feature: MA Experiment 20001450 PARAMETER Experiment Name: At_Far-red-induction_P Parameter: Plant Line Value: Columbia
  misc_feature: MA Experiment 20001450 PARAMETER Experiment Name: At_Far-red-induction_P Parameter: Timepoint (hr) Value: 8
  misc_feature: MA Experiment 20001450 PARAMETER Experiment Name: At_Far-red-induction_P Parameter: Tissue Value: Whole Plant
  misc_feature: MA Experiment ID: 20001451 Result: Up-regulated in Transcription
  misc_feature: MA Experiment 20001451 PARAMETER Experiment Name: At_Far-red-induction_P Parameter: Age (day) Value: 7
  misc_feature: MA Experiment 20001451 PARAMETER Experiment Name: At_Far-red-induction_P Parameter: Light Value: Far-red vs. White
  misc_feature: MA Experiment 20001451 PARAMETER Experiment Name: At_Far-red-induction_P Parameter: Organism Value: A. thaliana
  misc_feature: MA Experiment 20001451 PARAMETER Experiment Name: At_Far-red-induction_P Parameter: Plant Line Value: Columbia
  misc_feature: MA Experiment 20001451 PARAMETER Experiment Name: At_Far-red-induction_P Parameter: Timepoint (hr) Value: 24
  misc_feature: MA Experiment 20001451 PARAMETER Experiment Name: At_Far-red-induction_P Parameter: Tissue Value: Whole Plant
  misc_feature: MA Experiment ID: 20001773 Result: Up-regulated in Transcription
  misc_feature: MA Experiment 20001773 PARAMETER Experiment Name: At_Far-red-enriched-adult_P Parameter: Age (day) Value: 30
  misc_feature: MA Experiment 20001773 PARAMETER Experiment Name: At_Far-red-enriched-adult_P Parameter: Light Value: Far-red enriched vs. White
  misc_feature: MA Experiment 20001773 PARAMETER Experiment Name: At_Far-red-enriched-adult_P Parameter: Organism Value: A. thaliana
  misc_feature: MA Experiment 20001773 PARAMETER Experiment Name: At_Far-red-enriched-adult_P Parameter: Plant Line Value: Columbia
  misc_feature: MA Experiment 20001773 PARAMETER Experiment Name: At_Far-red-enriched-adult_P Parameter: Timepoint (hr) Value: 48
  misc_feature: MA Experiment 20001773 PARAMETER Experiment Name: At_Far-red-enriched-adult_P Parameter: Tissue Value: Aerial
  misc_feature: MA Experiment ID: 20001904 Result: Up-regulated in Transcription
  misc_feature: MA Experiment 20001904 PARAMETER Experiment Name: At_Drought_Reproduction_P Parameter: Age (day) Value: 37
  misc_feature: MA Experiment 20001904 PARAMETER Experiment Name: At_Drought_Reproduction_P Parameter: Organism Value: A. thaliana
  misc_feature: MA Experiment 20001904 PARAMETER Experiment Name: At_Drought_Reproduction_P Parameter: Plant Line Value: WS
  misc_feature: MA Experiment 20001904 PARAMETER Experiment Name: At_Drought_Reproduction_P Parameter: Timepoint (day) Value: 7
  misc_feature: MA Experiment 20001904 PARAMETER Experiment Name: At_Drought_Reproduction_P Parameter: Tissue Value: Rosettes
  misc_feature: MA Experiment 20001904 PARAMETER Experiment Name: At_Drought_Reproduction_P Parameter: Treatment Value: Drought vs. No Drought
aacaaccagctcaggccataagattcatcccggagaaacaagaacgatgacaacacataaacatagaagaacagagaaaaatctctgttttaagcaatactacaaatggatcctctgttttatcctcactctctatttttttgcttccttctttgtcgaccatgatcaagatcatagatcttctacttccatatcaaagcatcttcttactaaccataaacctaagcttttcgcttctcgtgccatgtttgaatctaaaatccatgatcacaaacttgggtttacctctcaacaacctaacatcaaaacagacgtattcaacaatttgaaaatctacgtctatgacttaccttcaaagttcaacaaagactggttagccaatgatagatgcaccaaccacctctttgccgcggaagtggctctccataaggcgtttctcagcctcgaaggagatgtaaggacggaagatccgtatgaagccgatttcttctttgtccctgtctatgtctcttgcaacttcagcaccattaatggctttccagcgattggccatgcacgatcactcatcaatgacgcgataaagctcgtctcgactcaataccctttttggaaccgaaccagtggctctgatcatgtcttcacggccacacacgactttggctcttgcttccacaccatgagctattgctgatggagtaccaatttttttgagaaactctataattttgcaaacatttggtgttacttttaaccatccatgccaagaggtagagaacgtggtgataccaccgtacatctcaccggaaagtttacacaagactcaaaagaatattccggtaactaaagaacgagacatttgggtttttttccgtggcaagatggaacttcatcccaaaaacatcagtggacgcttctatagcaagcgtgtaaggacgaatatatggcggagttacggtggtgaccggaggttttatctccaacggcaaagatttgccggttaccagtcagaaatagctcgttctgttttctgtttatgtcctctcgggtgggcaccgtggagcccaagacttgttgaatcggtggctcttggctgtgttccggtgattatagccgacgggattcgtttgccgttcccttccaccgtacgttggccggatatttcgctcacggtggcggagagagacgttggaaagctaggggatattttggaacacgtggcggctactaatttgtcagtcatacagagaaacttggaggatccgtctgttaggcgggcccttatgtttaatgttccttcaagagagggagatgccacgtggcaagttttggaggctttgtcaaagaaattgaataggtctgttagaaggtcaaactctttcttgtaaaccaatataattttgacacctgtgtattactattttttttcctggctagtgagatataagagtagtaagctcttaaatgt

SEQ ID NO: 96492 - protein, 229 aa, Arabidopsis thaliana
  peptide (1)..(229): Ceres Seq. ID no. 12733552
  misc_feature (111)..(226): Pfam Name: Exostosin family Pfam Description: Exostosin family
  misc_feature (16)..(226): Homolog of NCBI NO: 25407954 NR Description: hypothetical protein At2g28110 [imported] - thaliana >gi|4063747|gb|AAC98455.1| hypothetical protein
  misc_feature (30)..(226): Homolog of NCBI NO: 15237173 NR Description: putative protein; protein id: At5g22940.1 thaliana] >gi|10177241|dbj|BAB10615.1|
  misc_feature (109)..(226): Homolog of NCBI NO: 34902390 NR Description: Unknown protein [Oryza sativa (japonica
  misc_feature (16)..(229): Homolog of NCBI NO: 30683766 NR Description: expressed protein [Arabidopsis thaliana] unknown protein [Arabidopsis thaliana]
  misc_feature (101)..(224): Homolog of NCBI NO: 34907048 NR Description: contains EST D24978(R2878)~similar to Arabidopsis
  misc_feature (101)..(224): Homolog of NCBI NO: 34907044 NR Description: hypothetical protein~similar to Arabidopsis
  misc_feature (101)..(224): Homolog of NCBI NO: 18424516 NR Description: putative protein; protein id: At5g61840.1, by cDNA: 34861., supported by cDNA: gi_15809825, supported by gi_17978868 [Arabidopsis thaliana] >gi|15809826|gb|AAL06841.1|
  misc_feature (101)..(224): Homolog of NCBI NO: 34907046 NR Description: contains EST D39982(S1682)~similar to Arabidopsis
  misc_feature (76)..(224): Homolog of NCBI NO: 15223522 NR Description: unknown protein; protein id: At1g27440.1 thaliana] >gi|9802541|gb|AAF99743.1|AC004557_22 F17L21.23
  misc_feature (101)..(224): Homolog of NCBI NO: 21592991 NR Description: unknown [Arabidopsis thaliana]
TTSSGHKIHPGETRTMTTHKHRRTEKNLCFKQYYKWILCFILTLYFFASFFVDHDQDHRSSTSISKHLLTNHKPKLFASRAMFESKIHDHKLGFTSQQPNIKTDVFNNLKIYVYDLPSKFNKDWLANDRCTNHLFAAEVALHKAFLSLEGDVRTEDPYEADFFFVPVYVSCNFSTINGFPAIGHARSLINDAIKLVSTQYPFWNRTSGSDHVFTATHDFGSCFHTMSYC

SEQ ID NO: 96493 - protein, 214 aa, Arabidopsis thaliana
  peptide (1)..(214): Ceres Seq. ID no. 12733553
  misc_feature (96)..(211): Pfam Name: Exostosin family Pfam Description: Exostosin family
  misc_feature (1)..(211): Homolog of NCBI NO: 25407954 NR Description: hypothetical protein At2g28110 [imported] - thaliana >gi|4063747|gb|AAC98455.1| hypothetical protein
  misc_feature (15)..(211): Homolog of NCBI NO: 15237173 NR Description: putative protein; protein id: At5g22940.1 thaliana] >gi|10177241|dbj|BAB10615.1|
  misc_feature (94)..(211): Homolog of NCBI NO: 34902390 NR Description: Unknown protein [Oryza sativa (japonica
  misc_feature (1)..(214): Homolog of NCBI NO: 30683766 NR Description: expressed protein [Arabidopsis thaliana] unknown protein [Arabidopsis thaliana]
  misc_feature (86)..(209): Homolog of NCBI NO: 34907048 NR Description: contains EST D24978(R2878)~similar to Arabidopsis
  misc_feature (86)..(209): Homolog of NCBI NO: 34907044 NR Description: hypothetical protein~similar to Arabidopsis
  misc_feature (86)..(209): Homolog of NCBI NO: 18424516 NR Description: putative protein; protein id: At5g61840.1, by cDNA: 34861., supported by cDNA: gi_15809825, supported by gi_17978868 [Arabidopsis thaliana] >gi|15809826|gb|AAL06841.1|
  misc_feature (86)..(209): Homolog of NCBI NO: 34907046 NR Description: contains EST D39982(S1682)~similar to Arabidopsis
  misc_feature (61)..(209): Homolog of NCBI NO: 15223522 NR Description: unknown protein; protein id: At1g27440.1 thaliana] >gi|9802541|gb|AAF99743.1|AC004557_22 F17L21.23
  misc_feature (86)..(209): Homolog of NCBI NO: 21592991 NR Description: unknown [Arabidopsis thaliana]
MTTHKHRRTEKNLCFKQYYKWILCFILTLYFFASFFVDHDQDHRSSTSISKHLLTNHKPKLFASRAMFESKIHDHKLGFTSQQPNIKTDVFNNLKIYVYDLPSKFNKDWLANDRCTNHLFAAEVALHKAFLSLEGDVRTEDPYEADFFFVPVYVSCNFSTINGFPAIGHARSLINDAIKLVSTQYPFWNRTSGSDHVFTATHDFGSCFHTMSYC

SEQ ID NO: 96494 - protein, 168 aa, Arabidopsis thaliana
  peptide (1)..(168): Ceres Seq. ID no. 12733554
  misc_feature (1)..(125): Pfam Name: Exostosin family Pfam Description: Exostosin family
  misc_feature (1)..(168): Homolog of NCBI NO: 25407954 NR Description: hypothetical protein At2g28110 [imported] - thaliana >gi|4063747|gb|AAC98455.1| hypothetical protein
  misc_feature (1)..(164): Homolog of NCBI NO: 15237173 NR Description: putative protein; protein id: At5g22940.1 thaliana] >gi|10177241|dbj|BAB10615.1|
  misc_feature (1)..(163): Homolog of NCBI NO: 34902390 NR Description: Unknown protein [Oryza sativa (japonica
  misc_feature (1)..(157): Homolog of NCBI NO: 34907048 NR Description: contains EST D24978(R2878)~similar to Arabidopsis
  misc_feature (1)..(157): Homolog of NCBI NO: 34907044 NR Description: hypothetical protein~similar to Arabidopsis
  misc_feature (1)..(161): Homolog of NCBI NO: 18424516 NR Description: putative protein; protein id: At5g61840.1, by cDNA: 34861., supported by cDNA: gi_15809825, supported by gi_17978868 [Arabidopsis thaliana] >gi|15809826|gb|AAL06841.1|
  misc_feature (1)..(157): Homolog of NCBI NO: 34907046 NR Description: contains EST D39982(S1682)~similar to Arabidopsis
  misc_feature (1)..(157): Homolog of NCBI NO: 15223522 NR Description: unknown protein; protein id: At1g27440.1 thaliana] >gi|9802541|gb|AAF99743.1|AC004557_22 F17L21.23
  misc_feature (1)..(161): Homolog of NCBI NO: 21592991 NR Description: unknown [Arabidopsis thaliana]
  misc_feature (1)..(157): Homolog of NCBI NO: 37531708 NR Description: unknown protein [Oryza sativa (japonica
MELHPKNISGRFYSKRVRTNIWRSYGGDRRFYLQRQRFAGYQSEIARSVFCLCPLGWAPWSPRLVESVALGCVPVIIADGIRLPFPSTVRWPDISLTVAERDVGKLGDILEHVAATNLSVIQRNLEDPSVRRALMFNVPSREGDATWQVLEALSKKLNRSVRRSNSFL

SEQ ID NO: 96495 - DNA, 1029 bp, Arabidopsis thaliana
  misc_feature (1)..(1029): Ceres Seq. ID no. 12733577
  misc_feature: MA Experiment ID: 20000184 Result: Down-regulated in Transcription
  misc_feature: MA Experiment 20000184 PARAMETER Experiment Name: At_Shoots__P Parameter: Age (day) Value: 7
  misc_feature: MA Experiment 20000184 PARAMETER Experiment Name: At_Shoots__P Parameter: Tissue Value: Shoots vs. Whole Plant
  misc_feature: MA Experiment ID: 20000264 Result: Down-regulated in Transcription
  misc_feature: MA Experiment 20000264 PARAMETER Experiment Name: At_Open_Flower_P Parameter: Age (day) Value: 21
  misc_feature: MA Experiment 20000264 PARAMETER Experiment Name: At_Open_Flower_P Parameter: Plant Line Value: WS
  misc_feature: MA Experiment 20000264 PARAMETER Experiment Name: At_Open_Flower_P Parameter: Tissue Value: Open Flower vs. Whole Plant
  misc_feature: MA Experiment ID: 20000286 Result: Down-regulated in Transcription
  misc_feature: MA Experiment 20000286 PARAMETER Experiment Name: At_Open_Flower_P Parameter: Age (day) Value: 21
  misc_feature: MA Experiment 20000286 PARAMETER Experiment Name: At_Open_Flower_P Parameter: Plant Line Value: WS
  misc_feature: MA Experiment 20000286 PARAMETER Experiment Name: At_Open_Flower_P Parameter: Tissue Value: Half Open vs. Whole Plant
  misc_feature: MA Experiment ID: 20000438 Result: Down-regulated in Transcription
  misc_feature: MA Experiment 20000438 PARAMETER Experiment Name: At_Shoots__P Parameter: Age (day) Value: 14
  misc_feature: MA Experiment 20000438 PARAMETER Experiment Name: At_Shoots__P Parameter: Tissue Value: Shoots vs. Whole Plant
  misc_feature: MA Experiment ID: 20000794 Result: Down-regulated in Transcription
  misc_feature: MA Experiment 20000794 PARAMETER Experiment Name: At_Petals_P Parameter: Age (day) Value: 23-25 days
  misc_feature: MA Experiment 20000794 PARAMETER Experiment Name: At_Petals_P Parameter: Plant Line Value: WS
  misc_feature: MA Experiment 20000794 PARAMETER Experiment Name: At_Petals_P Parameter: Tissue Value: Petals vs. Whole plant
  misc_feature: MA Experiment ID: 20001556 Result: Down-regulated in Transcription
  misc_feature: MA Experiment 20001556 PARAMETER Experiment Name: At_Drought_Soil_Dry_P Parameter: Age (day) Value: 26
  misc_feature: MA Experiment 20001556 PARAMETER Experiment Name: At_Drought_Soil_Dry_P Parameter: Organism Value: A. thaliana
  misc_feature: MA Experiment 20001556 PARAMETER Experiment Name: At_Drought_Soil_Dry_P Parameter: Plant Line Value: WS
  misc_feature: MA Experiment 20001556 PARAMETER Experiment Name: At_Drought_Soil_Dry_P Parameter: Post Timepoint (hr) Value: None
  misc_feature: MA Experiment 20001556 PARAMETER Experiment Name: At_Drought_Soil_Dry_P Parameter: Post-Treatment Value: None
  misc_feature: MA Experiment 20001556 PARAMETER Experiment Name: At_Drought_Soil_Dry_P Parameter: Timepoint (day) Value: 12
  misc_feature: MA Experiment 20001556 PARAMETER Experiment Name: At_Drought_Soil_Dry_P Parameter: Treatment Value: Drought vs. No Drought
  misc_feature: MA Experiment ID: 20001773 Result: Up-regulated in Transcription
  misc_feature: MA Experiment 20001773 PARAMETER Experiment Name: At_Far-red-enriched-adult_P Parameter: Age (day) Value: 30
  misc_feature: MA Experiment 20001773 PARAMETER Experiment Name: At_Far-red-enriched-adult_P Parameter: Light Value: Far-red enriched vs. White
  misc_feature: MA Experiment 20001773 PARAMETER Experiment Name: At_Far-red-enriched-adult_P Parameter: Organism Value: A. thaliana
  misc_feature: MA Experiment 20001773 PARAMETER Experiment Name: At_Far-red-enriched-adult_P Parameter: Plant Line Value: Columbia
  misc_feature: MA Experiment 20001773 PARAMETER Experiment Name: At_Far-red-enriched-adult_P Parameter: Timepoint (hr) Value: 48
  misc_feature: MA Experiment 20001773 PARAMETER Experiment Name: At_Far-red-enriched-adult_P Parameter: Tissue Value: Aerial
  misc_feature: MA Experiment ID: 20001906 Result: Down-regulated in Transcription
  misc_feature: MA Experiment 20001906 PARAMETER Experiment Name: At_Drought_Reproduction_P Parameter: Age (day) Value: 35
  misc_feature: MA Experiment 20001906 PARAMETER Experiment Name: At_Drought_Reproduction_P Parameter: Organism Value: A. thaliana
  misc_feature: MA Experiment 20001906 PARAMETER Experiment Name: At_Drought_Reproduction_P Parameter: Plant Line Value: WS
  misc_feature: MA Experiment 20001906 PARAMETER Experiment Name: At_Drought_Reproduction_P Parameter: Timepoint (day) Value: 5
  misc_feature: MA Experiment 20001906 PARAMETER Experiment Name: At_Drought_Reproduction_P Parameter: Tissue Value: Siliques
  misc_feature: MA Experiment 20001906 PARAMETER Experiment Name: At_Drought_Reproduction_P Parameter: Treatment Value: Drought vs. No Drought
  misc_feature: MA Experiment ID: 20001911 Result: Down-regulated in Transcription
  misc_feature: MA Experiment 20001911 PARAMETER Experiment Name: At_Drought_Reproduction_P Parameter: Age (day) Value: 40
  misc_feature: MA Experiment 20001911 PARAMETER Experiment Name: At_Drought_Reproduction_P Parameter: Organism Value: A. thaliana
  misc_feature: MA Experiment 20001911 PARAMETER Experiment Name: At_Drought_Reproduction_P Parameter: Plant Line Value: WS
  misc_feature: MA Experiment 20001911 PARAMETER Experiment Name: At_Drought_Reproduction_P Parameter: Timepoint (day) Value: 10
  misc_feature: MA Experiment 20001911 PARAMETER Experiment Name: At_Drought_Reproduction_P Parameter: Tissue Value: Flowers
  misc_feature: MA Experiment 20001911 PARAMETER Experiment Name: At_Drought_Reproduction_P Parameter: Treatment Value: Drought vs. No Drought
atgggagagatgaagagtatgcaaatgggtgtgattggagcattgtttctatcagttgcatcttctgtctccattgtcatttgcaacaaagctttgatgaccaatcttggtttcccttttgcaacaacacttactagttggcatttgatggtaacatattgcacacttcatgtggcatataaactaaacttctttgagaataaaccaatagacatgagaactgttgttctctttggcctcctcaatggcatttccattggtctcctcaatctcagcctcggctttaattccatcggcttctatcaaatgaccaaacttgctatcataccattcactgttcttttagaaaccctcttcctcaacaagaagttcagccagaagataaaattctcattgtttttgctgctagttggggttggtatagcatcaatcacagatcttcagctcaattttgttggctctgttctatctctccttgccattgccacaacttgcgtcggccaaattctaacaaacactatccagaagagactgaacgtgacatcaacacaactcctataccaatcagccccgttccaagctgctatactcttcgtctcgggtccttttgtcgacaaatacctcactagcctcaatgttttctccttccattactctcccatcgtcgtggggttcataacgttgtcgtgtttgatagcggtttcggttaacttcagtacgtttttagtgattggaaagacatctccggtgacataccaagtcttgggacatctcaaaacgtgtttggtgctcgcatttggttacactctccttcacgatcccttcactcctcgtaatatcgcaggaatactcatcgctgtcctcgggatgcttctctactcctacttctgctcagttgcttctaaatccaaacaagcctcctccgattccacttttcttgggaaagatagagatacgacgccgcttttgggacaagaaaatgagaaccatcatgaagccaagaaattagacaagcattctccagtatga

SEQ ID NO: 96496 - protein, 342 aa, Arabidopsis thaliana
  peptide (1)..(342): Ceres Seq. ID no. 12733578
  misc_feature (1)..(342): Homolog of NCBI NO: 30683853 NR Description: transporter-related [Arabidopsis thaliana]
  misc_feature (1)..(327): Homolog of NCBI NO: 22329373 NR Description: unknown protein; protein id: At1g06890.1, by cDNA: gi_19423945 [Arabidopsis thaliana] unknown protein [Arabidopsis thaliana]
  misc_feature (1)..(327): Homolog of NCBI NO: 27311731 NR Description: putative integral membrane protein [Arabidopsis
  misc_feature (5)..(323): Homolog of NCBI NO: 13699188 NR Description: putative glucose-6-phosphate/phosphate-tranlocat
  misc_feature (5)..(323): Homolog of NCBI NO: 34896140 NR Description: P0701D05.25 [Oryza sativa (japonica >gi|13486667|dbj|BAB39904.1| contains ESTs
  misc_feature (8)..(324): Homolog of NCBI NO: 13384378 NR Description: putative phosphate translocator [Oryza sativa
  misc_feature (103)..(324): Homolog of NCBI NO: 37535412 NR Description: putative
  misc_feature (8)..(81): Homolog of NCBI NO: 37535412 NR Description: putative
  misc_feature (103)..(327): Homolog of NCBI NO: 25406945 NR Description: hypothetical protein [imported] - Arabidopsis >gi|7523696|gb|AAF63135.1|AC011001_5 Hypothetical protein
  misc_feature (12)..(303): Homolog of NCBI NO: 15238957 NR Description: putative protein; protein id: At5g42420.1 thaliana] >gi|9759478|dbj|BAB10483.1|
MGEMKSMQMGVIGALFLSVASSVSIVICNKALMTNLGFPFATTLTSWHLMVTYCTLHVAYKLNFFENKPIDMRTVVLFGLLNGISIGLLNLSLGFNSIGFYQMTKLAIIPFTVLLETLFLNKKFSQKIKFSLFLLLVGVGIASITDLQLNFVGSVLSLLAIATTCVGQILTNTIQKRLNVTSTQLLYQSAPFQAAILFVSGPFVDKYLTSLNVFSFHYSPIVVGFITLSCLIAVSVNFSTFLVIGKTSPVTYQVLGHLKTCLVLAFGYTLLHDPFTPRNIAGILIAVLGMLLYSYFCSVASKSKQASSDSTFLGKDRDTTPLLGQENENHHEAKKLDKHSPV

SEQ ID NO: 96497 - protein, 339 aa, Arabidopsis thaliana
  peptide (1)..(339): Ceres Seq. ID no. 12733579
  misc_feature (1)..(339): Homolog of NCBI NO: 30683853 NR Description: transporter-related [Arabidopsis thaliana]
  misc_feature (1)..(324): Homolog of NCBI NO: 22329373 NR Description: unknown protein; protein id: At1g06890.1, by cDNA: gi_19423945 [Arabidopsis thaliana] unknown protein [Arabidopsis thaliana]
  misc_feature (1)..(324): Homolog of NCBI NO: 27311731 NR Description: putative integral membrane protein [Arabidopsis
  misc_feature (2)..(320): Homolog of NCBI NO: 13699188 NR Description: putative glucose-6-phosphate/phosphate-tranlocat
  misc_feature (2)..(320): Homolog of NCBI NO: 34896140 NR Description: P0701D05.25 [Oryza sativa (japonica >gi|13486667|dbj|BAB39904.1| contains ESTs
  misc_feature (5)..(321): Homolog of NCBI NO: 13384378 NR Description: putative phosphate translocator [Oryza sativa
  misc_feature (100)..(321): Homolog of NCBI NO: 37535412 NR Description: putative
  misc_feature (5)..(78): Homolog of NCBI NO: 37535412 NR Description: putative
  misc_feature (100)..(324): Homolog of NCBI NO: 25406945 NR Description: hypothetical protein [imported] - Arabidopsis >gi|7523696|gb|AAF63135.1|AC011001_5 Hypothetical protein
  misc_feature (9)..(300): Homolog of NCBI NO: 15238957 NR Description: putative protein; protein id: At5g42420.1 thaliana] >gi|9759478|dbj|BAB10483.1|
MKSMQMGVIGALFLSVASSVSIVICNKALMTNLGFPFATTLTSWHLMVTYCTLHVAYKLNFFENKPIDMRTVVLFGLLNGISIGLLNLSLGFNSIGFYQMTKLAIIPFTVLLETLFLNKKFSQKIKFSLFLLLVGVGIASITDLQLNFVGSVLSLLAIATTCVGQILTNTIQKRLNVTSTQLLYQSAPFQAAILFVSGPFVDKYLTSLNVFSFHYSPIVVGFITLSCLIAVSVNFSTFLVIGKTSPVTYQVLGHLKTCLVLAFGYTLLHDPFTPRNIAGILIAVLGMLLYSYFCSVASKSKQASSDSTFLGKDRDTTPLLGQENENHHEAKKLDKHSPV

SEQ ID NO: 96498 - protein, 336 aa, Arabidopsis thaliana
  peptide (1)..(336): Ceres Seq. ID no. 12733580
  misc_feature (1)..(336): Homolog of NCBI NO: 30683853 NR Description: transporter-related [Arabidopsis thaliana]
  misc_feature (1)..(321): Homolog of NCBI NO: 22329373 NR Description: unknown protein; protein id: At1g06890.1, by cDNA: gi_19423945 [Arabidopsis thaliana] unknown protein [Arabidopsis thaliana]
  misc_feature (1)..(321): Homolog of NCBI NO: 27311731 NR Description: putative integral membrane protein [Arabidopsis
  misc_feature (1)..(317): Homolog of NCBI NO: 13699188 NR Description: putative glucose-6-phosphate/phosphate-tranlocat
  misc_feature (1)..(317): Homolog of NCBI NO: 34896140 NR Description: P0701D05.25 [Oryza sativa (japonica >gi|13486667|dbj|BAB39904.1| contains ESTs
  misc_feature (2)..(318): Homolog of NCBI NO: 13384378 NR Description: putative phosphate translocator [Oryza sativa
  misc_feature (97)..(318): Homolog of NCBI NO: 37535412 NR Description: putative
  misc_feature (2)..(75): Homolog of NCBI NO: 37535412 NR Description: putative
  misc_feature (97)..(321): Homolog of NCBI NO: 25406945 NR Description: hypothetical protein [imported] - Arabidopsis >gi|7523696|gb|AAF63135.1|AC011001_5 Hypothetical protein
  misc_feature (6)..(297): Homolog of NCBI NO: 15238957 NR Description: putative protein; protein id: At5g42420.1 thaliana] >gi|9759478|dbj|BAB10483.1|
MQMGVIGALFLSVASSVSIVICNKALMTNLGFPFATTLTSWHLMVTYCTLHVAYKLNFFENKPIDMRTVVLFGLLNGISIGLLNLSLGFNSIGFYQMTKLAIIPFTVLLETLFLNKKFSQKIKFSLFLLLVGVGIASITDLQLNFVGSVLSLLAIATTCVGQILTNTIQKRLNVTSTQLLYQSAPFQAAILFVSGPFVDKYLTSLNVFSFHYSPIVVGFITLSCLIAVSVNFSTFLVIGKTSPVTYQVLGHLKTCLVLAFGYTLLHDPFTPRNIAGILIAVLGMLLYSYFCSVASKSKQASSDSTFLGKDRDTTPLLGQENENHHEAKKLDKHSPV

SEQ ID NO: 96499 - DNA, 1809 bp, Arabidopsis thaliana
  misc_feature (1)..(1809): Ceres Seq. ID no. 12733585
  misc_feature: MA Experiment ID: 20000180 Result: Down-regulated in Transcription
  misc_feature: MA Experiment 20000180 PARAMETER Experiment Name: At_Germinating_Seeds_P Parameter: Age (hr) Value: 24 vs. 0
  misc_feature: MA Experiment 20000180 PARAMETER Experiment Name: At_Germinating_Seeds_P Parameter: Tissue Value: Germinating Seeds
  misc_feature: MA Experiment ID: 20000184 Result: Up-regulated in Transcription
  misc_feature: MA Experiment 20000184 PARAMETER Experiment Name: At_Shoots__P Parameter: Age (day) Value: 7
  misc_feature: MA Experiment 20000184 PARAMETER Experiment Name: At_Shoots__P Parameter: Tissue Value: Shoots vs. Whole Plant
  misc_feature: MA Experiment ID: 20000495 Result: Up-regulated in Transcription
  misc_feature: MA Experiment 20000495 PARAMETER Experiment Name: At_Guard_Cells_P Parameter: Harvest Date Value: 8/2/2002
  misc_feature: MA Experiment 20000495 PARAMETER Experiment Name: At_Guard_Cells_P Parameter: Organism Value: A. thaliana
  misc_feature: MA Experiment 20000495 PARAMETER Experiment Name: At_Guard_Cells_P Parameter: Tissue Value: Guard Cells vs. Leaves
  misc_feature: MA Experiment ID: 20001905 Result: Down-regulated in Transcription
  misc_feature: MA Experiment 20001905 PARAMETER Experiment Name: At_Drought_Reproduction_P Parameter: Age (day) Value: 40
  misc_feature: MA Experiment 20001905 PARAMETER Experiment Name: At_Drought_Reproduction_P Parameter: Organism Value: A. thaliana
  misc_feature: MA Experiment 20001905 PARAMETER Experiment Name: At_Drought_Reproduction_P Parameter: Plant Line Value: WS
  misc_feature: MA Experiment 20001905 PARAMETER Experiment Name: At_Drought_Reproduction_P Parameter: Timepoint (day) Value: 10
  misc_feature: MA Experiment 20001905 PARAMETER Experiment Name: At_Drought_Reproduction_P Parameter: Tissue Value: Rosettes
  misc_feature: MA Experiment 20001905 PARAMETER Experiment Name: At_Drought_Reproduction_P Parameter: Treatment Value: Drought vs. No Drought
ttgctcctccctctcttcctctctctatctctctctgcaaaaaccctaaatttcctccgatttcaccatcttcaatctccttcacaccccaacttagcctcttaatcactccccaagctaaaccctccaacgattttccatgattcgaagatacagagccttagcgatgaagaaaaagccctaaaaaccaaagctttgatctctccgaaatcggagtttctttctttgtttggtaaatttggttttcgaaatgtataagaaccagctacaagagttggctcagaggagctgctttaatcttccttcgtatacttgtattagggaaggtcctgaccacgcgccgcgattcaaggctactgttaactttaacggcgagatctttgagagtcctcagtattgttctactcttcgtcaagctgaacactctgctgctgaagttgctctcaatgctctctctaatcgtggtccttctcactctcttgccgccaggatcttggatgagacgggtgtgtataagaatcttttgcaagagatagctcaaagagtgggagctcctttaccgcgatatactactttcaggtcaggtcttggtcaccaacctgtgtttactggtactgtagaattggctggaattacgttcactggagatccagctaagaacaagaagcaagcagagaagaatgctgcaatggctgcttggtcttccctaaaacaattggcaaaagaaacatcaagttcaatgcctgagcctgagaacattgacgaactagaacaggtgattatagcaagagctttgataaactatcgtatcaaggaaaacattggcacaggaagctcctcgagtgccccagttccatttgcaaagaagttctttatgcagaaccttagaccaacaagtccacagccttctcctgcaaccacatcgagaatcttaccctttatttgcccaaaacaaccttccagaagcagcagatcatccttagcagcaacttccggtattgacagaattatggcagcagccttggaaagccgcagctaccagcggcctcagcagagatttgcaaatccgccttatgttcctatgaggcaatttagatcgcaatgccatgggatggctccacctgtcacaatcagaaccgctgtaccggtcttctctgcacctccaatgcctcctccaccatgtacaaacaacactcagctaccttcttctgtgtatgtcccatcgctgatgcgaactgcaccacctgtgaggatcgcgccgcctgtcacaatcagaaccgcggtgcccgtatttgcttctgcgccaccggttagaattagaaccgctgtgaagcccacagttgaggcaggagaaacccgcatatcatcagtccaagaaaaggagagtataccagtcttgcctgatagtcttgaaattggagtagaaggaagtactataacaattacagattgtgagaaaacagcgtcaaaggaaaccgagagagcagagtttaaggattcatcgaaaggagaaccggagacagcaagagagcgactggagaacctaaagatctgatgccttgaagactgtctctgggtttagttttttttgaggttggtttctgaaaattgttacattagtaatctcgttcgttattatactcggtggatcgagtagtttgataatccgaaagatttgtattatattggggagttttgggaagaacctggccatctctggattgtagaattgtatcagtttcgcttcctattcagtttgtttgtgtcctttttctcatcttttataaatctgttacctatcgttgttcc

SEQ ID NO: 96500 - protein, 434 aa, Arabidopsis thaliana
  peptide (1)..(434): Ceres Seq. ID no. 12733586
  misc_feature (2)..(68): Pfam Name: Double-stranded RNA binding motif Pfam Description: Double-stranded RNA binding motif
  misc_feature (1)..(434): Homolog of NCBI NO: 18401724 NR Description: expressed protein; protein id: At2g28380.1, by cDNA: gi_14334605, supported by cDNA: gi_17065633 [Arabidopsis >gi|25407980|pir||B84684 hypothetical protein At2g28380
  misc_feature (1)..(384): Homolog of NCBI NO: 37535422 NR Description: putative extensin [Oryza sativa (japonica
  misc_feature (1)..(321): Homolog of NCBI NO: 9759153 NR Description: gb|AAD20688.1~gene_id:MEE6.14~similar to unknown
  misc_feature (1)..(189): Homolog of NCBI NO: 11994159 NR Description: gb|AAD20688.1~gene_id:MQP17.5~similar to unknown
  misc_feature (1)..(189): Homolog of NCBI NO: 30693732 NR Description: expressed protein [Arabidopsis thaliana]
  misc_feature (1)..(189): Homolog of NCBI NO: 15231653 NR Description: hypothetical protein; protein id: At3g26932.1
  misc_feature (1)..(143): Homolog of NCBI NO: 40788412 NR Description: hypothetical protein [Oryza sativa (japonica
  misc_feature (1)..(171): Homolog of NCBI NO: 18389232 NR Description: unknown protein [Arabidopsis thaliana]
  misc_feature (1)..(171): Homolog of NCBI NO: 22331912 NR Description: putative protein; protein id: At3g62800.1, by cDNA: gi_18389231 [Arabidopsis thaliana]
  misc_feature (71)..(171): Homolog of NCBI NO: 11283535 NR Description: hypothetical protein F26K9.230 - Arabidopsis >gi|7362760|emb|CAB83130.1| putative protein [Arabidopsis
MYKNQLQELAQRSCFNLPSYTCIREGPDHAPRFKATVNFNGEIFESPQYCSTLRQAEHSAAEVALNALSNRGPSHSLAARILDETGVYKNLLQEIAQRVGAPLPRYTTFRSGLGHQPVFTGTVELAGITFTGDPAKNKKQAEKNAAMAAWSSLKQLAKETSSSMPEPENIDELEQVIIARALINYRIKENIGTGSSSSAPVPFAKKFFMQNLRPTSPQPSPATTSRILPFICPKQPSRSSRSSLAATSGIDRIMAAALESRSYQRPQQRFANPPYVPMRQFRSQCHGMAPPVTIRTAVPVFSAPPMPPPPCTNNTQLPSSVYVPSLMRTAPPVRIAPPVTIRTAVPVFASAPPVRIRTAVKPTVEAGETRISSVQEKESIPVLPDSLEIGVEGSTITITDCEKTASKETERAEFKDSSKGEPETARERLENLKI

SEQ ID NO: 96501 - protein, 288 aa, Arabidopsis thaliana
  peptide (1)..(288): Ceres Seq. ID no. 12733587
  misc_feature (1)..(288): Homolog of NCBI NO: 18401724 NR Description: expressed protein; protein id: At2g28380.1, by cDNA: gi_14334605, supported by cDNA: gi_17065633 [Arabidopsis >gi|25407980|pir||B84684 hypothetical protein At2g28380
  misc_feature (1)..(238): Homolog of NCBI NO: 37535422 NR Description: putative extensin [Oryza sativa (japonica
  misc_feature (1)..(175): Homolog of NCBI NO: 9759153 NR Description: gb|AAD20688.1~gene_id:MEE6.14~similar to unknown
  misc_feature (1)..(43): Homolog of NCBI NO: 11994159 NR Description: gb|AAD20688.1~gene_id:MQP17.5~similar to unknown
  misc_feature (1)..(43): Homolog of NCBI NO: 30693732 NR Description: expressed protein [Arabidopsis thaliana]
  misc_feature (1)..(43): Homolog of NCBI NO: 15231653 NR Description: hypothetical protein; protein id: At3g26932.1
  misc_feature (1)..(25): Homolog of NCBI NO: 18389232 NR Description: unknown protein [Arabidopsis thaliana]
  misc_feature (1)..(25): Homolog of NCBI NO: 22331912 NR Description: putative protein; protein id: At3g62800.1, by cDNA: gi_18389231 [Arabidopsis thaliana]
  misc_feature (1)..(25): Homolog of NCBI NO: 11283535 NR Description: hypothetical protein F26K9.230 - Arabidopsis >gi|7362760|emb|CAB83130.1| putative protein [Arabidopsis
  misc_feature (1)..(12): Homolog of NCBI NO: 27262831 NR Description: dsRNA-binding protein [Brassica oleracea var.
MAAWSSLKQLAKETSSSMPEPENIDELEQVIIARALINYRIKENIGTGSSSSAPVPFAKKFFMQNLRPTSPQPSPATTSRILPFICPKQPSRSSRSSLAATSGIDRIMAAALESRSYQRPQQRFANPPYVPMRQFRSQCHGMAPPVTIRTAVPVFSAPPMPPPPCTNNTQLPSSVYVPSLMRTAPPVRIAPPVTIRTAVPVFASAPPVRIRTAVKPTVEAGETRISSVQEKESIPVLPDSLEIGVEGSTITITDCEKTASKETERAEFKDSSKGEPETARERLENLKI

SEQ ID NO: 96502 - protein, 271 aa, Arabidopsis thaliana
  peptide (1)..(271): Ceres Seq. ID no. 12733588
  misc_feature (1)..(271): Homolog of NCBI NO: 18401724 NR Description: expressed protein; protein id: At2g28380.1, by cDNA: gi_14334605, supported by cDNA: gi_17065633 [Arabidopsis >gi|25407980|pir||B84684 hypothetical protein At2g28380
  misc_feature (1)..(221): Homolog of NCBI NO: 37535422 NR Description: putative extensin [Oryza sativa (japonica
  misc_feature (1)..(158): Homolog of NCBI NO: 9759153 NR Description: gb|AAD20688.1~gene_id:MEE6.14~similar to unknown
  misc_feature (1)..(26): Homolog of NCBI NO: 11994159 NR Description: gb|AAD20688.1~gene_id:MQP17.5~similar to unknown
  misc_feature (1)..(26): Homolog of NCBI NO: 30693732 NR Description: expressed protein [Arabidopsis thaliana]
  misc_feature (1)..(26): Homolog of NCBI NO: 15231653 NR Description: hypothetical protein; protein id: At3g26932.1
  misc_feature (1)..(150): Homolog of NCBI NO: 18391056 NR Description: expressed protein; protein id: At1g09700.1, by cDNA: gi_12247456, supported by cDNA: gi_15451101, supported cDNA: gi_20148392 [Arabidopsis thaliana] >gi|25402565|pir||H86230
  misc_feature (1)..(32): Homolog of NCBI NO: 34909942 NR Description: P0695H10.7 [Oryza sativa (japonica
  misc_feature (1)..(40): Homolog of NCBI NO: 40253891 NR Description: unknown protein [Oryza sativa (japonica
MPEPENIDELEQVIIARALINYRIKENIGTGSSSSAPVPFAKKFFMQNLRPTSPQPSPATTSRILPFICPKQPSRSSRSSLAATSGIDRIMAAALESRSYQRPQQRFANPPYVPMRQFRSQCHGMAPPVTIRTAVPVFSAPPMPPPPCTNNTQLPSSVYVPSLMRTAPPVRIAPPVTIRTAVPVFASAPPVRIRTAVKPTVEAGETRISSVQEKESIPVLPDSLEIGVEGSTITITDCEKTASKETERAEFKDSSKGEPETARERLENLKI

SEQ ID NO: 96503 - DNA, 1536 bp, Arabidopsis thaliana
  misc_feature (1)..(1536): Ceres Seq. ID no. 12733622
  misc_feature: MA Experiment ID: 20000169 Result: Up-regulated in Transcription
  misc_feature: MA Experiment 20000169 PARAMETER Experiment Name: At_100uM_ABA_P Parameter: Age (day) Value: 14
  misc_feature: MA Experiment 20000169 PARAMETER Experiment Name: At_100uM_ABA_P Parameter: Organism Value: A. thaliana
  misc_feature: MA Experiment 20000169 PARAMETER Experiment Name: At_100uM_ABA_P Parameter: Plant Line Value: WS
  misc_feature: MA Experiment 20000169 PARAMETER Experiment Name: At_100uM_ABA_P Parameter: Timepoint (hr) Value: 6
  misc_feature: MA Experiment 20000169 PARAMETER Experiment Name: At_100uM_ABA_P Parameter: Tissue Value: Aerial
  misc_feature: MA Experiment 20000169 PARAMETER Experiment Name: At_100uM_ABA_P Parameter: Treatment Value: 100uM ABA vs. No Treatment
  misc_feature: MA Experiment ID: 20000171 Result: Down-regulated in Transcription
  misc_feature: MA Experiment 20000171 PARAMETER Experiment Name: At_42deg_Heat_P Parameter: Age (day) Value: 14
  misc_feature: MA Experiment 20000171 PARAMETER Experiment Name: At_42deg_Heat_P Parameter: Organism Value: A. thaliana
  misc_feature: MA Experiment 20000171 PARAMETER Experiment Name: At_42deg_Heat_P Parameter: Plant Line Value: WS
  misc_feature: MA Experiment 20000171 PARAMETER Experiment Name: At_42deg_Heat_P Parameter: Temperature (deg C) Value: 42 vs. 22
  misc_feature: MA Experiment 20000171 PARAMETER Experiment Name: At_42deg_Heat_P Parameter: Timepoint (hr) Value: 1
  misc_feature: MA Experiment 20000171 PARAMETER Experiment Name: At_42deg_Heat_P Parameter: Tissue Value: Aerial
  misc_feature: MA Experiment ID: 20000173 Result: Down-regulated in Transcription
  misc_feature: MA Experiment 20000173 PARAMETER Experiment Name: At_42deg_Heat_P Parameter: Age (day) Value: 14
  misc_feature: MA Experiment 20000173 PARAMETER Experiment Name: At_42deg_Heat_P Parameter: Organism Value: A. thaliana
  misc_feature: MA Experiment 20000173 PARAMETER Experiment Name: At_42deg_Heat_P Parameter: Plant Line Value: WS
  misc_feature: MA Experiment 20000173 PARAMETER Experiment Name: At_42deg_Heat_P Parameter: Temperature (deg C) Value: 42 vs. 22
  misc_feature: MA Experiment 20000173 PARAMETER Experiment Name: At_42deg_Heat_P Parameter: Timepoint (hr) Value: 6
  misc_feature: MA Experiment 20000173 PARAMETER Experiment Name: At_42deg_Heat_P Parameter: Tissue Value: Aerial
  misc_feature: MA Experiment ID: 20000179 Result: Down-regulated in Transcription
  misc_feature: MA Experiment 20000179 PARAMETER Experiment Name: At_Germinating_Seeds_P Parameter: Age (hr) Value: 6 vs. 0
  misc_feature: MA Experiment 20000179 PARAMETER Experiment Name: At_Germinating_Seeds_P Parameter: Tissue Value: Germinating Seeds
  misc_feature: MA Experiment ID: 20000180 Result: Down-regulated in Transcription
  misc_feature: MA Experiment 20000180 PARAMETER Experiment Name: At_Germinating_Seeds_P Parameter: Age (hr) Value: 24 vs. 0
  misc_feature: MA Experiment 20000180 PARAMETER Experiment Name: At_Germinating_Seeds_P Parameter: Tissue Value: Germinating Seeds
  misc_feature: MA Experiment ID: 20000182 Result: Up-regulated in Transcription
  misc_feature: MA Experiment 20000182 PARAMETER Experiment Name: At_2mM_SA_P Parameter: Age (day) Value: 14
  misc_feature: MA Experiment 20000182 PARAMETER Experiment Name: At_2mM_SA_P Parameter: Organism Value: A. thaliana
  misc_feature: MA Experiment 20000182 PARAMETER Experiment Name: At_2mM_SA_P Parameter: Plant Line Value: WS
  misc_feature: MA Experiment 20000182 PARAMETER Experiment Name: At_2mM_SA_P Parameter: Timepoint (hr) Value: 6
  misc_feature: MA Experiment 20000182 PARAMETER Experiment Name: At_2mM_SA_P Parameter: Tissue Value: Aerial
  misc_feature: MA Experiment 20000182 PARAMETER Experiment Name: At_2mM_SA_P Parameter: Treatment Value: 2mM SA vs. No Treatment
  misc_feature: MA Experiment ID: 20000184 Result: Down-regulated in Transcription
  misc_feature: MA Experiment 20000184 PARAMETER Experiment Name: At_Shoots__P Parameter: Age (day) Value: 7
  misc_feature: MA Experiment 20000184 PARAMETER Experiment Name: At_Shoots__P Parameter: Tissue Value: Shoots vs. Whole Plant
  misc_feature: MA Experiment ID: 20000185 Result: Down-regulated in Transcription
  misc_feature: MA Experiment 20000185 PARAMETER Experiment Name: At_Roots__P Parameter: Age (day) Value: 7 vs. 21
  misc_feature: MA Experiment 20000185 PARAMETER Experiment Name: At_Roots__P Parameter: Organism Value: A. thaliana
  misc_feature: MA Experiment 20000185 PARAMETER Experiment Name: At_Roots__P Parameter: Tissue Value: Roots vs. Whole Plant
  misc_feature: MA Experiment ID: 20000234 Result: Down-regulated in Transcription
  misc_feature: MA Experiment 20000234 PARAMETER Experiment Name: At_Siliques_P Parameter: Age (day) Value: 21
  misc_feature: MA Experiment 20000234 PARAMETER Experiment Name: At_Siliques_P Parameter: Organism Value: A. thaliana
  misc_feature: MA Experiment 20000234 PARAMETER Experiment Name: At_Siliques_P Parameter: Plant Line Value: WS
  misc_feature: MA Experiment 20000234 PARAMETER Experiment Name: At_Siliques_P Parameter: Tissue Value: Less Than 5mm Siliques vs. Whole Plant
  misc_feature: MA Experiment ID: 20000235 Result: Down-regulated in Transcription
  misc_feature: MA Experiment 20000235 PARAMETER Experiment Name: At_Siliques_P Parameter: Age (day) Value: 21
  misc_feature: MA Experiment 20000235 PARAMETER Experiment Name: At_Siliques_P Parameter: Organism Value: A. thaliana
  misc_feature: MA Experiment 20000235 PARAMETER Experiment Name: At_Siliques_P Parameter: Plant Line Value: WS
  misc_feature: MA Experiment 20000235 PARAMETER Experiment Name: At_Siliques_P Parameter: Tissue Value: 5-10mm Siliques vs. Whole Plant
  misc_feature: MA Experiment ID: 20000265 Result: Down-regulated in Transcription
  misc_feature: MA Experiment 20000265 PARAMETER Experiment Name: At_Open_Flower_P Parameter: Age (day) Value: 21
  misc_feature: MA Experiment 20000265 PARAMETER Experiment Name: At_Open_Flower_P Parameter: Plant Line Value: WS
  misc_feature: MA Experiment 20000265 PARAMETER Experiment Name: At_Open_Flower_P Parameter: Tissue Value: Closed Flower vs. Whole Plant
  misc_feature: MA Experiment ID: 20000436 Result: Up-regulated in Transcription
  misc_feature: MA Experiment 20000436 PARAMETER Experiment Name: At_Drought_P Parameter: Age (day) Value: 7
  misc_feature: MA Experiment 20000436 PARAMETER Experiment Name: At_Drought_P Parameter: Organism Value: A. thaliana
  misc_feature: MA Experiment 20000436 PARAMETER Experiment Name: At_Drought_P Parameter: Plant Line Value: WS
  misc_feature: MA Experiment 20000436 PARAMETER Experiment Name: At_Drought_P Parameter: Timepoint (hr) Value: 12
  misc_feature: MA Experiment 20000436 PARAMETER Experiment Name: At_Drought_P Parameter: Tissue Value: Whole Plant
  misc_feature: MA Experiment 20000436 PARAMETER Experiment Name: At_Drought_P Parameter: Treatment Value: Drought vs. No Drought
  misc_feature: MA Experiment ID: 20000437 Result: Up-regulated in Transcription
  misc_feature: MA Experiment 20000437 PARAMETER Experiment Name: At_Drought_P Parameter: Age (day) Value: 8
  misc_feature: MA Experiment 20000437 PARAMETER Experiment Name: At_Drought_P Parameter: Organism Value: A. thaliana
  misc_feature: MA Experiment 20000437 PARAMETER Experiment Name: At_Drought_P Parameter: Plant Line Value: WS
  misc_feature: MA Experiment 20000437 PARAMETER Experiment Name: At_Drought_P Parameter: Timepoint (hr) Value: 24
  misc_feature: MA Experiment 20000437 PARAMETER Experiment Name: At_Drought_P Parameter: Tissue Value: Whole Plant
  misc_feature: MA Experiment 20000437 PARAMETER Experiment Name: At_Drought_P Parameter: Treatment Value: Drought vs. No Drought
  misc_feature: MA Experiment ID: 20000438 Result: Down-regulated in Transcription
  misc_feature: MA Experiment 20000438 PARAMETER Experiment Name: At_Shoots__P Parameter: Age (day) Value: 14
  misc_feature: MA Experiment 20000438 PARAMETER Experiment Name: At_Shoots__P Parameter: Tissue Value: Shoots vs. Whole Plant
  misc_feature: MA Experiment ID: 20000439 Result: Down-regulated in Transcription
  misc_feature: MA Experiment 20000439 PARAMETER Experiment Name: At_Roots__P Parameter: Age (day) Value: 14 vs. 21
  misc_feature: MA Experiment 20000439 PARAMETER Experiment Name: At_Roots__P Parameter: Organism Value: A. thaliana
  misc_feature: MA Experiment 20000439 PARAMETER Experiment Name: At_Roots__P Parameter: Tissue Value: Roots vs. Whole Plant
  misc_feature: MA Experiment ID: 20000794 Result: Up-regulated in Transcription
  misc_feature: MA Experiment 20000794 PARAMETER Experiment Name: At_Petals_P Parameter: Age (day) Value: 23-25 days
  misc_feature: MA Experiment 20000794 PARAMETER Experiment Name: At_Petals_P Parameter: Plant Line Value: WS
  misc_feature: MA Experiment 20000794 PARAMETER Experiment Name: At_Petals_P Parameter: Tissue Value: Petals vs. Whole plant
  misc_feature: MA Experiment ID: 20001247 Result: Up-regulated in Transcription
  misc_feature: MA Experiment 20001247 PARAMETER Experiment Name: At_Far-red-induction_P Parameter: Age (day) Value: 7
  misc_feature: MA Experiment 20001247 PARAMETER Experiment Name: At_Far-red-induction_P Parameter: Light Value: Far-red vs. White
  misc_feature: MA Experiment 20001247 PARAMETER Experiment Name: At_Far-red-induction_P Parameter: Organism Value: A. thaliana
  misc_feature: MA Experiment 20001247 PARAMETER Experiment Name: At_Far-red-induction_P Parameter: Plant Line Value: Columbia
  misc_feature: MA Experiment 20001247 PARAMETER Experiment Name: At_Far-red-induction_P Parameter: Timepoint (hr) Value: 1
  misc_feature: MA Experiment 20001247 PARAMETER Experiment Name: At_Far-red-induction_P Parameter: Tissue Value: Whole Plant
  misc_feature: MA Experiment ID: 20001904 Result: Up-regulated in Transcription
  misc_feature: MA Experiment 20001904 PARAMETER Experiment Name: At_Drought_Reproduction_P Parameter: Age (day) Value: 37
  misc_feature: MA Experiment 20001904 PARAMETER Experiment Name: At_Drought_Reproduction_P Parameter: Organism Value: A. thaliana
  misc_feature: MA Experiment 20001904 PARAMETER Experiment Name: At_Drought_Reproduction_P Parameter: Plant Line Value: WS
  misc_feature: MA Experiment 20001904 PARAMETER Experiment Name: At_Drought_Reproduction_P Parameter: Timepoint (day) Value: 7
  misc_feature: MA Experiment 20001904 PARAMETER Experiment Name: At_Drought_Reproduction_P Parameter: Tissue Value: Rosettes
  misc_feature: MA Experiment 20001904 PARAMETER Experiment Name: At_Drought_Reproduction_P Parameter: Treatment Value: Drought vs. No Drought
  misc_feature: MA Experiment ID: 20001911 Result: Up-regulated in Transcription
  misc_feature: MA Experiment 20001911 PARAMETER Experiment Name: At_Drought_Reproduction_P Parameter: Age (day) Value: 40
  misc_feature: MA Experiment 20001911 PARAMETER Experiment Name: At_Drought_Reproduction_P Parameter: Organism Value: A. thaliana
  misc_feature: MA Experiment 20001911 PARAMETER Experiment Name: At_Drought_Reproduction_P Parameter: Plant Line Value: WS
  misc_feature: MA Experiment 20001911 PARAMETER Experiment Name: At_Drought_Reproduction_P Parameter: Timepoint (day) Value: 10
  misc_feature: MA Experiment 20001911 PARAMETER Experiment Name: At_Drought_Reproduction_P Parameter: Tissue Value: Flowers
  misc_feature: MA Experiment 20001911 PARAMETER Experiment Name: At_Drought_Reproduction_P Parameter: Treatment Value: Drought vs. No Drought
atggacatcatctcaggacaacctctatttctcatcttctgctttatcttatcatgtcttcttttcttcaccaccgcacgatctcgacgtagcccttgtcaattgtccaagtcacctccggggcctccacggttacccataattggaaacattcatctggtcggaaagaacccacatcactcattcacggacctctcaaaaacatatggaccagtcatgagtcttaagcttggatgtttaaactcagtggtcatagcttcacgagacgctgtgagagaagtactaaaaacacacgaccaaatcttgtctggacggtacataagtgaagcgaccaaatccaacaatcatcatgaattttccgttggctggattcatccatcgtcatctcgttttagaatgttgaggaaattgtcggctactcagctgttctcaccgcagtgtatccaggctaccaaagctctgaggatgaagaaggtgcaggaacttgtcaacttcctgagtgaaagctgtgagagagaagaagctgttgatatttctcatgtatccttcgtcacagctctcaatatcatatcgaatattttgttctcagtcaatctcggtagctacgattcaaaaaattccagtgcgtttcaagagatggtgatcggttaccaggaatctatcggaaatccagaccttgctaacttcttcccatttatgagatttcttgacttgcaaggtaacagtaagaagatgagggagtcctcagggagattgcttcaggtattcagagagttttatgatgctcggattgtggagaaatcatcgcgttcagttgagaaagatgtttcgagtaaagacttcctggatgtgcttatcgatctccaacaaggagatgaaactgaaatcaacatcgacgagatcgaacacctacttctcgatatgtttgtagcaggcacagatacaaactcaagtaccgtggaatgggcaatggcagagttacttggaaaccctaaaacgatgacaaaagttcaagacgagatcaatcatgtgatagggcaaaacggtgactttcaagagtctgatatctcaaaactgccgtatttaaaagcggtcgtaaaagaaactttccgactacaccctgctgctccatttctcctccaaagaaaagctgaaaccaacgtagagattcttggattcactgtgcttaaagactctcaggttcttgtgaacgtgtgggccataggacgagacccacttgtatgggaaaatccgacccattttgagccagagaggtttttggggaaagagattgatgtaaaaggtacagattatgagcttacaccgtttggggctgggcgtagaatttgtccgggactgcctttggctatgaaaacagtgcatctcatgcttgcttctcttctctatacctttgaatggaagcttccaaacggtgtcggttcagaggatttggacatggaagagacctttggtctcacagtgcacaagacaaacccgttacttgccgtgcctctgaagaaacgagccataaattaa

SEQ ID NO: 96504 - protein, 511 aa, Arabidopsis thaliana
  peptide (1)..(511): Ceres Seq. ID no. 12733623
  misc_feature (39)..(503): Pfam Name: Cytochrome P450 Pfam Description: Cytochrome P450
  misc_feature (1)..(511): Homolog of NCBI NO: 15217636 NR Description: cytochrome P450 monooxygenase; protein id: [Arabidopsis thaliana] >gi|25282568|pir||F86460 probable
  misc_feature (1)..(502): Homolog of NCBI NO: 25282569 NR Description: probable cytochrome P450 [imported] - Arabidopsis >gi|9665096|gb|AAF97287.1|AC010164_9 Putative cytochrome P450
  misc_feature (1)..(511): Homolog of NCBI NO: 15225510 NR Description: cytochrome p450 family; protein id: At2g45550.1
  misc_feature (1)..(511): Homolog of NCBI NO: 15225512 NR Description: cytochrome p450 family; protein id: At2g45570.1, by cDNA: gi_17065047 [Arabidopsis thaliana] Cytochrome P450 76C2 >gi|7430675|pir||T00870 probable cytochrome
  misc_feature (1)..(511): Homolog of NCBI NO: 30690062 NR Description: cytochrome P450 family [Arabidopsis thaliana]
  misc_feature (1)..(482): Homolog of NCBI NO: 25282599 NR Description: cytochrome P450 monooxygenase [imported] - thaliana >gi|3164130|dbj|BAA28540.1| cytochrome P450
  misc_feature (137)..(502): Homolog of NCBI NO: 15217637 NR Description: cytochrome p450 family; protein id: At1g33730.1
  misc_feature (1)..(511): Homolog of NCBI NO: 30690070 NR Description: cytochrome p450 family [Arabidopsis thaliana]
  misc_feature (1)..(511): Homolog of NCBI NO: 26451374 NR Description: putative cytochrome P450 [Arabidopsis thaliana]
  misc_feature (15)..(511): Homolog of NCBI NO: 5915833 NR Description: Cytochrome P450 76C3 >gi|7430676|pir||T00871
MDIISGQPLFLIFCFILSCLLFFTTARSRRSPCQLSKSPPGPPRLPIIGNIHLVGKNPHHSFTDLSKTYGPVMSLKLGCLNSVVIASRDAVREVLKTHDQILSGRYISEATKSNNHHEFSVGWIHPSSSRFRMLRKLSATQLFSPQCIQATKALRMKKVQELVNFLSESCEREEAVDISHVSFVTALNIISNILFSVNLGSYDSKNSSAFQEMVIGYQESIGNPDLANFFPFMRFLDLQGNSKKMRESSGRLLQVFREFYDARIVEKSSRSVEKDVSSKDFLDVLIDLQQGDETEINIDEIEHLLLDMFVAGTDTNSSTVEWAMAELLGNPKTMTKVQDEINHVIGQNGDFQESDISKLPYLKAVVKETFRLHPAAPFLLQRKAETNVEILGFTVLKDSQVLVNVWAIGRDPLVWENPTHFEPERFLGKEIDVKGTDYELTPFGAGRRICPGLPLAMKTVHLMLASLLYTFEWKLPNGVGSEDLDMEETFGLTVHKTNPLLAVPLKKRAIN

SEQ ID NO: 96505 - protein, 439 aa, Arabidopsis thaliana
  peptide (1)..(439): Ceres Seq. ID no. 12733624
  misc_feature (1)..(431): Pfam Name: Cytochrome P450 Pfam Description: Cytochrome P450
  misc_feature (1)..(439): Homolog of NCBI NO: 15217636 NR Description: cytochrome P450 monooxygenase; protein id: [Arabidopsis thaliana] >gi|25282568|pir||F86460 probable
  misc_feature (1)..(430): Homolog of NCBI NO: 25282569 NR Description: probable cytochrome P450 [imported] - Arabidopsis >gi|9665096|gb|AAF97287.1|AC010164_9 Putative cytochrome P450
  misc_feature (1)..(439): Homolog of NCBI NO: 15225510 NR Description: cytochrome p450 family; protein id: At2g45550.1
  misc_feature (1)..(439): Homolog of NCBI NO: 15225512 NR Description: cytochrome p450 family; protein id: At2g45570.1, by cDNA: gi_17065047 [Arabidopsis thaliana] Cytochrome P450 76C2 >gi|7430675|pir||T00870 probable cytochrome
  misc_feature (1)..(439): Homolog of NCBI NO: 30690062 NR Description: cytochrome P450 family [Arabidopsis thaliana]
  misc_feature (1)..(410): Homolog of NCBI NO: 25282599 NR Description: cytochrome P450 monooxygenase [imported] - thaliana >gi|3164130|dbj|BAA28540.1| cytochrome P450
  misc_feature (65)..(430): Homolog of NCBI NO: 15217637 NR Description: cytochrome p450 family; protein id: At1g33730.1
  misc_feature (1)..(439): Homolog of NCBI NO: 30690070 NR Description: cytochrome p450 family [Arabidopsis thaliana]
  misc_feature (1)..(439): Homolog of NCBI NO: 26451374 NR Description: putative cytochrome P450 [Arabidopsis thaliana]
  misc_feature (1)..(439): Homolog of NCBI NO: 5915833 NR Description: Cytochrome P450 76C3 >gi|7430676|pir||T00871
MSLKLGCLNSVVIASRDAVREVLKTHDQILSGRYISEATKSNNHHEFSVGWIHPSSSRFRMLRKLSATQLFSPQCIQATKALRMKKVQELVNFLSESCEREEAVDISHVSFVTALNIISNILFSVNLGSYDSKNSSAFQEMVIGYQESIGNPDLANFFPFMRFLDLQGNSKKMRESSGRLLQVFREFYDARIVEKSSRSVEKDVSSKDFLDVLIDLQQGDETEINIDEIEHLLLDMFVAGTDTNSSTVEWAMAELLGNPKTMTKVQDEINHVIGQNGDFQESDISKLPYLKAVVKETFRLHPAAPFLLQRKAETNVEILGFTVLKDSQVLVNVWAIGRDPLVWENPTHFEPERFLGKEIDVKGTDYELTPFGAGRRICPGLPLAMKTVHLMLASLLYTFEWKLPNGVGSEDLDMEETFGLTVHKTNPLLAVPLKKRAIN

SEQ ID NO: 96506 - protein, 379 aa, Arabidopsis thaliana
  peptide (1)..(379): Ceres Seq. ID no. 12733625
  misc_feature (1)..(371): Pfam Name: Cytochrome P450 Pfam Description: Cytochrome P450
  misc_feature (1)..(379): Homolog of NCBI NO: 15217636 NR Description: cytochrome P450 monooxygenase; protein id: [Arabidopsis thaliana] >gi|25282568|pir||F86460 probable
  misc_feature (1)..(370): Homolog of NCBI NO: 25282569 NR Description: probable cytochrome P450 [imported] - Arabidopsis >gi|9665096|gb|AAF97287.1|AC010164_9 Putative cytochrome P450
  misc_feature (1)..(379): Homolog of NCBI NO: 15225510 NR Description: cytochrome p450 family; protein id: At2g45550.1
  misc_feature (1)..(379): Homolog of NCBI NO: 15225512 NR Description: cytochrome p450 family; protein id: At2g45570.1, by cDNA: gi_17065047 [Arabidopsis thaliana] Cytochrome P450 76C2 >gi|7430675|pir||T00870 probable cytochrome
  misc_feature (1)..(379): Homolog of NCBI NO: 30690062 NR Description: cytochrome P450 family [Arabidopsis thaliana]
  misc_feature (1)..(350): Homolog of NCBI NO: 25282599 NR Description: cytochrome P450 monooxygenase [imported] - thaliana >gi|3164130|dbj|BAA28540.1| cytochrome P450
  misc_feature (5)..(370): Homolog of NCBI NO: 15217637 NR Description: cytochrome p450 family; protein id: At1g33730.1
  misc_feature (1)..(379): Homolog of NCBI NO: 30690070 NR Description: cytochrome p450 family [Arabidopsis thaliana]
  misc_feature (1)..(379): Homolog of NCBI NO: 26451374 NR Description: putative cytochrome P450 [Arabidopsis thaliana]
  misc_feature (1)..(379): Homolog of NCBI NO: 5915833 NR Description: Cytochrome P450 76C3 >gi|7430676|pir||T00871
MLRKLSATQLFSPQCIQATKALRMKKVQELVNFLSESCEREEAVDISHVSFVTALNIISNILFSVNLGSYDSKNSSAFQEMVIGYQESIGNPDLANFFPFMRFLDLQGNSKKMRESSGRLLQVFREFYDARIVEKSSRSVEKDVSSKDFLDVLIDLQQGDETEINIDEIEHLLLDMFVAGTDTNSSTVEWAMAELLGNPKTMTKVQDEINHVIGQNGDFQESDISKLPYLKAVVKETFRLHPAAPFLLQRKAETNVEILGFTVLKDSQVLVNVWAIGRDPLVWENPTHFEPERFLGKEIDVKGTDYELTPFGAGRRICPGLPLAMKTVHLMLASLLYTFEWKLPNGVGSEDLDMEETFGLTVHKTNPLLAVPLKKRAIN

SEQ ID NO: 96507 - DNA, 1845 bp, Arabidopsis thaliana
  misc_feature (1)..(1845): Ceres Seq. ID no. 12733630
  misc_feature: MA Experiment ID: 20000314 Result: Down-regulated in Transcription
  misc_feature: MA Experiment 20000314 PARAMETER Experiment Name: At_14day_Shoots-Roots_Sub_P Parameter: Age (day) Value: 14
  misc_feature: MA Experiment 20000314 PARAMETER Experiment Name: At_14day_Shoots-Roots_Sub_P Parameter: Organism Value: A. thaliana
  misc_feature: MA Experiment 20000314 PARAMETER Experiment Name: At_14day_Shoots-Roots_Sub_P Parameter: Plant Line Value: WS
  misc_feature: MA Experiment 20000314 PARAMETER Experiment Name: At_14day_Shoots-Roots_Sub_P Parameter: Tissue Value: Roots vs. Whole Plant
  misc_feature: MA Experiment ID: 20000315 Result: Down-regulated in Transcription
  misc_feature: MA Experiment 20000315 PARAMETER Experiment Name: At_14day_Shoots-Roots_Sub_P Parameter: Age (day) Value: 14
  misc_feature: MA Experiment 20000315 PARAMETER Experiment Name: At_14day_Shoots-Roots_Sub_P Parameter: Organism Value: A. thaliana
  misc_feature: MA Experiment 20000315 PARAMETER Experiment Name: At_14day_Shoots-Roots_Sub_P Parameter: Plant Line Value: WS
  misc_feature: MA Experiment 20000315 PARAMETER Experiment Name: At_14day_Shoots-Roots_Sub_P Parameter: Tissue Value: Shoots vs. Whole Plant
  misc_feature: MA Experiment ID: 20000355 Result: Down-regulated in Transcription
  misc_feature: MA Experiment 20000355 PARAMETER Experiment Name: At_Siliques_Sub_P Parameter: Age (day) Value: 21
  misc_feature: MA Experiment 20000355 PARAMETER Experiment Name: At_Siliques_Sub_P Parameter: Organism Value: A. thaliana
  misc_feature: MA Experiment 20000355 PARAMETER Experiment Name: At_Siliques_Sub_P Parameter: Plant Line Value: WS
  misc_feature: MA Experiment 20000355 PARAMETER Experiment Name: At_Siliques_Sub_P Parameter: Tissue Value: Less Than 5mm Siliques vs. Whole Plant
  misc_feature: MA Experiment ID: 20000440 Result: Down-regulated in Transcription
  misc_feature: MA Experiment 20000440 PARAMETER Experiment Name: At_Closed-Flower__Sub_P Parameter: Tissue Value: Closed Flower vs. Whole Plant
atgggctgcatttgctcaaaaggagcagcagaagatgaagagggtgttgtttatcatcgtgagaaagcaaatgaatattggaacaaatcttcttctgttcaattgattgctcctctgccttcgaataaagacgatttttcgcataaagccgttgatggaagctctggtggtggaagaagagcgagtggtcttattgttcctattgatgatagtcatgatggtaagacggttattgtagagagaccttcaaggtctcaaagaggaagaagagtttcggataatggcaaaggaggaggattgattatttcgaatgttccgcgtagcgcagaagcagagcttattgcagctggttggccttattggttaacctctgttgctggtgaagctattaaaggttgggttccgcgacgtgctgattcctttgagaagcttgacaaaattgggcaagggacttatagcattgtgtataaggcaagggatcttgagacaggcaaaatcgtggcaatgaagaaggtgaggtttgctaatatggatcctgaaagtgtaaggttcatggctagagaaatcaacattttacgaaaactcgaccatccaaatgttatgaagcttcagtgtcttgtcacttcaaagctatcaggtagcttgcaccttgtatttgagtacatggagcatgatctttcaggcttggctcttaggcctggtgtcaaattcactgaaccacagatcaagtgttttatgaaacaacttctttgtggacttgagcattgtcatagccgtggaatccttcaccgtgacatcaagggttcaaatcttttggtaaacaatgatggagttcttaagatcggagatttcggtctggcgagtttttataaaccagatcaagatcaaccactgactagccgtgtagtcaccttgtggtatagagctcctgagcttctacttggatctacagagtatggacccgccattgatctctggagcgttggttgcattctcgctgaactctttgtatgtaaaccaatcatgccgggaagaacagaggtcgagcaaatgcacaagatctttaaactgtgtggttcaccatctgaagagttctggaatacgacaaagttcccacaggcgacaagttacaaaccgcaacatccttataagcgtgtccttctagagacgttcaagaatctatcatcttcttctctagatcttcttgacaagcttctatctgtagaaccagagaaacgatgctcagcttcttcgactctactgagtgagttttttacaacggagcctctcccttgtcacatatcaagtttgcctaagtatccaccaagcaaggaactcgatgcaaaggttcgagacgaagaagctaaaaggaaaaaagctgaagctgtgaagtggcgtggacatgaatctgtgagaagagggttaagagactccaaggtaacaccagagttcattgcttcaggaaattcaaatgtctcactcactaccccgtcgttcaagaaagaaaagcgctttacggataccaattcagtgatccatccaagctctaggagcaatgtaggtgaggtgaagccaagccgatccaacaacgtacctgctacaatgggagactacttagctagttcttcgcaaaaggagaatatcgtttcaagagcacccgcaacgacatacatgcgaaagaagaacagaatgcactattcaggtccactgatgcctcctggtggtaacattgaagacatgatgaaagagcacgagagacgaatccaagaagctgtacgcaagtcccgccttgagaaatctgctacaaagaagaacaaagatatctcagtcaaagcatgtgcttag

SEQ ID NO: 96508 - protein, 614 aa, Arabidopsis thaliana
  peptide (1)..(614): Ceres Seq. ID no. 12733631
  misc_feature (141)..(425): Pfam Name: Protein kinase domain Pfam Description: Protein kinase domain
  misc_feature (1)..(531): Homolog of NCBI NO: 7488162 NR Description: probable protein kinase T5L19.140 (EC 2.7.1.-) - thaliana >gi|4539004|emb|CAB39625.1| putative protein kinase thaliana] >gi|7267697|emb|CAB78124.1| putative protein kinase
  misc_feature (1)..(537): Homolog of NCBI NO: 15217521 NR Description: putative protein kinase; protein id: At1g71530.1
  misc_feature (509)..(609): Homolog of NCBI NO: 15217521 NR Description: putative protein kinase; protein id: At1g71530.1
  misc_feature (1)..(503): Homolog of NCBI NO: 15219169 NR Description: cell division-related protein, putative; protein At1g53050.1 [Arabidopsis thaliana] >gi|25405618|pir||A96571
  misc_feature (476)..(604): Homolog of NCBI NO: 15219169 NR Description: cell division-related protein, putative; protein At1g53050.1 [Arabidopsis thaliana] >gi|25405618|pir||A96571
  misc_feature (1)..(503): Homolog of NCBI NO: 28393523 NR Description: putative cell division-related protein
  misc_feature (476)..(604): Homolog of NCBI NO: 28393523 NR Description: putative cell division-related protein
  misc_feature (28)..(553): Homolog of NCBI NO: 15217565 NR Description: putative protein kinase; protein id: At1g09600.1
  misc_feature (28)..(553): Homolog of NCBI NO: 25402555 NR Description: hypothetical protein [imported] - Arabidopsis >gi|3482933|gb|AAC33218.1| Similar to cdc2 protein kinases
  misc_feature (545)..(603): Homolog of NCBI NO: 15217565 NR Description: putative protein kinase; protein id: At1g09600.1
MGCICSKGAAEDEEGVVYHREKANEYWNKSSSVQLIAPLPSNKDDFSHKAVDGSSGGGRRASGLIVPIDDSHDGKTVIVERPSRSQRGRRVSDNGKGGGLIISNVPRSAEAELIAAGWPYWLTSVAGEAIKGWVPRRADSFEKLDKIGQGTYSIVYKARDLETGKIVAMKKVRFANMDPESVRFMAREINILRKLDHPNVMKLQCLVTSKLSGSLHLVFEYMEHDLSGLALRPGVKFTEPQIKCFMKQLLCGLEHCHSRGILHRDIKGSNLLVNNDGVLKIGDFGLASFYKPDQDQPLTSRVVTLWYRAPELLLGSTEYGPAIDLWSVGCILAELFVCKPIMPGRTEVEQMHKIFKLCGSPSEEFWNTTKFPQATSYKPQHPYKRVLLETFKNLSSSSLDLLDKLLSVEPEKRCSASSTLLSEFFTTEPLPCHISSLPKYPPSKELDAKVRDEEAKRKKAEAVKWRGHESVRRGLRDSKVTPEFIASGNSNVSLTTPSFKKEKRFTDTNSVIHPSSRSNVGEVKPSRSNNVPATMGDYLASSSQKENIVSRAPATTYMRKKNRMHYSGPLMPPGGNIEDMMKEHERRIQEAVRKSRLEKSATKKNKDISVKACA

SEQ ID NO: 96509 - protein, 446 aa, Arabidopsis thaliana
  peptide (1)..(446): Ceres Seq. ID no. 12733632
  misc_feature (1)..(257): Pfam Name: Protein kinase domain Pfam Description: Protein kinase domain
  misc_feature (1)..(363): Homolog of NCBI NO: 7488162 NR Description: probable protein kinase T5L19.140 (EC 2.7.1.-) - thaliana >gi|4539004|emb|CAB39625.1| putative protein kinase thaliana] >gi|7267697|emb|CAB78124.1| putative protein kinase
  misc_feature (1)..(369): Homolog of NCBI NO: 15217521 NR Description: putative protein kinase; protein id: At1g71530.1
  misc_feature (341)..(441): Homolog of NCBI NO: 15217521 NR Description: putative protein kinase; protein id: At1g71530.1
  misc_feature (1)..(335): Homolog of NCBI NO: 15219169 NR Description: cell division-related protein, putative; protein At1g53050.1 [Arabidopsis thaliana] >gi|25405618|pir||A96571
  misc_feature (308)..(436): Homolog of NCBI NO: 15219169 NR Description: cell division-related protein, putative; protein At1g53050.1 [Arabidopsis thaliana] >gi|25405618|pir||A96571
  misc_feature (1)..(335): Homolog of NCBI NO: 28393523 NR Description: putative cell division-related protein
  misc_feature (308)..(436): Homolog of NCBI NO: 28393523 NR Description: putative cell division-related protein
  misc_feature (1)..(385): Homolog of NCBI NO: 15217565 NR Description: putative protein kinase; protein id: At1g09600.1
  misc_feature (1)..(385): Homolog of NCBI NO: 25402555 NR Description: hypothetical protein [imported] - Arabidopsis >gi|3482933|gb|AAC33218.1| Similar to cdc2 protein kinases
  misc_feature (377)..(435): Homolog of NCBI NO: 15217565 NR Description: putative protein kinase; protein id: At1g09600.1
MKKVRFANMDPESVRFMAREINILRKLDHPNVMKLQCLVTSKLSGSLHLVFEYMEHDLSGLALRPGVKFTEPQIKCFMKQLLCGLEHCHSRGILHRDIKGSNLLVNNDGVLKIGDFGLASFYKPDQDQPLTSRVVTLWYRAPELLLGSTEYGPAIDLWSVGCILAELFVCKPIMPGRTEVEQMHKIFKLCGSPSEEFWNTTKFPQATSYKPQHPYKRVLLETFKNLSSSSLDLLDKLLSVEPEKRCSASSTLLSEFFTTEPLPCHISSLPKYPPSKELDAKVRDEEAKRKKAEAVKWRGHESVRRGLRDSKVTPEFIASGNSNVSLTTPSFKKEKRFTDTNSVIHPSSRSNVGEVKPSRSNNVPATMGDYLASSSQKENIVSRAPATTYMRKKNRMHYSGPLMPPGGNIEDMMKEHERRIQEAVRKSRLEKSATKKNKDISVKACA

SEQ ID NO: 96510 - protein, 438 aa, Arabidopsis thaliana
  peptide (1)..(438): Ceres Seq. ID no. 12733633
  misc_feature (1)..(249): Pfam Name: Protein kinase domain Pfam Description: Protein kinase domain
  misc_feature (1)..(355): Homolog of NCBI NO: 7488162 NR Description: probable protein kinase T5L19.140 (EC 2.7.1.-) - thaliana >gi|4539004|emb|CAB39625.1| putative protein kinase thaliana] >gi|7267697|emb|CAB78124.1| putative protein kinase
  misc_feature (1)..(361): Homolog of NCBI NO: 15217521 NR Description: putative protein kinase; protein id: At1g71530.1
  misc_feature (333)..(433): Homolog of NCBI NO: 15217521 NR Description: putative protein kinase; protein id: At1g71530.1
  misc_feature (1)..(327): Homolog of NCBI NO: 15219169 NR Description: cell division-related protein, putative; protein At1g53050.1 [Arabidopsis thaliana] >gi|25405618|pir||A96571
  misc_feature (300)..(428): Homolog of NCBI NO: 15219169 NR Description: cell division-related protein, putative; protein At1g53050.1 [Arabidopsis thaliana] >gi|25405618|pir||A96571
  misc_feature (1)..(327): Homolog of NCBI NO: 28393523 NR Description: putative cell division-related protein
  misc_feature (300)..(428): Homolog of NCBI NO: 28393523 NR Description: putative cell division-related protein
  misc_feature (1)..(377): Homolog of NCBI NO: 15217565 NR Description: putative protein kinase; protein id: At1g09600.1
  misc_feature (1)..(377): Homolog of NCBI NO: 25402555 NR Description: hypothetical protein [imported] - Arabidopsis >gi|3482933|gb|AAC33218.1| Similar to cdc2 protein kinases
  misc_feature (369)..(427): Homolog of NCBI NO: 15217565 NR Description: putative protein kinase; protein id: At1g09600.1
MDPESVRFMAREINILRKLDHPNVMKLQCLVTSKLSGSLHLVFEYMEHDLSGLALRPGVKFTEPQIKCFMKQLLCGLEHCHSRGILHRDIKGSNLLVNNDGVLKIGDFGLASFYKPDQDQPLTSRVVTLWYRAPELLLGSTEYGPAIDLWSVGCILAELFVCKPIMPGRTEVEQMHKIFKLCGSPSEEFWNTTKFPQATSYKPQHPYKRVLLETFKNLSSSSLDLLDKLLSVEPEKRCSASSTLLSEFFTTEPLPCHISSLPKYPPSKELDAKVRDEEAKRKKAEAVKWRGHESVRRGLRDSKVTPEFIASGNSNVSLTTPSFKKEKRFTDTNSVIHPSSRSNVGEVKPSRSNNVPATMGDYLASSSQKENIVSRAPATTYMRKKNRMHYSGPLMPPGGNIEDMMKEHERRIQEAVRKSRLEKSATKKNKDISVKACA

SEQ ID NO: 96511 - DNA, 1387 bp, Arabidopsis thaliana
  misc_feature (1)..(1387): Ceres Seq. ID no. 12733638
  misc_feature: MA Experiment ID: 20000171 Result: Down-regulated in Transcription
  misc_feature: MA Experiment 20000171 PARAMETER Experiment Name: At_42deg_Heat_P Parameter: Age (day) Value: 14
  misc_feature: MA Experiment 20000171 PARAMETER Experiment Name: At_42deg_Heat_P Parameter: Organism Value: A. thaliana
  misc_feature: MA Experiment 20000171 PARAMETER Experiment Name: At_42deg_Heat_P Parameter: Plant Line Value: WS
  misc_feature: MA Experiment 20000171 PARAMETER Experiment Name: At_42deg_Heat_P Parameter: Temperature (deg C) Value: 42 vs. 22
  misc_feature: MA Experiment 20000171 PARAMETER Experiment Name: At_42deg_Heat_P Parameter: Timepoint (hr) Value: 1
  misc_feature: MA Experiment 20000171 PARAMETER Experiment Name: At_42deg_Heat_P Parameter: Tissue Value: Aerial
  misc_feature: MA Experiment ID: 20000182 Result: Down-regulated in Transcription
  misc_feature: MA Experiment 20000182 PARAMETER Experiment Name: At_2mM_SA_P Parameter: Age (day) Value: 14
  misc_feature: MA Experiment 20000182 PARAMETER Experiment Name: At_2mM_SA_P Parameter: Organism Value: A. thaliana
  misc_feature: MA Experiment 20000182 PARAMETER Experiment Name: At_2mM_SA_P Parameter: Plant Line Value: WS
  misc_feature: MA Experiment 20000182 PARAMETER Experiment Name: At_2mM_SA_P Parameter: Timepoint (hr) Value: 6
  misc_feature: MA Experiment 20000182 PARAMETER Experiment Name: At_2mM_SA_P Parameter: Tissue Value: Aerial
  misc_feature: MA Experiment 20000182 PARAMETER Experiment Name: At_2mM_SA_P Parameter: Treatment Value: 2mM SA vs. No Treatment
  misc_feature: MA Experiment ID: 20000184 Result: Up-regulated in Transcription
  misc_feature: MA Experiment 20000184 PARAMETER Experiment Name: At_Shoots__P Parameter: Age (day) Value: 7
  misc_feature: MA Experiment 20000184 PARAMETER Experiment Name: At_Shoots__P Parameter: Tissue Value: Shoots vs. Whole Plant
  misc_feature: MA Experiment ID: 20000185 Result: Down-regulated in Transcription
  misc_feature: MA Experiment 20000185 PARAMETER Experiment Name: At_Roots__P Parameter: Age (day) Value: 7 vs. 21
  misc_feature: MA Experiment 20000185 PARAMETER Experiment Name: At_Roots__P Parameter: Organism Value: A. thaliana
  misc_feature: MA Experiment 20000185 PARAMETER Experiment Name: At_Roots__P Parameter: Tissue Value: Roots vs. Whole Plant
  misc_feature: MA Experiment ID: 20000234 Result: Up-regulated in Transcription
  misc_feature: MA Experiment 20000234 PARAMETER Experiment Name: At_Siliques_P Parameter: Age (day) Value: 21
  misc_feature: MA Experiment 20000234 PARAMETER Experiment Name: At_Siliques_P Parameter: Organism Value: A. thaliana
  misc_feature: MA Experiment 20000234 PARAMETER Experiment Name: At_Siliques_P Parameter: Plant Line Value: WS
  misc_feature: MA Experiment 20000234 PARAMETER Experiment Name: At_Siliques_P Parameter: Tissue Value: Less Than 5mm Siliques vs. Whole Plant
  misc_feature: MA Experiment ID: 20000267 Result: Down-regulated in Transcription
  misc_feature: MA Experiment 20000267 PARAMETER Experiment Name: At_Drought_P Parameter: Age (day) Value: 7
  misc_feature: MA Experiment 20000267 PARAMETER Experiment Name: At_Drought_P Parameter: Organism Value: A. thaliana
  misc_feature: MA Experiment 20000267 PARAMETER Experiment Name: At_Drought_P Parameter: Plant Line Value: WS
  misc_feature: MA Experiment 20000267 PARAMETER Experiment Name: At_Drought_P Parameter: Timepoint (hr) Value: 6
  misc_feature: MA Experiment 20000267 PARAMETER Experiment Name: At_Drought_P Parameter: Tissue Value: Whole Plant
  misc_feature: MA Experiment 20000267 PARAMETER Experiment Name: At_Drought_P Parameter: Treatment Value: Drought vs. No Drought
  misc_feature: MA Experiment ID: 20000268 Result: Down-regulated in Transcription
  misc_feature: MA Experiment 20000268 PARAMETER Experiment Name: At_100mM_NaCl__P Parameter: Age (day) Value: 14
  misc_feature: MA Experiment 20000268 PARAMETER Experiment Name: At_100mM_NaCl__P Parameter: Organism Value: A. thaliana
  misc_feature: MA Experiment 20000268 PARAMETER Experiment Name: At_100mM_NaCl__P Parameter: Plant Line Value: WS
  misc_feature: MA Experiment 20000268 PARAMETER Experiment Name: At_100mM_NaCl__P Parameter: Timepoint (hr) Value: 6
  misc_feature: MA Experiment 20000268 PARAMETER Experiment Name: At_100mM_NaCl__P Parameter: Tissue Value: Whole Plant
  misc_feature: MA Experiment 20000268 PARAMETER Experiment Name: At_100mM_NaCl__P Parameter: Treatment Value: 100mM NaCl vs. No Treatment
  misc_feature: MA Experiment ID: 20000308 Result: Down-regulated in Transcription
  misc_feature: MA Experiment 20000308 PARAMETER Experiment Name: At_100mM_NaCl__P Parameter: Age (day) Value: 17
  misc_feature: MA Experiment 20000308 PARAMETER Experiment Name: At_100mM_NaCl__P Parameter: Organism Value: A. thaliana
  misc_feature: MA Experiment 20000308 PARAMETER Experiment Name: At_100mM_NaCl__P Parameter: Plant Line Value: WS
  misc_feature: MA Experiment 20000308 PARAMETER Experiment Name: At_100mM_NaCl__P Parameter: Timepoint (hr) Value: 72
  misc_feature: MA Experiment 20000308 PARAMETER Experiment Name: At_100mM_NaCl__P Parameter: Tissue Value: Whole Plant
  misc_feature: MA Experiment 20000308 PARAMETER Experiment Name: At_100mM_NaCl__P Parameter: Treatment Value: 100mM NaCl vs. No Treatment
  misc_feature: MA Experiment ID: 20000436 Result: Down-regulated in Transcription
  misc_feature: MA Experiment 20000436 PARAMETER Experiment Name: At_Drought_P Parameter: Age (day) Value: 7
  misc_feature: MA Experiment 20000436 PARAMETER Experiment Name: At_Drought_P Parameter: Organism Value: A. thaliana
  misc_feature: MA Experiment 20000436 PARAMETER Experiment Name: At_Drought_P Parameter: Plant Line Value: WS
  misc_feature: MA Experiment 20000436 PARAMETER Experiment Name: At_Drought_P Parameter: Timepoint (hr) Value: 12
  misc_feature: MA Experiment 20000436 PARAMETER Experiment Name: At_Drought_P Parameter: Tissue Value: Whole Plant
  misc_feature: MA Experiment 20000436 PARAMETER Experiment Name: At_Drought_P Parameter: Treatment Value: Drought vs. No Drought
  misc_feature: MA Experiment ID: 20000437 Result: Down-regulated in Transcription
  misc_feature: MA Experiment 20000437 PARAMETER Experiment Name: At_Drought_P Parameter: Age (day) Value: 8
  misc_feature: MA Experiment 20000437 PARAMETER Experiment Name: At_Drought_P Parameter: Organism Value: A. thaliana
  misc_feature: MA Experiment 20000437 PARAMETER Experiment Name: At_Drought_P Parameter: Plant Line Value: WS
  misc_feature: MA Experiment 20000437 PARAMETER Experiment Name: At_Drought_P Parameter: Timepoint (hr) Value: 24
  misc_feature: MA Experiment 20000437 PARAMETER Experiment Name: At_Drought_P Parameter: Tissue Value: Whole Plant
  misc_feature: MA Experiment 20000437 PARAMETER Experiment Name: At_Drought_P Parameter: Treatment Value: Drought vs. No Drought
  misc_feature: MA Experiment ID: 20000438 Result: Up-regulated in Transcription
  misc_feature: MA Experiment 20000438 PARAMETER Experiment Name: At_Shoots__P Parameter: Age (day) Value: 14
  misc_feature: MA Experiment 20000438 PARAMETER Experiment Name: At_Shoots__P Parameter: Tissue Value: Shoots vs. Whole Plant
  misc_feature: MA Experiment ID: 20000439 Result: Down-regulated in Transcription
  misc_feature: MA Experiment 20000439 PARAMETER Experiment Name: At_Roots__P Parameter: Age (day) Value: 14 vs. 21
  misc_feature: MA Experiment 20000439 PARAMETER Experiment Name: At_Roots__P Parameter: Organism Value: A. thaliana
  misc_feature: MA Experiment 20000439 PARAMETER Experiment Name: At_Roots__P Parameter: Tissue Value: Roots vs. Whole Plant
  misc_feature: MA Experiment ID: 20000453 Result: Down-regulated in Transcription
  misc_feature: MA Experiment 20000453 PARAMETER Experiment Name: At_100uM_ABA_P Parameter: Age (day) Value: 15
  misc_feature: MA Experiment 20000453 PARAMETER Experiment Name: At_100uM_ABA_P Parameter: Organism Value: A. thaliana
  misc_feature: MA Experiment 20000453 PARAMETER Experiment Name: At_100uM_ABA_P Parameter: Plant Line Value: WS
  misc_feature: MA Experiment 20000453 PARAMETER Experiment Name: At_100uM_ABA_P Parameter: Timepoint (hr) Value: 24
  misc_feature: MA Experiment 20000453 PARAMETER Experiment Name: At_100uM_ABA_P Parameter: Tissue Value: Aerial
  misc_feature: MA Experiment 20000453 PARAMETER Experiment Name: At_100uM_ABA_P Parameter: Treatment Value: 100uM ABA vs. No Treatment
  misc_feature: MA Experiment ID: 20000496 Result: Up-regulated in Transcription
  misc_feature: MA Experiment 20000496 PARAMETER Experiment Name: At_Guard_Cells_P Parameter: Harvest Date Value: 7/19/2002
  misc_feature: MA Experiment 20000496 PARAMETER Experiment Name: At_Guard_Cells_P Parameter: Organism Value: Canola
  misc_feature: MA Experiment 20000496 PARAMETER Experiment Name: At_Guard_Cells_P Parameter: Tissue Value: Guard Cells vs. Leaves
  misc_feature: MA Experiment ID: 20000794 Result: Down-regulated in Transcription
  misc_feature: MA Experiment 20000794 PARAMETER Experiment Name: At_Petals_P Parameter: Age (day) Value: 23-25 days
  misc_feature: MA Experiment 20000794 PARAMETER Experiment Name: At_Petals_P Parameter: Plant Line Value: WS
  misc_feature: MA Experiment 20000794 PARAMETER Experiment Name: At_Petals_P Parameter: Tissue Value: Petals vs. Whole plant
  misc_feature: MA Experiment ID: 20001248 Result: Down-regulated in Transcription
  misc_feature: MA Experiment 20001248 PARAMETER Experiment Name: At_Far-red-induction_P Parameter: Age (day) Value: 7
  misc_feature: MA Experiment 20001248 PARAMETER Experiment Name: At_Far-red-induction_P Parameter: Light Value: Far-red vs. White
  misc_feature: MA Experiment 20001248 PARAMETER Experiment Name: At_Far-red-induction_P Parameter: Organism Value: A. thaliana
  misc_feature: MA Experiment 20001248 PARAMETER Experiment Name: At_Far-red-induction_P Parameter: Plant Line Value: Columbia
  misc_feature: MA Experiment 20001248 PARAMETER Experiment Name: At_Far-red-induction_P Parameter: Timepoint (hr) Value: 4
  misc_feature: MA Experiment 20001248 PARAMETER Experiment Name: At_Far-red-induction_P Parameter: Tissue Value: Whole Plant
  misc_feature: MA Experiment ID: 20001450 Result: Down-regulated in Transcription
  misc_feature: MA Experiment 20001450 PARAMETER Experiment Name: At_Far-red-induction_P Parameter: Age (day) Value: 7
  misc_feature: MA Experiment 20001450 PARAMETER Experiment Name: At_Far-red-induction_P Parameter: Light Value: Far-red vs. White
  misc_feature: MA Experiment 20001450 PARAMETER Experiment Name: At_Far-red-induction_P Parameter: Organism Value: A. thaliana
  misc_feature: MA Experiment 20001450 PARAMETER Experiment Name: At_Far-red-induction_P Parameter: Plant Line Value: Columbia
  misc_feature: MA Experiment 20001450 PARAMETER Experiment Name: At_Far-red-induction_P Parameter: Timepoint (hr) Value: 8
  misc_feature: MA Experiment 20001450 PARAMETER Experiment Name: At_Far-red-induction_P Parameter: Tissue Value: Whole Plant
  misc_feature: MA Experiment ID: 20001555 Result: Down-regulated in Transcription
  misc_feature: MA Experiment 20001555 PARAMETER Experiment Name: At_Drought_Soil_Dry_P Parameter: Age (day) Value: 24
  misc_feature: MA Experiment 20001555 PARAMETER Experiment Name: At_Drought_Soil_Dry_P Parameter: Organism Value: A. thaliana
  misc_feature: MA Experiment 20001555 PARAMETER Experiment Name: At_Drought_Soil_Dry_P Parameter: Plant Line Value: WS
  misc_feature: MA Experiment 20001555 PARAMETER Experiment Name: At_Drought_Soil_Dry_P Parameter: Post Timepoint (hr) Value: None
  misc_feature: MA Experiment 20001555 PARAMETER Experiment Name: At_Drought_Soil_Dry_P Parameter: Post-Treatment Value: None
  misc_feature: MA Experiment 20001555 PARAMETER Experiment Name: At_Drought_Soil_Dry_P Parameter: Timepoint (day) Value: 10
  misc_feature: MA Experiment 20001555 PARAMETER Experiment Name: At_Drought_Soil_Dry_P Parameter: Treatment Value: Drought vs. No Drought
  misc_feature: MA Experiment ID: 20001556 Result: Down-regulated in Transcription
  misc_feature: MA Experiment 20001556 PARAMETER Experiment Name: At_Drought_Soil_Dry_P Parameter: Age (day) Value: 26
  misc_feature: MA Experiment 20001556 PARAMETER Experiment Name: At_Drought_Soil_Dry_P Parameter: Organism Value: A. thaliana
  misc_feature: MA Experiment 20001556 PARAMETER Experiment Name: At_Drought_Soil_Dry_P Parameter: Plant Line Value: WS
  misc_feature: MA Experiment 20001556 PARAMETER Experiment Name: At_Drought_Soil_Dry_P Parameter: Post Timepoint (hr) Value: None
  misc_feature: MA Experiment 20001556 PARAMETER Experiment Name: At_Drought_Soil_Dry_P Parameter: Post-Treatment Value: None
  misc_feature: MA Experiment 20001556 PARAMETER Experiment Name: At_Drought_Soil_Dry_P Parameter: Timepoint (day) Value: 12
  misc_feature: MA Experiment 20001556 PARAMETER Experiment Name: At_Drought_Soil_Dry_P Parameter: Treatment Value: Drought vs. No Drought
  misc_feature: MA Experiment ID: 20001904 Result: Down-regulated in Transcription
  misc_feature: MA Experiment 20001904 PARAMETER Experiment Name: At_Drought_Reproduction_P Parameter: Age (day) Value: 37
  misc_feature: MA Experiment 20001904 PARAMETER Experiment Name: At_Drought_Reproduction_P Parameter: Organism Value: A. thaliana
  misc_feature: MA Experiment 20001904 PARAMETER Experiment Name: At_Drought_Reproduction_P Parameter: Plant Line Value: WS
  misc_feature: MA Experiment 20001904 PARAMETER Experiment Name: At_Drought_Reproduction_P Parameter: Timepoint (day) Value: 7
  misc_feature: MA Experiment 20001904 PARAMETER Experiment Name: At_Drought_Reproduction_P Parameter: Tissue Value: Rosettes
  misc_feature: MA Experiment 20001904 PARAMETER Experiment Name: At_Drought_Reproduction_P Parameter: Treatment Value: Drought vs. No Drought
  misc_feature: MA Experiment ID: 20001910 Result: Down-regulated in Transcription
  misc_feature: MA Experiment 20001910 PARAMETER Experiment Name: At_Drought_Reproduction_P Parameter: Age (day) Value: 37
  misc_feature: MA Experiment 20001910 PARAMETER Experiment Name: At_Drought_Reproduction_P Parameter: Organism Value: A. thaliana
  misc_feature: MA Experiment 20001910 PARAMETER Experiment Name: At_Drought_Reproduction_P Parameter: Plant Line Value: WS
  misc_feature: MA Experiment 20001910 PARAMETER Experiment Name: At_Drought_Reproduction_P Parameter: Timepoint (day) Value: 7
  misc_feature: MA Experiment 20001910 PARAMETER Experiment Name: At_Drought_Reproduction_P Parameter: Tissue Value: Flowers
  misc_feature: MA Experiment 20001910 PARAMETER Experiment Name: At_Drought_Reproduction_P Parameter: Treatment Value: Drought vs. No Drought
  misc_feature: MA Experiment ID: 20001911 Result: Down-regulated in Transcription
  misc_feature: MA Experiment 20001911 PARAMETER Experiment Name: At_Drought_Reproduction_P Parameter: Age (day) Value: 40
  misc_feature: MA Experiment 20001911 PARAMETER Experiment Name: At_Drought_Reproduction_P Parameter: Organism Value: A. thaliana
  misc_feature: MA Experiment 20001911 PARAMETER Experiment Name: At_Drought_Reproduction_P Parameter: Plant Line Value: WS
  misc_feature: MA Experiment 20001911 PARAMETER Experiment Name: At_Drought_Reproduction_P Parameter: Timepoint (day) Value: 10
  misc_feature: MA Experiment 20001911 PARAMETER Experiment Name: At_Drought_Reproduction_P Parameter: Tissue Value: Flowers
  misc_feature: MA Experiment 20001911 PARAMETER Experiment Name: At_Drought_Reproduction_P Parameter: Treatment Value: Drought vs. No Drought
aatctcattcttcttaaaaaccattacaattatttcactaaattataacttaatgggcattctccgttttgtattgttgattagtttgaatctggttttgtttggttttaaaacgaccgtgtcacagccacaacaacaggcacaagtcccatgtttattcatcttcggtgactctttagtcgacaatggaaacaacaataggttgctttctcttgcgagggctaattaccgaccttatggcattgactttccccaaggtacaacgggacggttcaccaacggtcgcacctacgttgatgcactagctcaaattcttggatttaggaactatattccaccatattccaggattcgtggccaggctatacttagaggtgcgaatttcgcatctggtgcagctggcattagagatgagaccggtgacaacttgggtgcacatacttctatgaaccagcaggtagagctatacacgaccgcggttcaacagatgcttcgatacttcagaggagacacaaatgagctccagagatacttaagccgttgtatcttttactcgggaatgggaagtaacgattatctcaacaattacttcatgcctgacttttactcaaccagtaccaattacaatgacaaaacctttgctgagtctctgataaagaactacacacaacagctcacgcgattgtaccaatttggagctcggaaagtgattgtgactggagtgggacagatcggttgcataccttaccagctcgcccgctacaataatcgtaacaatagtactggcagatgcaacgaaaagattaacaacgcaattgtggtgtttaacactcaagtcaagaaactagtggaccgtttaaacaaaggtcagttgaagggagcaaagtttgtttaccttgattcctacaagagtacctatgatctcgccgtcaatggagccgcttacggatttgaggttgtggacaaaggttgttgtggggtggggaggaacaatggtcagataacatgtttgccgctgcagaccccgtgccctgaccgaaccaagtatctcttttgggacgcgtttcatccgacggagactgctaacatactgctggcgaaatctaatttttactcccgagcttacacttacccaatcaacatccaagaactagccaatctttgaagaaataatatcttgatctcccatatgaatgcatatatgtcatgtaatatggctatttataaaatgtttctatttcctatgtgttaacttatgtttctttgaaataactaatgtttctttgtttctgtattgttcctcttacgtaactctcaaatataagagaaacatatgacacaagtgctcactttgattgaaagaattatattaacaattctgtttttg

SEQ ID NO: 96512 - protein, 387 aa, Arabidopsis thaliana
  peptide (1)..(387): Ceres Seq. ID no. 12733639
  misc_feature (52)..(369): Pfam Name: GDSL-like Lipase/Acylhydrolase Pfam Description: GDSL-like Lipase/Acylhydrolase
  misc_feature (18)..(387): Homolog of NCBI NO: 18398991 NR Description: unknown protein; protein id: At1g33811.1, by cDNA: gi_20466731 [Arabidopsis thaliana] unknown protein [Arabidopsis thaliana]
  misc_feature (18)..(387): Homolog of NCBI NO: 25336305 NR Description: F14M2.7 protein - Arabidopsis thaliana
  misc_feature (22)..(387): Homolog of NCBI NO: 15242458 NR Description: GDSL-motif lipase/hydrolase-like protein; protein At5g45670.1, supported by cDNA: 18389., supported by cDNA:
  misc_feature (22)..(387): Homolog of NCBI NO: 21553940 NR Description: GDSL-motif lipase/hydrolase-like protein
  misc_feature (27)..(387): Homolog of NCBI NO: 21592417 NR Description: lipase/hydrolase, putative [Arabidopsis thaliana]
  misc_feature (27)..(387): Homolog of NCBI NO: 15220514 NR Description: lipase/hydrolase, putative; protein id: supported by cDNA: 23556., supported by cDNA: gi_18086454
  misc_feature (50)..(387): Homolog of NCBI NO: 7485419 NR Description: hypothetical protein F13C5.140 - Arabidopsis >gi|2832625|emb|CAA16754.1| putative protein [Arabidopsis >gi|7268691|emb|CAB78899.1| putative protein [Arabidopsis
  misc_feature (50)..(387): Homolog of NCBI NO: 18415211 NR Description: Expressed protein; protein id: At4g18970.1, by cDNA: 42850., supported by cDNA: gi_16604576, supported by gi_21281049 [Arabidopsis thaliana] >gi|16604577|gb|AAL24090.1|
  misc_feature (48)..(387): Homolog of NCBI NO: 34910808 NR Description: GDSL-motif lipase/hydrolase-like protein [Oryza
  misc_feature (49)..(384): Homolog of NCBI NO: 7486138 NR Description: hypothetical protein F25I24.160 - Arabidopsis >gi|4539369|emb|CAB40063.1| putative protein [Arabidopsis >gi|7267793|emb|CAB81196.1| putative protein [Arabidopsis
ISFFLKTITIISLNYNLMGILRFVLLISLNLVLFGFKTTVSQPQQQAQVPCLFIFGDSLVDNGNNNRLLSLARANYRPYGIDFPQGTTGRFTNGRTYVDALAQILGFRNYIPPYSRIRGQAILRGANFASGAAGIRDETGDNLGAHTSMNQQVELYTTAVQQMLRYFRGDTNELQRYLSRCIFYSGMGSNDYLNNYFMPDFYSTSTNYNDKTFAESLIKNYTQQLTRLYQFGARKVIVTGVGQIGCIPYQLARYNNRNNSTGRCNEKINNAIVVFNTQVKKLVDRLNKGQLKGAKFVYLDSYKSTYDLAVNGAAYGFEVVDKGCCGVGRNNGQITCLPLQTPCPDRTKYLFWDAFHPTETANILLAKSNFYSRAYTYPINIQELANL

SEQ ID NO: 96513 - protein, 370 aa, Arabidopsis thaliana
  peptide (1)..(370): Ceres Seq. ID no. 12733640
  misc_feature (35)..(352): Pfam Name: GDSL-like Lipase/Acylhydrolase Pfam Description: GDSL-like Lipase/Acylhydrolase
  misc_feature (1)..(370): Homolog of NCBI NO: 18398991 NR Description: unknown protein; protein id: At1g33811.1, by cDNA: gi_20466731 [Arabidopsis thaliana] unknown protein [Arabidopsis thaliana]
  misc_feature (1)..(370): Homolog of NCBI NO: 25336305 NR Description: F14M2.7 protein - Arabidopsis thaliana
  misc_feature (5)..(370): Homolog of NCBI NO: 15242458 NR Description: GDSL-motif lipase/hydrolase-like protein; protein At5g45670.1, supported by cDNA: 18389., supported by cDNA:
  misc_feature (5)..(370): Homolog of NCBI NO: 21553940 NR Description: GDSL-motif lipase/hydrolase-like protein
  misc_feature (10)..(370): Homolog of NCBI NO: 21592417 NR Description: lipase/hydrolase, putative [Arabidopsis thaliana]
  misc_feature (10)..(370): Homolog of NCBI NO: 15220514 NR Description: lipase/hydrolase, putative; protein id: supported by cDNA: 23556., supported by cDNA: gi_18086454
  misc_feature (33)..(370): Homolog of NCBI NO: 7485419 NR Description: hypothetical protein F13C5.140 - Arabidopsis >gi|2832625|emb|CAA16754.1| putative protein [Arabidopsis >gi|7268691|emb|CAB78899.1| putative protein [Arabidopsis
  misc_feature (33)..(370): Homolog of NCBI NO: 18415211 NR Description: Expressed protein; protein id: At4g18970.1, by cDNA: 42850., supported by cDNA: gi_16604576, supported by gi_21281049 [Arabidopsis thaliana] >gi|16604577|gb|AAL24090.1|
  misc_feature (31)..(370): Homolog of NCBI NO: 34910808 NR Description: GDSL-motif lipase/hydrolase-like protein [Oryza
  misc_feature (32)..(367): Homolog of NCBI NO: 7486138 NR Description: hypothetical protein F25I24.160 - Arabidopsis >gi|4539369|emb|CAB40063.1| putative protein [Arabidopsis >gi|7267793|emb|CAB81196.1| putative protein [Arabidopsis
MGILRFVLLISLNLVLFGFKTTVSQPQQQAQVPCLFIFGDSLVDNGNNNRLLSLARANYRPYGIDFPQGTTGRFTNGRTYVDALAQILGFRNYIPPYSRIRGQAILRGANFASGAAGIRDETGDNLGAHTSMNQQVELYTTAVQQMLRYFRGDTNELQRYLSRCIFYSGMGSNDYLNNYFMPDFYSTSTNYNDKTFAESLIKNYTQQLTRLYQFGARKVIVTGVGQIGCIPYQLARYNNRNNSTGRCNEKINNAIVVFNTQVKKLVDRLNKGQLKGAKFVYLDSYKSTYDLAVNGAAYGFEVVDKGCCGVGRNNGQITCLPLQTPCPDRTKYLFWDAFHPTETANILLAKSNFYSRAYTYPINIQELANL

SEQ ID NO: 96514 - protein, 239 aa, Arabidopsis thaliana
  peptide (1)..(239): Ceres Seq. ID no. 12733641
  misc_feature (1)..(221): Pfam Name: GDSL-like Lipase/Acylhydrolase Pfam Description: GDSL-like Lipase/Acylhydrolase
  misc_feature (1)..(239): Homolog of NCBI NO: 18398991 NR Description: unknown protein; protein id: At1g33811.1, by cDNA: gi_20466731 [Arabidopsis thaliana] unknown protein [Arabidopsis thaliana]
  misc_feature (1)..(239): Homolog of NCBI NO: 25336305 NR Description: F14M2.7 protein - Arabidopsis thaliana
  misc_feature (1)..(239): Homolog of NCBI NO: 15242458 NR Description: GDSL-motif lipase/hydrolase-like protein; protein At5g45670.1, supported by cDNA: 18389., supported by cDNA:
  misc_feature (1)..(239): Homolog of NCBI NO: 21553940 NR Description: GDSL-motif lipase/hydrolase-like protein
  misc_feature (1)..(239): Homolog of NCBI NO: 21592417 NR Description: lipase/hydrolase, putative [Arabidopsis thaliana]
  misc_feature (1)..(239): Homolog of NCBI NO: 15220514 NR Description: lipase/hydrolase, putative; protein id: supported by cDNA: 23556., supported by cDNA: gi_18086454
  misc_feature (1)..(239): Homolog of NCBI NO: 7485419 NR Description: hypothetical protein F13C5.140 - Arabidopsis >gi|2832625|emb|CAA16754.1| putative protein [Arabidopsis >gi|7268691|emb|CAB78899.1| putative protein [Arabidopsis
  misc_feature (1)..(239): Homolog of NCBI NO: 18415211 NR Description: Expressed protein; protein id: At4g18970.1, by cDNA: 42850., supported by cDNA: gi_16604576, supported by gi_21281049 [Arabidopsis thaliana] >gi|16604577|gb|AAL24090.1|
  misc_feature (1)..(239): Homolog of NCBI NO: 34910808 NR Description: GDSL-motif lipase/hydrolase-like protein [Oryza
  misc_feature (1)..(236): Homolog of NCBI NO: 7486138 NR Description: hypothetical protein F25I24.160 - Arabidopsis >gi|4539369|emb|CAB40063.1| putative protein [Arabidopsis >gi|7267793|emb|CAB81196.1| putative protein [Arabidopsis
MNQQVELYTTAVQQMLRYFRGDTNELQRYLSRCIFYSGMGSNDYLNNYFMPDFYSTSTNYNDKTFAESLIKNYTQQLTRLYQFGARKVIVTGVGQIGCIPYQLARYNNRNNSTGRCNEKINNAIVVFNTQVKKLVDRLNKGQLKGAKFVYLDSYKSTYDLAVNGAAYGFEVVDKGCCGVGRNNGQITCLPLQTPCPDRTKYLFWDAFHPTETANILLAKSNFYSRAYTYPINIQELANL

SEQ ID NO: 96515 - DNA, 1011 bp, Arabidopsis thaliana
  misc_feature (1)..(1011): Ceres Seq. ID no. 12733649
  misc_feature: MA Experiment ID: 20000173 Result: Down-regulated in Transcription
  misc_feature: MA Experiment 20000173 PARAMETER Experiment Name: At_42deg_Heat_P Parameter: Age (day) Value: 14
  misc_feature: MA Experiment 20000173 PARAMETER Experiment Name: At_42deg_Heat_P Parameter: Organism Value: A. thaliana
  misc_feature: MA Experiment 20000173 PARAMETER Experiment Name: At_42deg_Heat_P Parameter: Plant Line Value: WS
  misc_feature: MA Experiment 20000173 PARAMETER Experiment Name: At_42deg_Heat_P Parameter: Temperature (deg C) Value: 42 vs. 22
  misc_feature: MA Experiment 20000173 PARAMETER Experiment Name: At_42deg_Heat_P Parameter: Timepoint (hr) Value: 6
  misc_feature: MA Experiment 20000173 PARAMETER Experiment Name: At_42deg_Heat_P Parameter: Tissue Value: Aerial
atggctgaagatcagaacacaactgaccgttgggagttgccttcagcgtcagagcccgtcaaaaacgttgaccgttgggagttgccttcagcgtcagagcccgtcaaaaacgtagttctggtaggccgtactgggaatggaaaaagcgccactggaaattccatcatcggaagaaaggttttcgagtcaaaatatcaagctgttggtgttaccacaagatgtaagacatttagagctgtgacaccggatggccccataatcaatgtgattgacactcctggtctcttcgacctggccgtgtccgctgagtttattagtaaggaaatcgtcaactgccttattcttgctagagaagggctacatgctgtggtgttagttctatccttgtcgactcggatttcacaagaggaagaaaacgcactttgtacgttacagatgttgttcgggggtaaaatcgttgactatttgatcgttgtattcacttgtggtgatatgttggaagatcgaaatatgactttagaagattatttgtccaatggttgccctgaatttctaaagaatgttctcagactatgtggaggcagaagggttgtatttgataaccgaacgaaagatgaaggtgtgaaggctaagcaagtccagcagcttctggtccatgtcgcagcgattgaaaaggaaactggtgggaatccctttacggacacgatgcaccgtaggatacaggaagaggctgcaagggttaaaagggaagagaaggaaattgaagaaaaaaacattgcagacgaagagaaagcagcgttgaagaagcagttagacatgtcgtatagccaaaacatgaacatgatggcattgatgatggagaggatatttaaagaaacagcagcggcgaatgagagacaaatgaatatgatgaaagactttatggaaatttcaataataggaaatgatgctcatcgtaaaagagctgaagagaagcaggcagagaagaaacaagaatgcaacatcctgtga

SEQ ID NO: 96516 - protein, 336 aa, Arabidopsis thaliana
  peptide (1)..(336): Ceres Seq. ID no. 12733650
  misc_feature (36)..(251): Pfam Name: AIG1 family Pfam Description: AIG1 family
  misc_feature (1)..(336): Homolog of NCBI NO: 15217724 NR Description: AIG1-like protein; protein id: At1g33930.1
  misc_feature (28)..(311): Homolog of NCBI NO: 15217719 NR Description: AIG1-like protein; protein id: At1g33900.1
  misc_feature (27)..(332): Homolog of NCBI NO: 15217717 NR Description: AIG1-like protein; protein id: At1g33890.1
  misc_feature (1)..(336): Homolog of NCBI NO: 15217731 NR Description: AIG1; protein id: At1g33960.1, supported by cDNA: [Arabidopsis thaliana] >gi|1703219|sp|P54120|AIG1_ARATH AIG1 >gi|1127804|gb|AAC49282.1| AIG1
  misc_feature (1)..(336): Homolog of NCBI NO: 10092442 NR Description: disease resistance protein AIG1; 916-2572
  misc_feature (24)..(336): Homolog of NCBI NO: 15217720 NR Description: AIG1-like protein; protein id: At1g33910.1
  misc_feature (31)..(304): Homolog of NCBI NO: 15220922 NR Description: AIG1-like protein; protein id: At1g33950.1
  misc_feature (32)..(326): Homolog of NCBI NO: 15225799 NR Description: similar to avrRpt2-induced protein 1; protein id:
  misc_feature (24)..(324): Homolog of NCBI NO: 18399081 NR Description: expressed protein; protein id: At1g33970.1,
  misc_feature (24)..(324): Homolog of NCBI NO: 25373414 NR Description: hypothetical protein F12G12.21 - Arabidopsis >gi|10086478|gb|AAG12538.1|AC015446_19 Similar to AIG1 protein thaliana] >gi|10092443|gb|AAG12846.1|AC079286_3 disease
MAEDQNTTDRWELPSASEPVKNVDRWELPSASEPVKNVVLVGRTGNGKSATGNSIIGRKVFESKYQAVGVTTRCKTFRAVTPDGPIINVIDTPGLFDLAVSAEFISKEIVNCLILAREGLHAVVLVLSLSTRISQEEENALCTLQMLFGGKIVDYLIVVFTCGDMLEDRNMTLEDYLSNGCPEFLKNVLRLCGGRRVVFDNRTKDEGVKAKQVQQLLVHVAAIEKETGGNPFTDTMHRRIQEEAARVKREEKEIEEKNIADEEKAALKKQLDMSYSQNMNMMALMMERIFKETAAANERQMNMMKDFMEISIIGNDAHRKRAEEKQAEKKQECNIL

SEQ ID NO: 96517 - protein, 191 aa, Arabidopsis thaliana
  peptide (1)..(191): Ceres Seq. ID no. 12733651
  misc_feature (1)..(106): Pfam Name: AIG1 family Pfam Description: AIG1 family
  misc_feature (1)..(191): Homolog of NCBI NO: 15217724 NR Description: AIG1-like protein; protein id: At1g33930.1
  misc_feature (1)..(166): Homolog of NCBI NO: 15217719 NR Description: AIG1-like protein; protein id: At1g33900.1
  misc_feature (1)..(187): Homolog of NCBI NO: 15217717 NR Description: AIG1-like protein; protein id: At1g33890.1
  misc_feature (1)..(191): Homolog of NCBI NO: 15217731 NR Description: AIG1; protein id: At1g33960.1, supported by cDNA: [Arabidopsis thaliana] >gi|1703219|sp|P54120|AIG1_ARATH AIG1 >gi|1127804|gb|AAC49282.1| AIG1
  misc_feature (1)..(191): Homolog of NCBI NO: 10092442 NR Description: disease resistance protein AIG1; 916-2572
  misc_feature (1)..(191): Homolog of NCBI NO: 15217720 NR Description: AIG1-like protein; protein id: At1g33910.1
  misc_feature (1)..(159): Homolog of NCBI NO: 15220922 NR Description: AIG1-like protein; protein id: At1g33950.1
  misc_feature (1)..(181): Homolog of NCBI NO: 15225799 NR Description: similar to avrRpt2-induced protein 1; protein id:
  misc_feature (1)..(179): Homolog of NCBI NO: 18399081 NR Description: expressed protein; protein id: At1g33970.1,
  misc_feature (1)..(179): Homolog of NCBI NO: 25373414 NR Description: hypothetical protein F12G12.21 - Arabidopsis >gi|10086478|gb|AAG12538.1|AC015446_19 Similar to AIG1 protein thaliana] >gi|10092443|gb|AAG12846.1|AC079286_3 disease
MLFGGKIVDYLIVVFTCGDMLEDRNMTLEDYLSNGCPEFLKNVLRLCGGRRVVFDNRTKDEGVKAKQVQQLLVHVAAIEKETGGNPFTDTMHRRIQEEAARVKREEKEIEEKNIADEEKAALKKQLDMSYSQNMNMMALMMERIFKETAAANERQMNMMKDFMEISIIGNDAHRKRAEEKQAEKKQECNIL

SEQ ID NO: 96518 - protein, 172 aa, Arabidopsis thaliana
  peptide (1)..(172): Ceres Seq. ID no. 12733652
  misc_feature (1)..(87): Pfam Name: AIG1 family Pfam Description: AIG1 family
  misc_feature (1)..(172): Homolog of NCBI NO: 15217724 NR Description: AIG1-like protein; protein id: At1g33930.1
  misc_feature (1)..(147): Homolog of NCBI NO: 15217719 NR Description: AIG1-like protein; protein id: At1g33900.1
  misc_feature (1)..(168): Homolog of NCBI NO: 15217717 NR Description: AIG1-like protein; protein id: At1g33890.1
  misc_feature (1)..(172): Homolog of NCBI NO: 15217731 NR Description: AIG1; protein id: At1g33960.1, supported by cDNA: [Arabidopsis thaliana] >gi|1703219|sp|P54120|AIG1_ARATH AIG1 >gi|1127804|gb|AAC49282.1| AIG1
  misc_feature (1)..(172): Homolog of NCBI NO: 10092442 NR Description: disease resistance protein AIG1; 916-2572
  misc_feature (1)..(172): Homolog of NCBI NO: 15217720 NR Description: AIG1-like protein; protein id: At1g33910.1
  misc_feature (1)..(140): Homolog of NCBI NO: 15220922 NR Description: AIG1-like protein; protein id: At1g33950.1
  misc_feature (1)..(162): Homolog of NCBI NO: 15225799 NR Description: similar to avrRpt2-induced protein 1; protein id:
  misc_feature (1)..(160): Homolog of NCBI NO: 18399081 NR Description: expressed protein; protein id: At1g33970.1,
  misc_feature (1)..(160): Homolog of NCBI NO: 25373414 NR Description: hypothetical protein F12G12.21 - Arabidopsis >gi|10086478|gb|AAG12538.1|AC015446_19 Similar to AIG1 protein thaliana] >gi|10092443|gb|AAG12846.1|AC079286_3 disease
MLEDRNMTLEDYLSNGCPEFLKNVLRLCGGRRVVFDNRTKDEGVKAKQVQQLLVHVAAIEKETGGNPFTDTMHRRIQEEAARVKREEKEIEEKNIADEEKAALKKQLDMSYSQNMNMMALMMERIFKETAAANERQMNMMKDFMEISIIGNDAHRKRAEEKQAEKKQECNIL

SEQ ID NO: 96519 - DNA, 984 bp, Arabidopsis thaliana
  misc_feature (1)..(984): Ceres Seq. ID no. 12733675
  misc_feature: MA Experiment ID: 20000173 Result: Down-regulated in Transcription
  misc_feature: MA Experiment 20000173 PARAMETER Experiment Name: At_42deg_Heat_P Parameter: Age (day) Value: 14
  misc_feature: MA Experiment 20000173 PARAMETER Experiment Name: At_42deg_Heat_P Parameter: Organism Value: A. thaliana
  misc_feature: MA Experiment 20000173 PARAMETER Experiment Name: At_42deg_Heat_P Parameter: Plant Line Value: WS
  misc_feature: MA Experiment 20000173 PARAMETER Experiment Name: At_42deg_Heat_P Parameter: Temperature (deg C) Value: 42 vs. 22
  misc_feature: MA Experiment 20000173 PARAMETER Experiment Name: At_42deg_Heat_P Parameter: Timepoint (hr) Value: 6
  misc_feature: MA Experiment 20000173 PARAMETER Experiment Name: At_42deg_Heat_P Parameter: Tissue Value: Aerial
  misc_feature: MA Experiment ID: 20000179 Result: Up-regulated in Transcription
  misc_feature: MA Experiment 20000179 PARAMETER Experiment Name: At_Germinating_Seeds_P Parameter: Age (hr) Value: 6 vs. 0
  misc_feature: MA Experiment 20000179 PARAMETER Experiment Name: At_Germinating_Seeds_P Parameter: Tissue Value: Germinating Seeds
  misc_feature: MA Experiment ID: 20000180 Result: Up-regulated in Transcription
  misc_feature: MA Experiment 20000180 PARAMETER Experiment Name: At_Germinating_Seeds_P Parameter: Age (hr) Value: 24 vs. 0
  misc_feature: MA Experiment 20000180 PARAMETER Experiment Name: At_Germinating_Seeds_P Parameter: Tissue Value: Germinating Seeds
  misc_feature: MA Experiment ID: 20000234 Result: Up-regulated in Transcription
  misc_feature: MA Experiment 20000234 PARAMETER Experiment Name: At_Siliques_P Parameter: Age (day) Value: 21
  misc_feature: MA Experiment 20000234 PARAMETER Experiment Name: At_Siliques_P Parameter: Organism Value: A. thaliana
  misc_feature: MA Experiment 20000234 PARAMETER Experiment Name: At_Siliques_P Parameter: Plant Line Value: WS
  misc_feature: MA Experiment 20000234 PARAMETER Experiment Name: At_Siliques_P Parameter: Tissue Value: Less Than 5mm Siliques vs. Whole Plant
  misc_feature: MA Experiment ID: 20000235 Result: Up-regulated in Transcription
  misc_feature: MA Experiment 20000235 PARAMETER Experiment Name: At_Siliques_P Parameter: Age (day) Value: 21
  misc_feature: MA Experiment 20000235 PARAMETER Experiment Name: At_Siliques_P Parameter: Organism Value: A. thaliana
  misc_feature: MA Experiment 20000235 PARAMETER Experiment Name: At_Siliques_P Parameter: Plant Line Value: WS
  misc_feature: MA Experiment 20000235 PARAMETER Experiment Name: At_Siliques_P Parameter: Tissue Value: 5-10mm Siliques vs. Whole Plant
  misc_feature: MA Experiment ID: 20000264 Result: Up-regulated in Transcription
  misc_feature: MA Experiment 20000264 PARAMETER Experiment Name: At_Open_Flower_P Parameter: Age (day) Value: 21
  misc_feature: MA Experiment 20000264 PARAMETER Experiment Name: At_Open_Flower_P Parameter: Plant Line Value: WS
  misc_feature: MA Experiment 20000264 PARAMETER Experiment Name: At_Open_Flower_P Parameter: Tissue Value: Open Flower vs. Whole Plant
  misc_feature: MA Experiment ID: 20000265 Result: Up-regulated in Transcription
  misc_feature: MA Experiment 20000265 PARAMETER Experiment Name: At_Open_Flower_P Parameter: Age (day) Value: 21
  misc_feature: MA Experiment 20000265 PARAMETER Experiment Name: At_Open_Flower_P Parameter: Plant Line Value: WS
  misc_feature: MA Experiment 20000265 PARAMETER Experiment Name: At_Open_Flower_P Parameter: Tissue Value: Closed Flower vs. Whole Plant
  misc_feature: MA Experiment ID: 20000286 Result: Up-regulated in Transcription
  misc_feature: MA Experiment 20000286 PARAMETER Experiment Name: At_Open_Flower_P Parameter: Age (day) Value: 21
  misc_feature: MA Experiment 20000286 PARAMETER Experiment Name: At_Open_Flower_P Parameter: Plant Line Value: WS
  misc_feature: MA Experiment 20000286 PARAMETER Experiment Name: At_Open_Flower_P Parameter: Tissue Value: Half Open vs. Whole Plant
  misc_feature: MA Experiment ID: 20000495 Result: Up-regulated in Transcription
  misc_feature: MA Experiment 20000495 PARAMETER Experiment Name: At_Guard_Cells_P Parameter: Harvest Date Value: 8/2/2002
  misc_feature: MA Experiment 20000495 PARAMETER Experiment Name: At_Guard_Cells_P Parameter: Organism Value: A. thaliana
  misc_feature: MA Experiment 20000495 PARAMETER Experiment Name: At_Guard_Cells_P Parameter: Tissue Value: Guard Cells vs. Leaves
  misc_feature: MA Experiment ID: 20000496 Result: Up-regulated in Transcription
  misc_feature: MA Experiment 20000496 PARAMETER Experiment Name: At_Guard_Cells_P Parameter: Harvest Date Value: 7/19/2002
  misc_feature: MA Experiment 20000496 PARAMETER Experiment Name: At_Guard_Cells_P Parameter: Organism Value: Canola
  misc_feature: MA Experiment 20000496 PARAMETER Experiment Name: At_Guard_Cells_P Parameter: Tissue Value: Guard Cells vs. Leaves
  misc_feature: Pfam Name: Mito_carr Pfam Description: Mitochondrial carrier protein
atggatagtgacattgtttccagtagcatagatcgatctcagacagcaatgcctgatgctttagcattcaagagtatcaatgatcctatcaagaaccagatcaatagttgtgctgcaatctgtgttaagcaagatgatccatgccatttcttgcgtgtcctttatgagtctctgataacaggagggttagctggtgttgtggtggaagctgctttgtatccaattgatacaatcaaaactcgaatacaggtagtttctcctcaaaccaatttctcgggatggtggaaagataatatggaaggattatactctggtcttggtggaaatcttgtcggtgtcttacctgcttcggctctattttttggtgtatatgaaccaaccaaacagaagctgctaaaggttttaccagataatcttagtgcggttgcacatttggctgcaggtgcgttaggaggtgctgtttcatctattgttcgggtaccaacagaagttgtgaaacagcggatgcagactggtcaatttgtttcggcccctgacgctgttcgccttattatagccaaggagggctttggaggcatgtatgcgggttatggatccttcttattgcgagatttgccttttgacgcgctccagttttgtgtttatgagcaattacgaattggatacaagttggctgcaagaagagatctaaatgatccagagaatgcgatgattggtgcttttgctggtgctgtcactggagttttgaccactcctcttgatgttatcaaaaccagattaatggttcagggctcaggaactcagtataaaggagtttcggattgcattaagacgataataagagaagaaggttcatcagctttgtggaagggaatgggtccaagggtattgtggataggtattggaggttcaattttctttggtgttttggaaaagacaaagcagattctttcagagagaagccaaaagagtcacaatgcttaa

SEQ ID NO: 96520 - protein, 327 aa, Arabidopsis thaliana
  peptide (1)..(327): Ceres Seq. ID no. 12733676
  misc_feature: Pfam Name: Mito_carr Pfam Description: Mitochondrial carrier protein
  misc_feature (1)..(327): Homolog of NCBI NO: 18399114 NR Description: allinase, putative; protein id: At1g34065.1
  misc_feature (9)..(320): Homolog of NCBI NO: 18420458 NR Description: mitochondrial carrier protein family; protein id: supported by cDNA: 32654., supported by cDNA: gi_15028274, by cDNA: gi_19310698 [Arabidopsis thaliana]
  misc_feature (49)..(323): Homolog of NCBI NO: 34394981 NR Description: mitochondrial aspartate-glutamate carrier
  misc_feature (9)..(290): Homolog of NCBI NO: 7486053 NR Description: hypothetical protein F23K16.90 - Arabidopsis
  misc_feature (153)..(225): Homolog of NCBI NO: 25518662 NR Description: hypothetical protein F12G12.11 [imported] - thaliana >gi|10086470|gb|AAG12530.1|AC015446_11 Hypothetical
  misc_feature (19)..(90): Homolog of NCBI NO: 25518662 NR Description: hypothetical protein F12G12.11 [imported] - thaliana >gi|10086470|gb|AAG12530.1|AC015446_11 Hypothetical
  misc_feature (35)..(321): Homolog of NCBI NO: 24650120 NR Description: CG4743-PA [Drosophila melanogaster]
  misc_feature (57)..(324): Homolog of NCBI NO: 27754081 NR Description: RIKEN cDNA 4930433D19; expressed sequence [Mus musculus] >gi|22477482|gb|AAH37142.1| Unknown (protein for
  misc_feature (53)..(323): Homolog of NCBI NO: 31208625 NR Description: ENSANGP00000011068 [Anopheles gambiae]
  misc_feature (49)..(308): Homolog of NCBI NO: 19115553 NR Description: agpet8 protein. [Schizosaccharomyces pombe]
MDSDIVSSSIDRSQTAMPDALAFKSINDPIKNQINSCAAICVKQDDPCHFLRVLYESLITGGLAGVVVEAALYPIDTIKTRIQVVSPQTNFSGWWKDNMEGLYSGLGGNLVGVLPASALFFGVYEPTKQKLLKVLPDNLSAVAHLAAGALGGAVSSIVRVPTEVVKQRMQTGQFVSAPDAVRLIIAKEGFGGMYAGYGSFLLRDLPFDALQFCVYEQLRIGYKLAARRDLNDPENAMIGAFAGAVTGVLTTPLDVIKTRLMVQGSGTQYKGVSDCIKTIIREEGSSALWKGMGPRVLWIGIGGSIFFGVLEKTKQILSERSQKSHNA

SEQ ID NO: 96521 - protein, 311 aa, Arabidopsis thaliana
  peptide (1)..(311): Ceres Seq. ID no. 12733677
  misc_feature: Pfam Name: Mito_carr Pfam Description: Mitochondrial carrier protein
  misc_feature (1)..(311): Homolog of NCBI NO: 18399114 NR Description: allinase, putative; protein id: At1g34065.1
  misc_feature (1)..(304): Homolog of NCBI NO: 18420458 NR Description: mitochondrial carrier protein family; protein id: supported by cDNA: 32654., supported by cDNA: gi_15028274, by cDNA: gi_19310698 [Arabidopsis thaliana]
  misc_feature (33)..(307): Homolog of NCBI NO: 34394981 NR Description: mitochondrial aspartate-glutamate carrier
  misc_feature (1)..(274): Homolog of NCBI NO: 7486053 NR Description: hypothetical protein F23K16.90 - Arabidopsis
  misc_feature (137)..(209): Homolog of NCBI NO: 25518662 NR Description: hypothetical protein F12G12.11 [imported] - thaliana >gi|10086470|gb|AAG12530.1|AC015446_11 Hypothetical
  misc_feature (3)..(74): Homolog of NCBI NO: 25518662 NR Description: hypothetical protein F12G12.11 [imported] - thaliana >gi|10086470|gb|AAG12530.1|AC015446_11 Hypothetical
  misc_feature (19)..(305): Homolog of NCBI NO: 24650120 NR Description: CG4743-PA [Drosophila melanogaster]
  misc_feature (41)..(308): Homolog of NCBI NO: 27754081 NR Description: RIKEN cDNA 4930433D19; expressed sequence [Mus musculus] >gi|22477482|gb|AAH37142.1| Unknown (protein for
  misc_feature (37)..(307): Homolog of NCBI NO: 31208625 NR Description: ENSANGP00000011068 [Anopheles gambiae]
  misc_feature (33)..(292): Homolog of NCBI NO: 19115553 NR Description: agpet8 protein. [Schizosaccharomyces pombe]
MPDALAFKSINDPIKNQINSCAAICVKQDDPCHFLRVLYESLITGGLAGVVVEAALYPIDTIKTRIQVVSPQTNFSGWWKDNMEGLYSGLGGNLVGVLPASALFFGVYEPTKQKLLKVLPDNLSAVAHLAAGALGGAVSSIVRVPTEVVKQRMQTGQFVSAPDAVRLIIAKEGFGGMYAGYGSFLLRDLPFDALQFCVYEQLRIGYKLAARRDLNDPENAMIGAFAGAVTGVLTTPLDVIKTRLMVQGSGTQYKGVSDCIKTIIREEGSSALWKGMGPRVLWIGIGGSIFFGVLEKTKQILSERSQKSHNA

SEQ ID NO: 96522 - protein, 229 aa, Arabidopsis thaliana
  peptide (1)..(229): Ceres Seq. ID no. 12733678
  misc_feature: Pfam Name: Mito_carr Pfam Description: Mitochondrial carrier protein
  misc_feature (1)..(229): Homolog of NCBI NO: 18399114 NR Description: allinase, putative; protein id: At1g34065.1
  misc_feature (1)..(222): Homolog of NCBI NO: 18420458 NR Description: mitochondrial carrier protein family; protein id: supported by cDNA: 32654., supported by cDNA: gi_15028274, by cDNA: gi_19310698 [Arabidopsis thaliana]
  misc_feature (1)..(225): Homolog of NCBI NO: 34394981 NR Description: mitochondrial aspartate-glutamate carrier
  misc_feature (1)..(192): Homolog of NCBI NO: 7486053 NR Description: hypothetical protein F23K16.90 - Arabidopsis
  misc_feature (55)..(127): Homolog of NCBI NO: 25518662 NR Description: hypothetical protein F12G12.11 [imported] - thaliana >gi|10086470|gb|AAG12530.1|AC015446_11 Hypothetical
  misc_feature (1)..(223): Homolog of NCBI NO: 24650120 NR Description: CG4743-PA [Drosophila melanogaster]
  misc_feature (1)..(226): Homolog of NCBI NO: 27754081 NR Description: RIKEN cDNA 4930433D19; expressed sequence [Mus musculus] >gi|22477482|gb|AAH37142.1| Unknown (protein for
  misc_feature (1)..(225): Homolog of NCBI NO: 31208625 NR Description: ENSANGP00000011068 [Anopheles gambiae]
  misc_feature (1)..(210): Homolog of NCBI NO: 19115553 NR Description: agpet8 protein. [Schizosaccharomyces pombe]
  misc_feature (1)..(102): Homolog of NCBI NO: 30699000 NR Description: mitochondrial carrier protein family [Arabidopsis >gi|26450340|dbj|BAC42286.1| putative mitochondrial carrier [Arabidopsis thaliana] >gi|28827414|gb|AAO50551.1| putative
MEGLYSGLGGNLVGVLPASALFFGVYEPTKQKLLKVLPDNLSAVAHLAAGALGGAVSSIVRVPTEVVKQRMQTGQFVSAPDAVRLIIAKEGFGGMYAGYGSFLLRDLPFDALQFCVYEQLRIGYKLAARRDLNDPENAMIGAFAGAVTGVLTTPLDVIKTRLMVQGSGTQYKGVSDCIKTIIREEGSSALWKGMGPRVLWIGIGGSIFFGVLEKTKQILSERSQKSHNA

SEQ ID NO: 96523 - DNA, 1620 bp, Arabidopsis thaliana
  misc_feature (1)..(1620): Ceres Seq. ID no. 12733695
  misc_feature: MA Experiment ID: 20000180 Result: Down-regulated in Transcription
  misc_feature: MA Experiment 20000180 PARAMETER Experiment Name: At_Germinating_Seeds_P Parameter: Age (hr) Value: 24 vs. 0
  misc_feature: MA Experiment 20000180 PARAMETER Experiment Name: At_Germinating_Seeds_P Parameter: Tissue Value: Germinating Seeds
  misc_feature: MA Experiment ID: 20000235 Result: Down-regulated in Transcription
  misc_feature: MA Experiment 20000235 PARAMETER Experiment Name: At_Siliques_P Parameter: Age (day) Value: 21
  misc_feature: MA Experiment 20000235 PARAMETER Experiment Name: At_Siliques_P Parameter: Organism Value: A. thaliana
  misc_feature: MA Experiment 20000235 PARAMETER Experiment Name: At_Siliques_P Parameter: Plant Line Value: WS
  misc_feature: MA Experiment 20000235 PARAMETER Experiment Name: At_Siliques_P Parameter: Tissue Value: 5-10mm Siliques vs. Whole Plant
  misc_feature: MA Experiment ID: 20000265 Result: Down-regulated in Transcription
  misc_feature: MA Experiment 20000265 PARAMETER Experiment Name: At_Open_Flower_P Parameter: Age (day) Value: 21
  misc_feature: MA Experiment 20000265 PARAMETER Experiment Name: At_Open_Flower_P Parameter: Plant Line Value: WS
  misc_feature: MA Experiment 20000265 PARAMETER Experiment Name: At_Open_Flower_P Parameter: Tissue Value: Closed Flower vs. Whole Plant
  misc_feature: MA Experiment ID: 20000794 Result: Down-regulated in Transcription
  misc_feature: MA Experiment 20000794 PARAMETER Experiment Name: At_Petals_P Parameter: Age (day) Value: 23-25 days
  misc_feature: MA Experiment 20000794 PARAMETER Experiment Name: At_Petals_P Parameter: Plant Line Value: WS
  misc_feature: MA Experiment 20000794 PARAMETER Experiment Name: At_Petals_P Parameter: Tissue Value: Petals vs. Whole plant
gaaaacactaaagaggaaattaagtgaccaagtcttcttcttctttactctctcctttctgttaccgtcgaaaaaatcgagctaatgtccggtgataaccagatccgaatcggactcttaagctgcacaaacaaagtccgcaaactctctcgagctataaatctctctccaaacgctactatatccgccatagccaccacaagctccatcgaagaagcaaaatcatttgctaaatccaacaatttccctccgaatacaaaactccacagctcctacgagtcacttctagaagatcccgacgtcgacgccgtctatttccctatccccactcgcctccacgtcgagtgggctacactcgccgctattaagggtaaacatatactccttgataagcctgttgctttaaacgtagctgagtttgatcagatcgttgaagcttgtgaggttaatggtgttcaatttatggatggaactcagtggatgcatagccctagaacggataagattaaagaatttgtgaatgatttagagagttttggtcagattaaatctgtgtatagttgtttctcatttgctgcgagtgatgatttcttaaaacatgatattcgtgtaaagcctggtcttgatggacttggagctctcggtgatgctggatggtatacgatccaagcgattcttcttgttaacaactttaaacttccgaagaccgttactgctttgtccggttctgttttaaacgatgcggggattgttctttcttgtggtgcgttgtttgattgggaagatggggtcaatgcaacgatttactgttctttcttggcgaatttgacgatggagataactgcgatcggtacgaaaggtagtcttcgtgttcatgattttgttataccgtatatggaaaccgaggctgtgtttactacaagtggtggaggttgtgttagtgaacataaagtaatgactgagctttcacaagaggcgtgtatggttatggaatttgctcggttggttggagaaatcaaaaacagaggagctaaaccggatgggttttggatgaggtttagccggaatacgcagttgcttgttgatgctgtgaaagagtcgattgataataaccttgaaccggtgtttctctccggccggtgagaaagagctcagaagttagatcagatttgtttgtgtcgatgcttttagtagatgtagtaattaggggtttatgtatgatatcttctcggcgtccgttggtggagaggtcaattaaagatctccttggcgcatggctgcaagcatttcatcaatacatttcatccatcaccaagaaattctagggatatatactgcatagagcttcaaagacttggtgcagtgtcactcacgagttttgctgtgtttaatgtggcaccggggtttgcttgtaaatctatacctccagctttaatagcagaggtagtgactatggctggtaaactttggcattatgtgacttctttctccgatgtgacatcttcaggtgtccaaacaaaaatctctgctcataagacaatataagttcatcgacaatactagctactgttttgttgaattcacaatctctgcacctttcttatatagcagccaccttgg

SEQ ID NO: 96524 - protein, 352 aa, Arabidopsis thaliana
  peptide (1)..(352): Ceres Seq. ID no. 12733696
  misc_feature (7)..(130): Pfam Name: Oxidoreductase family, NAD-binding Rossmann fold Pfam Description: Oxidoreductase family, NAD-binding Rossmann fold
  misc_feature (1)..(352): Homolog of NCBI NO: 25518452 NR Description: hypothetical protein F23M19.12 [imported] - thaliana >gi|5091625|gb|AAD39613.1|AC007454_12 Similar to
  misc_feature (1)..(352): Homolog of NCBI NO: 18399170 NR Description: expressed protein; protein id: At1g34200.1, by cDNA: gi_13605868 [Arabidopsis thaliana] F23M19.12/F23M19.12 [Arabidopsis thaliana]
  misc_feature (1)..(352): Homolog of NCBI NO: 15233990 NR Description: AX110P -like protein; protein id: At4g09670.1, by cDNA: 19582. [Arabidopsis thaliana] >gi|7485600|pir||T04014
  misc_feature (25)..(352): Homolog of NCBI NO: 21954073 NR Description: putative AX110P protein [Arabidopsis thaliana]
  misc_feature (7)..(340): Homolog of NCBI NO: 7488933 NR Description: protein AX110P - carrot
  misc_feature (7)..(305): Homolog of NCBI NO: 37534168 NR Description: putative oxidoreductase [Oryza sativa (japonica group)] >gi|21671919|gb|AAM74281.1| Putative oxidoreductase
  misc_feature (1)..(349): Homolog of NCBI NO: 15218937 NR Description: oxidoreductase, putative; protein id: At1g66130.1 thaliana] >gi|25404587|pir||A96686 probable oxidoreductase
  misc_feature (8)..(347): Homolog of NCBI NO: 17549134 NR Description: CONSERVED HYPOTHETICAL PROTEIN [Ralstonia >gi|17431385|emb|CAD18064.1| CONSERVED HYPOTHETICAL PROTEIN
  misc_feature (5)..(270): Homolog of NCBI NO: 15616405 NR Description: oxidoreductase [Bacillus halodurans]
  misc_feature (1)..(265): Homolog of NCBI NO: 23026193 NR Description: hypothetical protein [Microbulbifer degradans
MSGDNQIRIGLLSCTNKVRKLSRAINLSPNATISAIATTSSIEEAKSFAKSNNFPPNTKLHSSYESLLEDPDVDAVYFPIPTRLHVEWATLAAIKGKHILLDKPVALNVAEFDQIVEACEVNGVQFMDGTQWMHSPRTDKIKEFVNDLESFGQIKSVYSCFSFAASDDFLKHDIRVKPGLDGLGALGDAGWYTIQAILLVNNFKLPKTVTALSGSVLNDAGIVLSCGALFDWEDGVNATIYCSFLANLTMEITAIGTKGSLRVHDFVIPYMETEAVFTTSGGGCVSEHKVMTELSQEACMVMEFARLVGEIKNRGAKPDGFWMRFSRNTQLLVDAVKESIDNNLEPVFLSGR

SEQ ID NO: 96525 - protein, 226 aa, Arabidopsis thaliana
  peptide (1)..(226): Ceres Seq. ID no. 12733697
  misc_feature (16)..(129): Pfam Name: Oxidoreductase family, C-terminal alpha/beta domain Pfam Description: Oxidoreductase family, C-terminal alpha/beta
  misc_feature (1)..(226): Homolog of NCBI NO: 25518452 NR Description: hypothetical protein F23M19.12 [imported] - thaliana >gi|5091625|gb|AAD39613.1|AC007454_12 Similar to
  misc_feature (1)..(226): Homolog of NCBI NO: 18399170 NR Description: expressed protein; protein id: At1g34200.1, by cDNA: gi_13605868 [Arabidopsis thaliana] F23M19.12/F23M19.12 [Arabidopsis thaliana]
  misc_feature (1)..(226): Homolog of NCBI NO: 15233990 NR Description: AX110P -like protein; protein id: At4g09670.1, by cDNA: 19582. [Arabidopsis thaliana] >gi|7485600|pir||T04014
  misc_feature (1)..(226): Homolog of NCBI NO: 21954073 NR Description: putative AX110P protein [Arabidopsis thaliana]
  misc_feature (1)..(214): Homolog of NCBI NO: 7488933 NR Description: protein AX110P - carrot
  misc_feature (1)..(179): Homolog of NCBI NO: 37534168 NR Description: putative oxidoreductase [Oryza sativa (japonica group)] >gi|21671919|gb|AAM74281.1| Putative oxidoreductase
  misc_feature (1)..(223): Homolog of NCBI NO: 15218937 NR Description: oxidoreductase, putative; protein id: At1g66130.1 thaliana] >gi|25404587|pir||A96686 probable oxidoreductase
  misc_feature (1)..(221): Homolog of NCBI NO: 17549134 NR Description: CONSERVED HYPOTHETICAL PROTEIN [Ralstonia >gi|17431385|emb|CAD18064.1| CONSERVED HYPOTHETICAL PROTEIN
  misc_feature (1)..(144): Homolog of NCBI NO: 15616405 NR Description: oxidoreductase [Bacillus halodurans]
  misc_feature (1)..(139): Homolog of NCBI NO: 23026193 NR Description: hypothetical protein [Microbulbifer degradans
MDGTQWMHSPRTDKIKEFVNDLESFGQIKSVYSCFSFAASDDFLKHDIRVKPGLDGLGALGDAGWYTIQAILLVNNFKLPKTVTALSGSVLNDAGIVLSCGALFDWEDGVNATIYCSFLANLTMEITAIGTKGSLRVHDFVIPYMETEAVFTTSGGGCVSEHKVMTELSQEACMVMEFARLVGEIKNRGAKPDGFWMRFSRNTQLLVDAVKESIDNNLEPVFLSGR

SEQ ID NO: 96526 - protein, 220 aa, Arabidopsis thaliana
  peptide (1)..(220): Ceres Seq. ID no. 12733698
  misc_feature (10)..(123): Pfam Name: Oxidoreductase family, C-terminal alpha/beta domain Pfam Description: Oxidoreductase family, C-terminal alpha/beta
  misc_feature (1)..(220): Homolog of NCBI NO: 25518452 NR Description: hypothetical protein F23M19.12 [imported] - thaliana >gi|5091625|gb|AAD39613.1|AC007454_12 Similar to
  misc_feature (1)..(220): Homolog of NCBI NO: 18399170 NR Description: expressed protein; protein id: At1g34200.1, by cDNA: gi_13605868 [Arabidopsis thaliana] F23M19.12/F23M19.12 [Arabidopsis thaliana]
  misc_feature (1)..(220): Homolog of NCBI NO: 15233990 NR Description: AX110P -like protein; protein id: At4g09670.1, by cDNA: 19582. [Arabidopsis thaliana] >gi|7485600|pir||T04014
  misc_feature (1)..(220): Homolog of NCBI NO: 21954073 NR Description: putative AX110P protein [Arabidopsis thaliana]
  misc_feature (1)..(208): Homolog of NCBI NO: 7488933 NR Description: protein AX110P - carrot
  misc_feature (1)..(173): Homolog of NCBI NO: 37534168 NR Description: putative oxidoreductase [Oryza sativa (japonica group)] >gi|21671919|gb|AAM74281.1| Putative oxidoreductase
  misc_feature (1)..(217): Homolog of NCBI NO: 15218937 NR Description: oxidoreductase, putative; protein id: At1g66130.1 thaliana] >gi|25404587|pir||A96686 probable oxidoreductase
  misc_feature (1)..(215): Homolog of NCBI NO: 17549134 NR Description: CONSERVED HYPOTHETICAL PROTEIN [Ralstonia >gi|17431385|emb|CAD18064.1| CONSERVED HYPOTHETICAL PROTEIN
  misc_feature (1)..(138): Homolog of NCBI NO: 15616405 NR Description: oxidoreductase [Bacillus halodurans]
  misc_feature (1)..(133): Homolog of NCBI NO: 23026193 NR Description: hypothetical protein [Microbulbifer degradans
MHSPRTDKIKEFVNDLESFGQIKSVYSCFSFAASDDFLKHDIRVKPGLDGLGALGDAGWYTIQAILLVNNFKLPKTVTALSGSVLNDAGIVLSCGALFDWEDGVNATIYCSFLANLTMEITAIGTKGSLRVHDFVIPYMETEAVFTTSGGGCVSEHKVMTELSQEACMVMEFARLVGEIKNRGAKPDGFWMRFSRNTQLLVDAVKESIDNNLEPVFLSGR

SEQ ID NO: 96527 - DNA, 1860 bp, Arabidopsis thaliana
  misc_feature (1)..(1860): Ceres Seq. ID no. 12733699
  misc_feature: MA Experiment ID: 20001905 Result: Up-regulated in Transcription
  misc_feature: MA Experiment 20001905 PARAMETER Experiment Name: At_Drought_Reproduction_P Parameter: Age (day) Value: 40
  misc_feature: MA Experiment 20001905 PARAMETER Experiment Name: At_Drought_Reproduction_P Parameter: Organism Value: A. thaliana
  misc_feature: MA Experiment 20001905 PARAMETER Experiment Name: At_Drought_Reproduction_P Parameter: Plant Line Value: WS
  misc_feature: MA Experiment 20001905 PARAMETER Experiment Name: At_Drought_Reproduction_P Parameter: Timepoint (day) Value: 10
  misc_feature: MA Experiment 20001905 PARAMETER Experiment Name: At_Drought_Reproduction_P Parameter: Tissue Value: Rosettes
  misc_feature: MA Experiment 20001905 PARAMETER Experiment Name: At_Drought_Reproduction_P Parameter: Treatment Value: Drought vs. No Drought
atgtcgatgctcgattccttcttcaataagggtttcaaagctgcaaaatgcaaaaccttgctcaagttaacgatccctaggattaagctaatcaggaatagaagagaagcacagattaaacaaatgcgtcgtgaaattgcaaagcttctcgagactggtcaagaagctactgctcgaattcgggttgagcatattataagggaagagaagatgatggctgctcaagagatccttgagctcttctgtgaactcattgctgttcgtcttccgattattgaggcacaaagggaatgtcctttggatctaaaagaagcgatatcaagtgtatgttttgctgcgccgaggtgctctgacttgacagagctgcagcaggttcagatactgtttgtatctaagtatggaaaggaatttgttgcagctgcatctgagctcaagccggattctggtgtcaatcgtaagttggtggagttgctgtctgtacgtgcaccttctccagaaactaaactgaaacttctcaaggaaattgcagaagaacatgaacttgattgggaccctgcttctacagaaactgatctcttcaaatctcatgaagatctccttgatggaccaaaacaatttggtgggggatctaagctgccgttaccagaggaacaaaatgaaaagacaaatttaacatctctttcagcggcaaaggagaaatctgattctgactcagagtatgatatattggactttcccgaggttccaaatgtcttgctgcgaccaactcctggtgctacctctgtaaatgcaccggatgcagcgaaatcagccagttatgaacatacctctcacgacttgccctttgattcagagaatgcaggagtcgaaaaaacggcttccaaaagagatgaacatcctgcaaaagcaagcaaaactgtcgtggaaggccaacaatcttcacccattctgatggaatctttcgaaaagaagaattactctccgccatccattgatgcagtagggcccatccctacaaaagagagtggtgcttccagagatactccaaggaaaatatccgatggagacttgcaggatgtcttaatggctgctcaagctgctgctgactcagcagaacgtgcagcatcagctgcccgctcagctgcaagcctggcacaactcagaatcaacgagcttaccaggaagacttctgatcagtatccagaaagtccgtctgagaaccctttccatgctccctcaatgggaaaccttcaatttgatcatcagaattcttcggccagcagtagcggagatcttacagagctccagagagcagaaacttcgtcacttttcaactctgagcagaacaaccaacagccacagacacactcttcaatggaaaaaccgcagtttgatcgtcagaactcatcattcagtagctatggcgatcttaccccacagagattccattcaatggaaaaaccacagtttgatcatcagaactcatcaggcagcaactatgacgatcttacaccacagagattctcgtcattggagaaaccgcagtttgatcatcagaactcatcaggcagcaactatgacgatcttacaccacatagattcccgtcaatggagaaaccgcagtttgatcatcagaactcatcagtcagcagctatggcgatctgccagagctccaaaggccagagacttcaccacttgacagactcagccctgaccaggaccatcagcaaatgagactgccttcaatggaagatgatccctattactcataccctaatctcttcacatcgcagaagcatgatccctcatctggctctcattcgttctcagacaatacaagacccgcccatgattcgtga

SEQ ID NO: 96528 - protein, 619 aa, Arabidopsis thaliana
  peptide (1)..(619): Ceres Seq. ID no. 12733700
  misc_feature (23)..(144): Pfam Name: Eukaryotic protein of unknown function, DUF292 Pfam Description: Eukaryotic protein of unknown function, DUF292
  misc_feature (3)..(546): Homolog of NCBI NO: 40253290 NR Description: unknown protein [Oryza sativa (japonica
  misc_feature (4)..(610): Homolog of NCBI NO: 34910388 NR Description: P0692C11.15 [Oryza sativa (japonica
  misc_feature (1)..(205): Homolog of NCBI NO: 18395668 NR Description: expressed protein; protein id: At1g25420.1, by cDNA: 7917., supported by cDNA: gi_20465253 [Arabidopsis
  misc_feature (1)..(205): Homolog of NCBI NO: 21595428 NR Description: unknown [Arabidopsis thaliana]
  misc_feature (23)..(299): Homolog of NCBI NO: 15237108 NR Description: putative protein; protein id: At4g35730.1
  misc_feature (27)..(528): Homolog of NCBI NO: 15224833 NR Description: hypothetical protein; protein id: At2g19710.1
  misc_feature (27)..(528): Homolog of NCBI NO: 34222084 NR Description: At2g19710 [Arabidopsis thaliana]
  misc_feature (60)..(283): Homolog of NCBI NO: 34911298 NR Description: P0519D04.18 [Oryza sativa (japonica
  misc_feature (4)..(178): Homolog of NCBI NO: 13702817 NR Description: unknown protein [Oryza sativa]
  misc_feature (4)..(332): Homolog of NCBI NO: 15222251 NR Description: hypothetical protein; protein id: At1g13340.1 thaliana] >gi|9958056|gb|AAG09545.1|AC011810_4 Unknown protein thaliana] >gi|26453048|dbj|BAC43600.1| unknown protein
MSMLDSFFNKGFKAAKCKTLLKLTIPRIKLIRNRREAQIKQMRREIAKLLETGQEATARIRVEHIIREEKMMAAQEILELFCELIAVRLPIIEAQRECPLDLKEAISSVCFAAPRCSDLTELQQVQILFVSKYGKEFVAAASELKPDSGVNRKLVELLSVRAPSPETKLKLLKEIAEEHELDWDPASTETDLFKSHEDLLDGPKQFGGGSKLPLPEEQNEKTNLTSLSAAKEKSDSDSEYDILDFPEVPNVLLRPTPGATSVNAPDAAKSASYEHTSHDLPFDSENAGVEKTASKRDEHPAKASKTVVEGQQSSPILMESFEKKNYSPPSIDAVGPIPTKESGASRDTPRKISDGDLQDVLMAAQAAADSAERAASAARSAASLAQLRINELTRKTSDQYPESPSENPFHAPSMGNLQFDHQNSSASSSGDLTELQRAETSSLFNSEQNNQQPQTHSSMEKPQFDRQNSSFSSYGDLTPQRFHSMEKPQFDHQNSSGSNYDDLTPQRFSSLEKPQFDHQNSSGSNYDDLTPHRFPSMEKPQFDHQNSSVSSYGDLPELQRPETSPLDRLSPDQDHQQMRLPSMEDDPYYSYPNLFTSQKHDPSSGSHSFSDNTRPAHDS

SEQ ID NO: 96529 - protein, 617 aa, Arabidopsis thaliana
  peptide (1)..(617): Ceres Seq. ID no. 12733701
  misc_feature (21)..(142): Pfam Name: Eukaryotic protein of unknown function, DUF292 Pfam Description: Eukaryotic protein of unknown function, DUF292
  misc_feature (1)..(544): Homolog of NCBI NO: 40253290 NR Description: unknown protein [Oryza sativa (japonica
  misc_feature (2)..(608): Homolog of NCBI NO: 34910388 NR Description: P0692C11.15 [Oryza sativa (japonica
  misc_feature (1)..(203): Homolog of NCBI NO: 18395668 NR Description: expressed protein; protein id: At1g25420.1, by cDNA: 7917., supported by cDNA: gi_20465253 [Arabidopsis
  misc_feature (1)..(203): Homolog of NCBI NO: 21595428 NR Description: unknown [Arabidopsis thaliana]
  misc_feature (21)..(297): Homolog of NCBI NO: 15237108 NR Description: putative protein; protein id: At4g35730.1
  misc_feature (25)..(526): Homolog of NCBI NO: 15224833 NR Description: hypothetical protein; protein id: At2g19710.1
  misc_feature (25)..(526): Homolog of NCBI NO: 34222084 NR Description: At2g19710 [Arabidopsis thaliana]
  misc_feature (58)..(281): Homolog of NCBI NO: 34911298 NR Description: P0519D04.18 [Oryza sativa (japonica
  misc_feature (2)..(176): Homolog of NCBI NO: 13702817 NR Description: unknown protein [Oryza sativa]
  misc_feature (2)..(330): Homolog of NCBI NO: 15222251 NR Description: hypothetical protein; protein id: At1g13340.1 thaliana] >gi|9958056|gb|AAG09545.1|AC011810_4 Unknown protein thaliana] >gi|26453048|dbj|BAC43600.1| unknown protein
MLDSFFNKGFKAAKCKTLLKLTIPRIKLIRNRREAQIKQMRREIAKLLETGQEATARIRVEHIIREEKMMAAQEILELFCELIAVRLPIIEAQRECPLDLKEAISSVCFAAPRCSDLTELQQVQILFVSKYGKEFVAAASELKPDSGVNRKLVELLSVRAPSPETKLKLLKEIAEEHELDWDPASTETDLFKSHEDLLDGPKQFGGGSKLPLPEEQNEKTNLTSLSAAKEKSDSDSEYDILDFPEVPNVLLRPTPGATSVNAPDAAKSASYEHTSHDLPFDSENAGVEKTASKRDEHPAKASKTVVEGQQSSPILMESFEKKNYSPPSIDAVGPIPTKESGASRDTPRKISDGDLQDVLMAAQAAADSAERAASAARSAASLAQLRINELTRKTSDQYPESPSENPFHAPSMGNLQFDHQNSSASSSGDLTELQRAETSSLFNSEQNNQQPQTHSSMEKPQFDRQNSSFSSYGDLTPQRFHSMEKPQFDHQNSSGSNYDDLTPQRFSSLEKPQFDHQNSSGSNYDDLTPHRFPSMEKPQFDHQNSSVSSYGDLPELQRPETSPLDRLSPDQDHQQMRLPSMEDDPYYSYPNLFTSQKHDPSSGSHSFSDNTRPAHDS

SEQ ID NO: 96530 - protein, 578 aa, Arabidopsis thaliana
  peptide (1)..(578): Ceres Seq. ID no. 12733702
  misc_feature (1)..(103): Pfam Name: Eukaryotic protein of unknown function, DUF292 Pfam Description: Eukaryotic protein of unknown function, DUF292
  misc_feature (1)..(505): Homolog of NCBI NO: 40253290 NR Description: unknown protein [Oryza sativa (japonica
  misc_feature (1)..(569): Homolog of NCBI NO: 34910388 NR Description: P0692C11.15 [Oryza sativa (japonica
  misc_feature (1)..(164): Homolog of NCBI NO: 18395668 NR Description: expressed protein; protein id: At1g25420.1, by cDNA: 7917., supported by cDNA: gi_20465253 [Arabidopsis
  misc_feature (1)..(164): Homolog of NCBI NO: 21595428 NR Description: unknown [Arabidopsis thaliana]
  misc_feature (1)..(258): Homolog of NCBI NO: 15237108 NR Description: putative protein; protein id: At4g35730.1
  misc_feature (1)..(487): Homolog of NCBI NO: 15224833 NR Description: hypothetical protein; protein id: At2g19710.1
  misc_feature (1)..(487): Homolog of NCBI NO: 34222084 NR Description: At2g19710 [Arabidopsis thaliana]
  misc_feature (19)..(242): Homolog of NCBI NO: 34911298 NR Description: P0519D04.18 [Oryza sativa (japonica
  misc_feature (1)..(137): Homolog of NCBI NO: 13702817 NR Description: unknown protein [Oryza sativa]
  misc_feature (1)..(291): Homolog of NCBI NO: 15222251 NR Description: hypothetical protein; protein id: At1g13340.1 thaliana] >gi|9958056|gb|AAG09545.1|AC011810_4 Unknown protein thaliana] >gi|26453048|dbj|BAC43600.1| unknown protein
MRREIAKLLETGQEATARIRVEHIIREEKMMAAQEILELFCELIAVRLPIIEAQRECPLDLKEAISSVCFAAPRCSDLTELQQVQILFVSKYGKEFVAAASELKPDSGVNRKLVELLSVRAPSPETKLKLLKEIAEEHELDWDPASTETDLFKSHEDLLDGPKQFGGGSKLPLPEEQNEKTNLTSLSAAKEKSDSDSEYDILDFPEVPNVLLRPTPGATSVNAPDAAKSASYEHTSHDLPFDSENAGVEKTASKRDEHPAKASKTVVEGQQSSPILMESFEKKNYSPPSIDAVGPIPTKESGASRDTPRKISDGDLQDVLMAAQAAADSAERAASAARSAASLAQLRINELTRKTSDQYPESPSENPFHAPSMGNLQFDHQNSSASSSGDLTELQRAETSSLFNSEQNNQQPQTHSSMEKPQFDRQNSSFSSYGDLTPQRFHSMEKPQFDHQNSSGSNYDDLTPQRFSSLEKPQFDHQNSSGSNYDDLTPHRFPSMEKPQFDHQNSSVSSYGDLPELQRPETSPLDRLSPDQDHQQMRLPSMEDDPYYSYPNLFTSQKHDPSSGSHSFSDNTRPAHDS

SEQ ID NO: 96531 - DNA, 1621 bp, Arabidopsis thaliana
  misc_feature (1)..(1621): Ceres Seq. ID no. 12733707
  misc_feature: MA Experiment ID: 20000180 Result: Up-regulated in Transcription
  misc_feature: MA Experiment 20000180 PARAMETER Experiment Name: At_Germinating_Seeds_P Parameter: Age (hr) Value: 24 vs. 0
  misc_feature: MA Experiment 20000180 PARAMETER Experiment Name: At_Germinating_Seeds_P Parameter: Tissue Value: Germinating Seeds
  misc_feature: MA Experiment ID: 20000234 Result: Up-regulated in Transcription
  misc_feature: MA Experiment 20000234 PARAMETER Experiment Name: At_Siliques_P Parameter: Age (day) Value: 21
  misc_feature: MA Experiment 20000234 PARAMETER Experiment Name: At_Siliques_P Parameter: Organism Value: A. thaliana
  misc_feature: MA Experiment 20000234 PARAMETER Experiment Name: At_Siliques_P Parameter: Plant Line Value: WS
  misc_feature: MA Experiment 20000234 PARAMETER Experiment Name: At_Siliques_P Parameter: Tissue Value: Less Than 5mm Siliques vs. Whole Plant
  misc_feature: MA Experiment ID: 20000495 Result: Up-regulated in Transcription
  misc_feature: MA Experiment 20000495 PARAMETER Experiment Name: At_Guard_Cells_P Parameter: Harvest Date Value: 8/2/2002
  misc_feature: MA Experiment 20000495 PARAMETER Experiment Name: At_Guard_Cells_P Parameter: Organism Value: A. thaliana
  misc_feature: MA Experiment 20000495 PARAMETER Experiment Name: At_Guard_Cells_P Parameter: Tissue Value: Guard Cells vs. Leaves
agagatctttcctgcgaagcaaaatcgaagatggttcctaagatcgcatcaatggcgtctactagacctctctgttcaattccttctatcttcctctctttctctctcctcttcgtcgtctctcttctcttcttcttctccaattccttaatctccaatccaaatccgagcatttcacacaacactctccaaaacggtatcaatgtctatgtagctgagcttccaagatccctaaactatggtcttatcgacaaatactggtcctcttctactccagattcacgtatacccagtgacccagatcacccgacccgtaaaacccattcacccgataaatacccaccgtacccagagaacccgttgatcaagcaatacagtgctgagtactggatcatgggagacctagaaacctcaccagagaaacgaattggatcttttgctaaaagggtttttagtgaatctgacgctgatgtagtcttcgtgcctttctttgcgacgttaagtgcagagatggagcttggaaatggtaaaggttcgtttagaaagaagtctggtaacgaagattatcaaagacagagacaagtgcttgattttgtcaagaacactaaagcttggaaacgatctaatggtcgtgatcacgtttttgttctaacggaccctgttgcaatgtggcatgttcgtgaggagattgctttatctattcttcttgtggtggattttggaggatggtttaggcaagattctaagtcgtctaatgggactagcttgcctgagaggattcagcatactcaagtctctgtcattaaggatgtgattgttccatatacgcatttgcttcctagactggatttgtctcagaaccagagacgtcatagccttctttattttaaaggcgctaagcacagacatcggggagggttaatcagagaaaaactatgggacttgctggtcaatgagcctggcgttgtcatggaagaaggttttcctaatgcaacaggaagggaacagtcgataagaggaatgagaaactcagagttctgcttacatccagctggtgacactcccacttcatgccgtctctttgatgccattcaaagtctatgcatccctgtgattgtcagcgacaccatagagctcccgtttgagggaataatcgattactcagaattctcggtttttgcctctgtaagtgatgcattaacacctaaatggttggctaatcatctcggaaggttctctgaaagagagaaggaaacattgagaagtagaatagcaaaggttcagtcagtttttgtgtatgataatggtcatgccgatgggattggacctattgaacccaatggtgcggtgaatcacatatggaagaaggttcagcagaaggtgccaatggtgaaggaggcagtgattagggagaggagaaaaccagcaggtgcttccgttccacttcgatgtcaatgtatctaaataatgcaaccaatccaaaagatagaaagtgttccttttactttgttggtcttttcttttgtacttgtttcgtttacgaacattgttatggccactttaaaatccatgttccttagggttcacagaaaatattgaatcatgtaagaggtttcattat

SEQ ID NO: 96532 - protein, 487 aa, Arabidopsis thaliana
  peptide (1)..(487): Ceres Seq. ID no. 12733708
  misc_feature (69)..(424): Pfam Name: Exostosin family Pfam Description: Exostosin family
  misc_feature (11)..(487): Homolog of NCBI NO: 18399194 NR Description: Exostosin family; protein id: At1g34270.1, by cDNA: gi_15450927, supported by cDNA: gi_20148710 [Arabidopsis
  misc_feature (124)..(487): Homolog of NCBI NO: 34899802 NR Description: OJ1092_A07.9 [Oryza sativa (japonica
  misc_feature (114)..(473): Homolog of NCBI NO: 22330483 NR Description: Exostosin family; protein id: At1g67410.1
  misc_feature (109)..(473): Homolog of NCBI NO: 19386797 NR Description: OJ1485_B09.5 [Oryza sativa (japonica
  misc_feature (184)..(487): Homolog of NCBI NO: 30686300 NR Description: Exostosin family [Arabidopsis thaliana]
  misc_feature (159)..(486): Homolog of NCBI NO: 15241619 NR Description: Exostosin family; protein id: At5g44930.1, by cDNA: gi_15081732 [Arabidopsis thaliana] gb|AAC61825.1~gene_id:K21C13.11~strong similarity to unknown
  misc_feature (114)..(326): Homolog of NCBI NO: 7487224 NR Description: hypothetical protein T1F15.13 - Arabidopsis
  misc_feature (336)..(461): Homolog of NCBI NO: 7487224 NR Description: hypothetical protein T1F15.13 - Arabidopsis
  misc_feature (114)..(473): Homolog of NCBI NO: 18410670 NR Description: Exostosin family; protein id: At1g74680.1, by cDNA: gi_16209708 [Arabidopsis thaliana] At1g74680/F1M20_36 [Arabidopsis thaliana]
  misc_feature (114)..(473): Homolog of NCBI NO: 25406363 NR Description: F25A4.34 [imported] - Arabidopsis thaliana
RDLSCEAKSKMVPKIASMASTRPLCSIPSIFLSFSLLFVVSLLFFFSNSLISNPNPSISHNTLQNGINVYVAELPRSLNYGLIDKYWSSSTPDSRIPSDPDHPTRKTHSPDKYPPYPENPLIKQYSAEYWIMGDLETSPEKRIGSFAKRVFSESDADVVFVPFFATLSAEMELGNGKGSFRKKSGNEDYQRQRQVLDFVKNTKAWKRSNGRDHVFVLTDPVAMWHVREEIALSILLVVDFGGWFRQDSKSSNGTSLPERIQHTQVSVIKDVIVPYTHLLPRLDLSQNQRRHSLLYFKGAKHRHRGGLIREKLWDLLVNEPGVVMEEGFPNATGREQSIRGMRNSEFCLHPAGDTPTSCRLFDAIQSLCIPVIVSDTIELPFEGIIDYSEFSVFASVSDALTPKWLANHLGRFSEREKETLRSRIAKVQSVFVYDNGHADGIGPIEPNGAVNHIWKKVQQKVPMVKEAVIRERRKPAGASVPLRCQCI

SEQ ID NO: 96533 - protein, 477 aa, Arabidopsis thaliana
  peptide (1)..(477): Ceres Seq. ID no. 12733709
  misc_feature (59)..(414): Pfam Name: Exostosin family Pfam Description: Exostosin family
  misc_feature (1)..(477): Homolog of NCBI NO: 18399194 NR Description: Exostosin family; protein id: At1g34270.1, by cDNA: gi_15450927, supported by cDNA: gi_20148710 [Arabidopsis
  misc_feature (114)..(477): Homolog of NCBI NO: 34899802 NR Description: OJ1092_A07.9 [Oryza sativa (japonica
  misc_feature (104)..(463): Homolog of NCBI NO: 22330483 NR Description: Exostosin family; protein id: At1g67410.1
  misc_feature (99)..(463): Homolog of NCBI NO: 19386797 NR Description: OJ1485_B09.5 [Oryza sativa (japonica
  misc_feature (174)..(477): Homolog of NCBI NO: 30686300 NR Description: Exostosin family [Arabidopsis thaliana]
  misc_feature (149)..(476): Homolog of NCBI NO: 15241619 NR Description: Exostosin family; protein id: At5g44930.1, by cDNA: gi_15081732 [Arabidopsis thaliana] gb|AAC61825.1~gene_id:K21C13.11~strong similarity to unknown
  misc_feature (104)..(316): Homolog of NCBI NO: 7487224 NR Description: hypothetical protein T1F15.13 - Arabidopsis
  misc_feature (326)..(451): Homolog of NCBI NO: 7487224 NR Description: hypothetical protein T1F15.13 - Arabidopsis
  misc_feature (104)..(463): Homolog of NCBI NO: 18410670 NR Description: Exostosin family; protein id: At1g74680.1, by cDNA: gi_16209708 [Arabidopsis thaliana] At1g74680/F1M20_36 [Arabidopsis thaliana]
  misc_feature (104)..(463): Homolog of NCBI NO: 25406363 NR Description: F25A4.34 [imported] - Arabidopsis thaliana
MVPKIASMASTRPLCSIPSIFLSFSLLFVVSLLFFFSNSLISNPNPSISHNTLQNGINVYVAELPRSLNYGLIDKYWSSSTPDSRIPSDPDHPTRKTHSPDKYPPYPENPLIKQYSAEYWIMGDLETSPEKRIGSFAKRVFSESDADVVFVPFFATLSAEMELGNGKGSFRKKSGNEDYQRQRQVLDFVKNTKAWKRSNGRDHVFVLTDPVAMWHVREEIALSILLVVDFGGWFRQDSKSSNGTSLPERIQHTQVSVIKDVIVPYTHLLPRLDLSQNQRRHSLLYFKGAKHRHRGGLIREKLWDLLVNEPGVVMEEGFPNATGREQSIRGMRNSEFCLHPAGDTPTSCRLFDAIQSLCIPVIVSDTIELPFEGIIDYSEFSVFASVSDALTPKWLANHLGRFSEREKETLRSRIAKVQSVFVYDNGHADGIGPIEPNGAVNHIWKKVQQKVPMVKEAVIRERRKPAGASVPLRCQCI

SEQ ID NO: 96534 - protein, 470 aa, Arabidopsis thaliana
  peptide (1)..(470): Ceres Seq. ID no. 12733710
  misc_feature (52)..(407): Pfam Name: Exostosin family Pfam Description: Exostosin family
  misc_feature (1)..(470): Homolog of NCBI NO: 18399194 NR Description: Exostosin family; protein id: At1g34270.1, by cDNA: gi_15450927, supported by cDNA: gi_20148710 [Arabidopsis
  misc_feature (107)..(470): Homolog of NCBI NO: 34899802 NR Description: OJ1092_A07.9 [Oryza sativa (japonica
  misc_feature (97)..(456): Homolog of NCBI NO: 22330483 NR Description: Exostosin family; protein id: At1g67410.1
  misc_feature (92)..(456): Homolog of NCBI NO: 19386797 NR Description: OJ1485_B09.5 [Oryza sativa (japonica
  misc_feature (167)..(470): Homolog of NCBI NO: 30686300 NR Description: Exostosin family [Arabidopsis thaliana]
  misc_feature (142)..(469): Homolog of NCBI NO: 15241619 NR Description: Exostosin family; protein id: At5g44930.1, by cDNA: gi_15081732 [Arabidopsis thaliana] gb|AAC61825.1~gene_id:K21C13.11~strong similarity to unknown
  misc_feature (97)..(309): Homolog of NCBI NO: 7487224 NR Description: hypothetical protein T1F15.13 - Arabidopsis
  misc_feature (319)..(444): Homolog of NCBI NO: 7487224 NR Description: hypothetical protein T1F15.13 - Arabidopsis
  misc_feature (97)..(456): Homolog of NCBI NO: 18410670 NR Description: Exostosin family; protein id: At1g74680.1, by cDNA: gi_16209708 [Arabidopsis thaliana] At1g74680/F1M20_36 [Arabidopsis thaliana]
  misc_feature (97)..(456): Homolog of NCBI NO: 25406363 NR Description: F25A4.34 [imported] - Arabidopsis thaliana
MASTRPLCSIPSIFLSFSLLFVVSLLFFFSNSLISNPNPSISHNTLQNGINVYVAELPRSLNYGLIDKYWSSSTPDSRIPSDPDHPTRKTHSPDKYPPYPENPLIKQYSAEYWIMGDLETSPEKRIGSFAKRVFSESDADVVFVPFFATLSAEMELGNGKGSFRKKSGNEDYQRQRQVLDFVKNTKAWKRSNGRDHVFVLTDPVAMWHVREEIALSILLVVDFGGWFRQDSKSSNGTSLPERIQHTQVSVIKDVIVPYTHLLPRLDLSQNQRRHSLLYFKGAKHRHRGGLIREKLWDLLVNEPGVVMEEGFPNATGREQSIRGMRNSEFCLHPAGDTPTSCRLFDAIQSLCIPVIVSDTIELPFEGIIDYSEFSVFASVSDALTPKWLANHLGRFSEREKETLRSRIAKVQSVFVYDNGHADGIGPIEPNGAVNHIWKKVQQKVPMVKEAVIRERRKPAGASVPLRCQCI

SEQ ID NO: 96535 - DNA, 1731 bp, Arabidopsis thaliana
  misc_feature (1)..(1731): Ceres Seq. ID no. 12733724
  misc_feature: MA Experiment ID: 108434 Result: Up-regulated in Transcription
  misc_feature: MA Experiment 108434 PARAMETER Experiment Name: At_Root_Tips_cDNA_P Parameter: Tissue Value: Root Tips
  misc_feature: MA Experiment ID: 108595 Result: Down-regulated in Transcription
  misc_feature: MA Experiment 108595 PARAMETER Experiment Name: At_Ler-pi_Ovule_cDNA_P Parameter: Plant Line Value: null
  misc_feature: MA Experiment ID: 20000179 Result: Up-regulated in Transcription
  misc_feature: MA Experiment 20000179 PARAMETER Experiment Name: At_Germinating_Seeds_P Parameter: Age (hr) Value: 6 vs. 0
  misc_feature: MA Experiment 20000179 PARAMETER Experiment Name: At_Germinating_Seeds_P Parameter: Tissue Value: Germinating Seeds
  misc_feature: MA Experiment ID: 20000180 Result: Up-regulated in Transcription
  misc_feature: MA Experiment 20000180 PARAMETER Experiment Name: At_Germinating_Seeds_P Parameter: Age (hr) Value: 24 vs. 0
  misc_feature: MA Experiment 20000180 PARAMETER Experiment Name: At_Germinating_Seeds_P Parameter: Tissue Value: Germinating Seeds
  misc_feature: MA Experiment ID: 20000182 Result: Down-regulated in Transcription
  misc_feature: MA Experiment 20000182 PARAMETER Experiment Name: At_2mM_SA_P Parameter: Age (day) Value: 14
  misc_feature: MA Experiment 20000182 PARAMETER Experiment Name: At_2mM_SA_P Parameter: Organism Value: A. thaliana
  misc_feature: MA Experiment 20000182 PARAMETER Experiment Name: At_2mM_SA_P Parameter: Plant Line Value: WS
  misc_feature: MA Experiment 20000182 PARAMETER Experiment Name: At_2mM_SA_P Parameter: Timepoint (hr) Value: 6
  misc_feature: MA Experiment 20000182 PARAMETER Experiment Name: At_2mM_SA_P Parameter: Tissue Value: Aerial
  misc_feature: MA Experiment 20000182 PARAMETER Experiment Name: At_2mM_SA_P Parameter: Treatment Value: 2mM SA vs. No Treatment
  misc_feature: MA Experiment ID: 20000184 Result: Up-regulated in Transcription
  misc_feature: MA Experiment 20000184 PARAMETER Experiment Name: At_Shoots__P Parameter: Age (day) Value: 7
  misc_feature: MA Experiment 20000184 PARAMETER Experiment Name: At_Shoots__P Parameter: Tissue Value: Shoots vs. Whole Plant
  misc_feature: MA Experiment ID: 20000224 Result: Down-regulated in Transcription
  misc_feature: MA Experiment ID: 20000265 Result: Up-regulated in Transcription
  misc_feature: MA Experiment 20000265 PARAMETER Experiment Name: At_Open_Flower_P Parameter: Age (day) Value: 21
  misc_feature: MA Experiment 20000265 PARAMETER Experiment Name: At_Open_Flower_P Parameter: Plant Line Value: WS
  misc_feature: MA Experiment 20000265 PARAMETER Experiment Name: At_Open_Flower_P Parameter: Tissue Value: Closed Flower vs. Whole Plant
  misc_feature: MA Experiment ID: 20000794 Result: Down-regulated in Transcription
  misc_feature: MA Experiment 20000794 PARAMETER Experiment Name: At_Petals_P Parameter: Age (day) Value: 23-25 days
  misc_feature: MA Experiment 20000794 PARAMETER Experiment Name: At_Petals_P Parameter: Plant Line Value: WS
  misc_feature: MA Experiment 20000794 PARAMETER Experiment Name: At_Petals_P Parameter: Tissue Value: Petals vs. Whole plant
  misc_feature: MA Experiment ID: 20001911 Result: Down-regulated in Transcription
  misc_feature: MA Experiment 20001911 PARAMETER Experiment Name: At_Drought_Reproduction_P Parameter: Age (day) Value: 40
  misc_feature: MA Experiment 20001911 PARAMETER Experiment Name: At_Drought_Reproduction_P Parameter: Organism Value: A. thaliana
  misc_feature: MA Experiment 20001911 PARAMETER Experiment Name: At_Drought_Reproduction_P Parameter: Plant Line Value: WS
  misc_feature: MA Experiment 20001911 PARAMETER Experiment Name: At_Drought_Reproduction_P Parameter: Timepoint (day) Value: 10
  misc_feature: MA Experiment 20001911 PARAMETER Experiment Name: At_Drought_Reproduction_P Parameter: Tissue Value: Flowers
  misc_feature: MA Experiment 20001911 PARAMETER Experiment Name: At_Drought_Reproduction_P Parameter: Treatment Value: Drought vs. No Drought
atctcatttctctctatctctctctctctctcgcattgcgattaacgaaattcgaaaaatgtctcgtcttctccaaacacccttcttaccttcagtttccctccccacaaaaacacgatcttccgttacgggtttccgggtaaagcccagaatcatcccaattcaagcaaagatccgagaaatcttcatgcctgcactaagttccacgatgaccgaaggcaaaatcgtctcttgggttaaatcagaaggcgataaactcaacaaaggagagagtgttgttgttgttgaatctgataaagctgatatggatgttgagactttctatgatggttatctagctgcaatcatggttgaagaaggtggtgttgctcctgttggttctgctattgctttgttagctgaaactgaagatgagattgctgatgctaaagctaaagcttctggtggtggtggtggtggtgattctaaggctcctccggcttctcctcccacggctgcagttgaagcacctgtgagtgttgagaagaaggttgcagctgctccggtgtccattaaggcggtggcggcgtctgcggtgcatccggcgtctgaaggagggaagaggattgtggcgtctccttatgctaagaagttagctaaggagttgaaggttgaattggctggtttagttggaagtggaccgatgggaaggattgtggctaaagatgttgaggcggttgctgctggaggaggagttcaagctgctgttgctgttaaggaggtagtggcagctcctggtgtggagttgggatcggtggttccttttacgacaatgcagggggctgtgagtaggaatatggtggagagtcttggtgttcctacttttagagtcggttacacgattagtacggatgctcttgatgctctctacaagaagattaagtcgaaaggtgtgacaatgacggcacttttagcaaaggcaactgcacttgcactggcgaaacatccagttgtaaactcgtcttgtagagatggtaacagttttgtgtataatagtagcatcaacgttgctgttgctgttgctattgatggtggtttgatcactccggtgcttcagaacgctgataaggttgacatttattcgttatctagaaaatggaaagaattggttgataaggctcgagccaagcagctgcagcctcaggagtacaacactggtaccttcactctctctaacctaggaatgtttggcgttgatcggtttgatgctattctaccccctggaacaggagcgattatggctgtcggagcatctcaaccttcagtggttgcaactaaagacggccgcattggcatgaaaaaccagatgcaggtgaatgtgacggcagatcatcgtgtcatctatggtgctgatcttgcacagttcttgcaaacattggcaagcattattgaggacccaaaggaccttacattctaggccaaattactgcttttcgcatcccagtcttctctgcttttgattccatgggagcttgtatttctgcggtaatcagtttctttgatagaacaaaccttttaagattaaacataatcatttctttgtttgagatatatcttctgcaacattttctgcatggaaaggccgtcccacatgattttgctactgacttcatatatatccacttcatgcgatgaatcttatatgaactgataactttagcatgattaataacatgaatcttatatggactg

SEQ ID NO: 96536 - protein, 484 aa, Arabidopsis thaliana
  peptide (1)..(484): Ceres Seq. ID no. 12733725
  misc_feature (260)..(484): Pfam Name: 2-oxoacid dehydrogenases acyltransferase Pfam Description: 2-oxoacid dehydrogenases acyltransferase
  misc_feature (20)..(484): Homolog of NCBI NO: 15218630 NR Description: dihydrolipoamide S-acetyltransferase, putative; id: At1g34430.1, supported by cDNA: 101686. [Arabidopsis
  misc_feature (20)..(484): Homolog of NCBI NO: 25286434 NR Description: protein F12K21.24 [imported] - Arabidopsis >gi|8778253|gb|AAF79262.1|AC023279_11 F12K21.24 [Arabidopsis
  misc_feature (20)..(484): Homolog of NCBI NO: 21536525 NR Description: dihydrolipoamide S-acetyltransferase, putative
  misc_feature (31)..(483): Homolog of NCBI NO: 15230922 NR Description: dihydrolipoamide S-acetyltransferase; protein id: supported by cDNA: gi_14335165, supported by cDNA: gi_5881962 thaliana] >gi|5881963|gb|AAD55139.1|AF066079_1
  misc_feature (54)..(483): Homolog of NCBI NO: 9279589 NR Description: dihydrolipoamide S-acetyltransferase [Arabidopsis
  misc_feature (58)..(478): Homolog of NCBI NO: 16331208 NR Description: dihydrolipoamide acetyltransferase component (E2)
  misc_feature (58)..(483): Homolog of NCBI NO: 22298842 NR Description: dihydrolipoamide S-acetyltransferase
  misc_feature (58)..(483): Homolog of NCBI NO: 23123757 NR Description: hypothetical protein [Nostoc punctiforme]
  misc_feature (58)..(483): Homolog of NCBI NO: 17231098 NR Description: dihydrolipoamide S-acetyltransferase [Nostoc sp.
  misc_feature (58)..(483): Homolog of NCBI NO: 37522138 NR Description: dihydrolipoamide S-acetyltransferase [Gloeobacter
SHFSLSLSLSRIAINEIRKMSRLLQTPFLPSVSLPTKTRSSVTGFRVKPRIIPIQAKIREIFMPALSSTMTEGKIVSWVKSEGDKLNKGESVVVVESDKADMDVETFYDGYLAAIMVEEGGVAPVGSAIALLAETEDEIADAKAKASGGGGGGDSKAPPASPPTAAVEAPVSVEKKVAAAPVSIKAVAASAVHPASEGGKRIVASPYAKKLAKELKVELAGLVGSGPMGRIVAKDVEAVAAGGGVQAAVAVKEVVAAPGVELGSVVPFTTMQGAVSRNMVESLGVPTFRVGYTISTDALDALYKKIKSKGVTMTALLAKATALALAKHPVVNSSCRDGNSFVYNSSINVAVAVAIDGGLITPVLQNADKVDIYSLSRKWKELVDKARAKQLQPQEYNTGTFTLSNLGMFGVDRFDAILPPGTGAIMAVGASQPSVVATKDGRIGMKNQMQVNVTADHRVIYGADLAQFLQTLASIIEDPKDLTF

SEQ ID NO: 96537 - protein, 465 aa, Arabidopsis thaliana
  peptide (1)..(465): Ceres Seq. ID no. 12733726
  misc_feature (241)..(465): Pfam Name: 2-oxoacid dehydrogenases acyltransferase Pfam Description: 2-oxoacid dehydrogenases acyltransferase
  misc_feature (1)..(465): Homolog of NCBI NO: 15218630 NR Description: dihydrolipoamide S-acetyltransferase, putative; id: At1g34430.1, supported by cDNA: 101686. [Arabidopsis
  misc_feature (1)..(465): Homolog of NCBI NO: 25286434 NR Description: protein F12K21.24 [imported] - Arabidopsis >gi|8778253|gb|AAF79262.1|AC023279_11 F12K21.24 [Arabidopsis
  misc_feature (1)..(465): Homolog of NCBI NO: 21536525 NR Description: dihydrolipoamide S-acetyltransferase, putative
  misc_feature (12)..(464): Homolog of NCBI NO: 15230922 NR Description: dihydrolipoamide S-acetyltransferase; protein id: supported by cDNA: gi_14335165, supported by cDNA: gi_5881962 thaliana] >gi|5881963|gb|AAD55139.1|AF066079_1
  misc_feature (35)..(464): Homolog of NCBI NO: 9279589 NR Description: dihydrolipoamide S-acetyltransferase [Arabidopsis
  misc_feature (39)..(459): Homolog of NCBI NO: 16331208 NR Description: dihydrolipoamide acetyltransferase component (E2)
  misc_feature (39)..(464): Homolog of NCBI NO: 22298842 NR Description: dihydrolipoamide S-acetyltransferase
  misc_feature (39)..(464): Homolog of NCBI NO: 23123757 NR Description: hypothetical protein [Nostoc punctiforme]
  misc_feature (39)..(464): Homolog of NCBI NO: 17231098 NR Description: dihydrolipoamide S-acetyltransferase [Nostoc sp.
  misc_feature (39)..(464): Homolog of NCBI NO: 37522138 NR Description: dihydrolipoamide S-acetyltransferase [Gloeobacter
MSRLLQTPFLPSVSLPTKTRSSVTGFRVKPRIIPIQAKIREIFMPALSSTMTEGKIVSWVKSEGDKLNKGESVVVVESDKADMDVETFYDGYLAAIMVEEGGVAPVGSAIALLAETEDEIADAKAKASGGGGGGDSKAPPASPPTAAVEAPVSVEKKVAAAPVSIKAVAASAVHPASEGGKRIVASPYAKKLAKELKVELAGLVGSGPMGRIVAKDVEAVAAGGGVQAAVAVKEVVAAPGVELGSVVPFTTMQGAVSRNMVESLGVPTFRVGYTISTDALDALYKKIKSKGVTMTALLAKATALALAKHPVVNSSCRDGNSFVYNSSINVAVAVAIDGGLITPVLQNADKVDIYSLSRKWKELVDKARAKQLQPQEYNTGTFTLSNLGMFGVDRFDAILPPGTGAIMAVGASQPSVVATKDGRIGMKNQMQVNVTADHRVIYGADLAQFLQTLASIIEDPKDLTF

SEQ ID NO: 96538 - protein, 422 aa, Arabidopsis thaliana
  peptide (1)..(422): Ceres Seq. ID no. 12733727
  misc_feature (198)..(422): Pfam Name: 2-oxoacid dehydrogenases acyltransferase Pfam Description: 2-oxoacid dehydrogenases acyltransferase
  misc_feature (1)..(422): Homolog of NCBI NO: 15218630 NR Description: dihydrolipoamide S-acetyltransferase, putative; id: At1g34430.1, supported by cDNA: 101686. [Arabidopsis
  misc_feature (1)..(422): Homolog of NCBI NO: 25286434 NR Description: protein F12K21.24 [imported] - Arabidopsis >gi|8778253|gb|AAF79262.1|AC023279_11 F12K21.24 [Arabidopsis
  misc_feature (1)..(422): Homolog of NCBI NO: 21536525 NR Description: dihydrolipoamide S-acetyltransferase, putative
  misc_feature (1)..(421): Homolog of NCBI NO: 15230922 NR Description: dihydrolipoamide S-acetyltransferase; protein id: supported by cDNA: gi_14335165, supported by cDNA: gi_5881962 thaliana] >gi|5881963|gb|AAD55139.1|AF066079_1
  misc_feature (1)..(421): Homolog of NCBI NO: 9279589 NR Description: dihydrolipoamide S-acetyltransferase [Arabidopsis
  misc_feature (1)..(416): Homolog of NCBI NO: 16331208 NR Description: dihydrolipoamide acetyltransferase component (E2)
  misc_feature (1)..(421): Homolog of NCBI NO: 22298842 NR Description: dihydrolipoamide S-acetyltransferase
  misc_feature (1)..(421): Homolog of NCBI NO: 23123757 NR Description: hypothetical protein [Nostoc punctiforme]
  misc_feature (1)..(421): Homolog of NCBI NO: 17231098 NR Description: dihydrolipoamide S-acetyltransferase [Nostoc sp.
  misc_feature (1)..(421): Homolog of NCBI NO: 37522138 NR Description: dihydrolipoamide S-acetyltransferase [Gloeobacter
MPALSSTMTEGKIVSWVKSEGDKLNKGESVVVVESDKADMDVETFYDGYLAAIMVEEGGVAPVGSAIALLAETEDEIADAKAKASGGGGGGDSKAPPASPPTAAVEAPVSVEKKVAAAPVSIKAVAASAVHPASEGGKRIVASPYAKKLAKELKVELAGLVGSGPMGRIVAKDVEAVAAGGGVQAAVAVKEVVAAPGVELGSVVPFTTMQGAVSRNMVESLGVPTFRVGYTISTDALDALYKKIKSKGVTMTALLAKATALALAKHPVVNSSCRDGNSFVYNSSINVAVAVAIDGGLITPVLQNADKVDIYSLSRKWKELVDKARAKQLQPQEYNTGTFTLSNLGMFGVDRFDAILPPGTGAIMAVGASQPSVVATKDGRIGMKNQMQVNVTADHRVIYGADLAQFLQTLASIIEDPKDLTF

SEQ ID NO: 96539 - DNA, 933 bp, Arabidopsis thaliana
  misc_feature (1)..(933): Ceres Seq. ID no. 12733744
  misc_feature: MA Experiment ID: 20000307 Result: Up-regulated in Transcription
  misc_feature: MA Experiment 20000307 PARAMETER Experiment Name: At_Germinating_Seeds_Sub_P Parameter: Age (hr) Value: 24 vs. 0
  misc_feature: MA Experiment 20000307 PARAMETER Experiment Name: At_Germinating_Seeds_Sub_P Parameter: Organism Value: A. thaliana
  misc_feature: MA Experiment 20000307 PARAMETER Experiment Name: At_Germinating_Seeds_Sub_P Parameter: Plant Line Value: WS
  misc_feature: MA Experiment 20000307 PARAMETER Experiment Name: At_Germinating_Seeds_Sub_P Parameter: Tissue Value: Germinating Seeds
atgagggcaatcgcagcttggtttttcattttctgttaccttgttccctctgtttttgcgcagctccggcatgggttttacgagggtacatgccctcccgctgaatctatcgtgggtagagttgttttcaaccattgggaccgtaaccgaacggttactgcagcattgcttcgtatgcagtttcatgattgtgttgtcaaaggttgtgatgcttccctcttgatcgacccaacaaccgaaagaccatcagagaaaagcgtcgggcgaaatgcaggggtgagaggtttcgagatcatagatgaagctaagaaagaactcgagcttgtttgcccgaaaacagtctcttgcgcagacattgtaactatagccaccagagactcgattgcattagcgggtggtccaaagttcaaagtacgaacaggaagacgcgatggattaagatcaaaccctagtgatgttaaattgctaggaccaacagtttccgtggctacatcaatcaaagcatttaaatctataggttttaatgtaagcaccatggttgcacttattggtggtggccacactgtcggtgttgcacattgtagtctttttcaggataggattaaggatcctaaaatggacagcaaactgagagctaagttaaagaagtcatgtcgtggcccgaacgacccatcagtgttcatggaccaaaatacgccatttagagtagacaatgaaatctatagacagatgatacagcaacgagcaatccttagaattgatgacaacttgattcgcgatggatcaaccaggtcgattgtgtcagattttgcatacaacaataaattattcaaagagagttttgccgaagcgatgcagaaaatgggtgaaataggagttcttacgggagattctggagagatcaggacaaactgcagagccttcaacaactga

SEQ ID NO: 96540 - protein, 310 aa, Arabidopsis thaliana
  peptide (1)..(310): Ceres Seq. ID no. 12733745
  misc_feature (38)..(273): Pfam Name: Peroxidase Pfam Description: Peroxidase
  misc_feature (1)..(310): Homolog of NCBI NO: 15218665 NR Description: peroxidase, putative; protein id: At1g34510.1 thaliana] >gi|25453210|sp|Q9LNL0|PER8_ARATH Peroxidase 8 (Atperox P8) >gi|25285599|pir||A86469 protein F12K21.18
  misc_feature (1)..(310): Homolog of NCBI NO: 18416663 NR Description: peroxidase, putative; protein id: At4g26010.1, by cDNA: gi_15724251, supported by cDNA: gi_16226554, supported cDNA: gi_17530565, supported by cDNA: gi_19699109 [Arabidopsis
  misc_feature (1)..(310): Homolog of NCBI NO: 7433094 NR Description: peroxidase homolog F20B18.120 - Arabidopsis >gi|4538930|emb|CAB39666.1| putative peroxidase [Arabidopsis >gi|7269452|emb|CAB79456.1| putative peroxidase [Arabidopsis
  misc_feature (159)..(305): Homolog of NCBI NO: 25285597 NR Description: probable peroxidase, 81098-80059 [imported] -
  misc_feature (1)..(132): Homolog of NCBI NO: 25285597 NR Description: probable peroxidase, 81098-80059 [imported] -
  misc_feature (160)..(305): Homolog of NCBI NO: 5091615 NR Description: Similar to gb|X98322 peroxidase (prxr10) from
  misc_feature (1)..(133): Homolog of NCBI NO: 5091615 NR Description: Similar to gb|X98322 peroxidase (prxr10) from
  misc_feature (159)..(305): Homolog of NCBI NO: 15218596 NR Description: peroxidase, putative; protein id: At1g34330.1
  misc_feature (1)..(132): Homolog of NCBI NO: 15218596 NR Description: peroxidase, putative; protein id: At1g34330.1
  misc_feature (8)..(309): Homolog of NCBI NO: 15238030 NR Description: peroxidase, putative; protein id: At5g17820.1, by cDNA: 39195. [Arabidopsis thaliana] Peroxidase 57 precursor (Atperox P57) (PRXR10) (ATP13a)
MRAIAAWFFIFCYLVPSVFAQLRHGFYEGTCPPAESIVGRVVFNHWDRNRTVTAALLRMQFHDCVVKGCDASLLIDPTTERPSEKSVGRNAGVRGFEIIDEAKKELELVCPKTVSCADIVTIATRDSIALAGGPKFKVRTGRRDGLRSNPSDVKLLGPTVSVATSIKAFKSIGFNVSTMVALIGGGHTVGVAHCSLFQDRIKDPKMDSKLRAKLKKSCRGPNDPSVFMDQNTPFRVDNEIYRQMIQQRAILRIDDNLIRDGSTRSIVSDFAYNNKLFKESFAEAMQKMGEIGVLTGDSGEIRTNCRAFNN

SEQ ID NO: 96541 - protein, 252 aa, Arabidopsis thaliana
  peptide (1)..(252): Ceres Seq. ID no. 12733746
  misc_feature (1)..(215): Pfam Name: Peroxidase Pfam Description: Peroxidase
  misc_feature (1)..(252): Homolog of NCBI NO: 15218665 NR Description: peroxidase, putative; protein id: At1g34510.1 thaliana] >gi|25453210|sp|Q9LNL0|PER8_ARATH Peroxidase 8 (Atperox P8) >gi|25285599|pir||A86469 protein F12K21.18
  misc_feature (1)..(252): Homolog of NCBI NO: 18416663 NR Description: peroxidase, putative; protein id: At4g26010.1, by cDNA: gi_15724251, supported by cDNA: gi_16226554, supported cDNA: gi_17530565, supported by cDNA: gi_19699109 [Arabidopsis
  misc_feature (1)..(252): Homolog of NCBI NO: 7433094 NR Description: peroxidase homolog F20B18.120 - Arabidopsis >gi|4538930|emb|CAB39666.1| putative peroxidase [Arabidopsis >gi|7269452|emb|CAB79456.1| putative peroxidase [Arabidopsis
  misc_feature (101)..(247): Homolog of NCBI NO: 25285597 NR Description: probable peroxidase, 81098-80059 [imported] -
  misc_feature (1)..(74): Homolog of NCBI NO: 25285597 NR Description: probable peroxidase, 81098-80059 [imported] -
  misc_feature (102)..(247): Homolog of NCBI NO: 5091615 NR Description: Similar to gb|X98322 peroxidase (prxr10) from
  misc_feature (1)..(75): Homolog of NCBI NO: 5091615 NR Description: Similar to gb|X98322 peroxidase (prxr10) from
  misc_feature (101)..(247): Homolog of NCBI NO: 15218596 NR Description: peroxidase, putative; protein id: At1g34330.1
  misc_feature (1)..(74): Homolog of NCBI NO: 15218596 NR Description: peroxidase, putative; protein id: At1g34330.1
  misc_feature (1)..(251): Homolog of NCBI NO: 15238030 NR Description: peroxidase, putative; protein id: At5g17820.1, by cDNA: 39195. [Arabidopsis thaliana] Peroxidase 57 precursor (Atperox P57) (PRXR10) (ATP13a)
MQFHDCVVKGCDASLLIDPTTERPSEKSVGRNAGVRGFEIIDEAKKELELVCPKTVSCADIVTIATRDSIALAGGPKFKVRTGRRDGLRSNPSDVKLLGPTVSVATSIKAFKSIGFNVSTMVALIGGGHTVGVAHCSLFQDRIKDPKMDSKLRAKLKKSCRGPNDPSVFMDQNTPFRVDNEIYRQMIQQRAILRIDDNLIRDGSTRSIVSDFAYNNKLFKESFAEAMQKMGEIGVLTGDSGEIRTNCRAFNN

SEQ ID NO: 96542 - DNA, 912 bp, Arabidopsis thaliana
  misc_feature (1)..(912): Ceres Seq. ID no. 12733755
  misc_feature: MA Experiment ID: 20000185 Result: Up-regulated in Transcription
  misc_feature: MA Experiment 20000185 PARAMETER Experiment Name: At_Roots__P Parameter: Age (day) Value: 7 vs. 21
  misc_feature: MA Experiment 20000185 PARAMETER Experiment Name: At_Roots__P Parameter: Organism Value: A. thaliana
  misc_feature: MA Experiment 20000185 PARAMETER Experiment Name: At_Roots__P Parameter: Tissue Value: Roots vs. Whole Plant
  misc_feature: MA Experiment ID: 20000574 Result: Up-regulated in Transcription
  misc_feature: MA Experiment 20000574 PARAMETER Experiment Name: At_100uM_ABA_Mutants__P Parameter: Organism Value: A. thaliana
  misc_feature: MA Experiment 20000574 PARAMETER Experiment Name: At_100uM_ABA_Mutants__P Parameter: Plant Line Value: CS23 vs. Ler wt
  misc_feature: MA Experiment 20000574 PARAMETER Experiment Name: At_100uM_ABA_Mutants__P Parameter: Timepoint (hr) Value: N/A
  misc_feature: MA Experiment 20000574 PARAMETER Experiment Name: At_100uM_ABA_Mutants__P Parameter: Tissue Value: Whole Plant
  misc_feature: MA Experiment 20000574 PARAMETER Experiment Name: At_100uM_ABA_Mutants__P Parameter: Treatment Value: None
atgcctgcccaagtgatcgctgagcagaccacctttcactccgtccacgacaccattatggaggagacgaatacaactttatatcctaagaggttggaaggaaaagtagccatcataaccggaggcgcacatggaataggcaaagcaaccgtcatgttattcgctagacacggtgccacagtggtgattgctgacgtggacaacgtagctggctcttccctggctaagtcactctcatcccacaaaacctccccgatggtggcattcattagctgcgatgtctccgtagaagccgacgtggaaaaccttgtgaacgtaaccgttgcacggtacggtaggcttgacattctattcaacaacgcgggagttctcggagatcagaagaaacacaaaagcatattagacttcgacgcggacgagtttgaccacgtgatgcgtgtgaacgtacgtggcgtaggactcggcatgaaacacggggcacgcgctatgatcaagagaggattcaaaggctgcataatctccacggcgagtgtagccggtgtgatgggtggaatgggaccacacgcttacacagcctcgaaacatgcgatcgttggtttgaccaagaacgcagcgtgtgagctaggcaagtatgggattagggttaattgtatatcaccgtttggagttgccacgtcgatgctggttaacgcgtggcgaaagacgagtggtggtgacgtggaagatgatgacgtggaggagatggaggagtttgtgaggagtttggctaatttgaaaggagagacattgagagcgaatgatatagctgaagcagcgttatatttggcgagtgatgagtctaagtatgtgaacggacataatcttgtcgttgacggtggtgttacgactgcaagaaactgtgttggtttgtga

SEQ ID NO: 96543 - protein, 303 aa, Arabidopsis thaliana
  peptide (1)..(303): Ceres Seq. ID no. 12733756
  misc_feature (1)..(303): Homolog of NCBI NO: 15230558 NR Description: short-chain alcohol dehydrogenase-like protein;
  misc_feature (26)..(303): Homolog of NCBI NO: 1877480 NR Description: short-chain alcohol dehydrogenase [Tripsacum
  misc_feature (24)..(303): Homolog of NCBI NO: 33146885 NR Description: putative short-chain alcohol dehydrogenase [Oryza
  misc_feature (30)..(303): Homolog of NCBI NO: 34898190 NR Description: putative short-chain alcohol dehydrogenase [Oryza
  misc_feature (26)..(303): Homolog of NCBI NO: 1717794 NR Description: SEX DETERMINATION PROTEIN TASSELSEED 2
  misc_feature (26)..(281): Homolog of NCBI NO: 15192933 NR Description: alcohol dehydrogenase [Zea mays subsp. mays]
  misc_feature (26)..(281): Homolog of NCBI NO: 15192947 NR Description: alcohol dehydrogenase [Zea mays subsp. mays]
  misc_feature (26)..(281): Homolog of NCBI NO: 15192925 NR Description: alcohol dehydrogenase [Zea mays subsp. mays]
  misc_feature (26)..(281): Homolog of NCBI NO: 15192945 NR Description: alcohol dehydrogenase [Zea mays subsp. mays]
  misc_feature (26)..(281): Homolog of NCBI NO: 15192931 NR Description: alcohol dehydrogenase [Zea mays subsp. mays] alcohol dehydrogenase [Zea mays subsp. mays]
MPAQVIAEQTTFHSVHDTIMEETNTTLYPKRLEGKVAIITGGAHGIGKATVMLFARHGATVVIADVDNVAGSSLAKSLSSHKTSPMVAFISCDVSVEADVENLVNVTVARYGRLDILFNNAGVLGDQKKHKSILDFDADEFDHVMRVNVRGVGLGMKHGARAMIKRGFKGCIISTASVAGVMGGMGPHAYTASKHAIVGLTKNAACELGKYGIRVNCISPFGVATSMLVNAWRKTSGGDVEDDDVEEMEEFVRSLANLKGETLRANDIAEAALYLASDESKYVNGHNLVVDGGVTTARNCVGL

SEQ ID NO: 96544 - protein, 284 aa, Arabidopsis thaliana
  peptide (1)..(284): Ceres Seq. ID no. 12733757
  misc_feature (1)..(284): Homolog of NCBI NO: 15230558 NR Description: short-chain alcohol dehydrogenase-like protein;
  misc_feature (7)..(284): Homolog of NCBI NO: 1877480 NR Description: short-chain alcohol dehydrogenase [Tripsacum
  misc_feature (5)..(284): Homolog of NCBI NO: 33146885 NR Description: putative short-chain alcohol dehydrogenase [Oryza
  misc_feature (11)..(284): Homolog of NCBI NO: 34898190 NR Description: putative short-chain alcohol dehydrogenase [Oryza
  misc_feature (7)..(284): Homolog of NCBI NO: 1717794 NR Description: SEX DETERMINATION PROTEIN TASSELSEED 2
  misc_feature (7)..(262): Homolog of NCBI NO: 15192933 NR Description: alcohol dehydrogenase [Zea mays subsp. mays]
  misc_feature (7)..(262): Homolog of NCBI NO: 15192947 NR Description: alcohol dehydrogenase [Zea mays subsp. mays]
  misc_feature (7)..(262): Homolog of NCBI NO: 15192925 NR Description: alcohol dehydrogenase [Zea mays subsp. mays]
  misc_feature (7)..(262): Homolog of NCBI NO: 15192945 NR Description: alcohol dehydrogenase [Zea mays subsp. mays]
  misc_feature (7)..(262): Homolog of NCBI NO: 15192931 NR Description: alcohol dehydrogenase [Zea mays subsp. mays] alcohol dehydrogenase [Zea mays subsp. mays]
MEETNTTLYPKRLEGKVAIITGGAHGIGKATVMLFARHGATVVIADVDNVAGSSLAKSLSSHKTSPMVAFISCDVSVEADVENLVNVTVARYGRLDILFNNAGVLGDQKKHKSILDFDADEFDHVMRVNVRGVGLGMKHGARAMIKRGFKGCIISTASVAGVMGGMGPHAYTASKHAIVGLTKNAACELGKYGIRVNCISPFGVATSMLVNAWRKTSGGDVEDDDVEEMEEFVRSLANLKGETLRANDIAEAALYLASDESKYVNGHNLVVDGGVTTARNCVGL

SEQ ID NO: 96545 - protein, 252 aa, Arabidopsis thaliana
  peptide (1)..(252): Ceres Seq. ID no. 12733758
  misc_feature (1)..(252): Homolog of NCBI NO: 15230558 NR Description: short-chain alcohol dehydrogenase-like protein;
  misc_feature (1)..(252): Homolog of NCBI NO: 1877480 NR Description: short-chain alcohol dehydrogenase [Tripsacum
  misc_feature (1)..(252): Homolog of NCBI NO: 33146885 NR Description: putative short-chain alcohol dehydrogenase [Oryza
  misc_feature (1)..(252): Homolog of NCBI NO: 34898190 NR Description: putative short-chain alcohol dehydrogenase [Oryza
  misc_feature (1)..(252): Homolog of NCBI NO: 1717794 NR Description: SEX DETERMINATION PROTEIN TASSELSEED 2
  misc_feature (1)..(230): Homolog of NCBI NO: 15192933 NR Description: alcohol dehydrogenase [Zea mays subsp. mays]
  misc_feature (1)..(230): Homolog of NCBI NO: 15192947 NR Description: alcohol dehydrogenase [Zea mays subsp. mays]
  misc_feature (1)..(230): Homolog of NCBI NO: 15192925 NR Description: alcohol dehydrogenase [Zea mays subsp. mays]
  misc_feature (1)..(230): Homolog of NCBI NO: 15192931 NR Description: alcohol dehydrogenase [Zea mays subsp. mays] alcohol dehydrogenase [Zea mays subsp. mays]
  misc_feature (1)..(230): Homolog of NCBI NO: 15192945 NR Description: alcohol dehydrogenase [Zea mays subsp. mays]
MLFARHGATVVIADVDNVAGSSLAKSLSSHKTSPMVAFISCDVSVEADVENLVNVTVARYGRLDILFNNAGVLGDQKKHKSILDFDADEFDHVMRVNVRGVGLGMKHGARAMIKRGFKGCIISTASVAGVMGGMGPHAYTASKHAIVGLTKNAACELGKYGIRVNCISPFGVATSMLVNAWRKTSGGDVEDDDVEEMEEFVRSLANLKGETLRANDIAEAALYLASDESKYVNGHNLVVDGGVTTARNCVGL

SEQ ID NO: 96546 - DNA, 819 bp, Arabidopsis thaliana
  misc_feature (1)..(819): Ceres Seq. ID no. 12733773
  misc_feature: MA Experiment ID: 20000171 Result: Up-regulated in Transcription
  misc_feature: MA Experiment 20000171 PARAMETER Experiment Name: At_42deg_Heat_P Parameter: Age (day) Value: 14
  misc_feature: MA Experiment 20000171 PARAMETER Experiment Name: At_42deg_Heat_P Parameter: Organism Value: A. thaliana
  misc_feature: MA Experiment 20000171 PARAMETER Experiment Name: At_42deg_Heat_P Parameter: Plant Line Value: WS
  misc_feature: MA Experiment 20000171 PARAMETER Experiment Name: At_42deg_Heat_P Parameter: Temperature (deg C) Value: 42 vs. 22
  misc_feature: MA Experiment 20000171 PARAMETER Experiment Name: At_42deg_Heat_P Parameter: Timepoint (hr) Value: 1
  misc_feature: MA Experiment 20000171 PARAMETER Experiment Name: At_42deg_Heat_P Parameter: Tissue Value: Aerial
  misc_feature: MA Experiment ID: 20000173 Result: Up-regulated in Transcription
  misc_feature: MA Experiment 20000173 PARAMETER Experiment Name: At_42deg_Heat_P Parameter: Age (day) Value: 14
  misc_feature: MA Experiment 20000173 PARAMETER Experiment Name: At_42deg_Heat_P Parameter: Organism Value: A. thaliana
  misc_feature: MA Experiment 20000173 PARAMETER Experiment Name: At_42deg_Heat_P Parameter: Plant Line Value: WS
  misc_feature: MA Experiment 20000173 PARAMETER Experiment Name: At_42deg_Heat_P Parameter: Temperature (deg C) Value: 42 vs. 22
  misc_feature: MA Experiment 20000173 PARAMETER Experiment Name: At_42deg_Heat_P Parameter: Timepoint (hr) Value: 6
  misc_feature: MA Experiment 20000173 PARAMETER Experiment Name: At_42deg_Heat_P Parameter: Tissue Value: Aerial
  misc_feature: MA Experiment ID: 20000227 Result: Down-regulated in Transcription
  misc_feature: MA Experiment 20000227 PARAMETER Experiment Name: At_Root-Tips-vs-Tops_P Parameter: Tissue Value: Root Tips vs. Root Tops
  misc_feature: MA Experiment ID: 20000234 Result: Down-regulated in Transcription
  misc_feature: MA Experiment 20000234 PARAMETER Experiment Name: At_Siliques_P Parameter: Age (day) Value: 21
  misc_feature: MA Experiment 20000234 PARAMETER Experiment Name: At_Siliques_P Parameter: Organism Value: A. thaliana
  misc_feature: MA Experiment 20000234 PARAMETER Experiment Name: At_Siliques_P Parameter: Plant Line Value: WS
  misc_feature: MA Experiment 20000234 PARAMETER Experiment Name: At_Siliques_P Parameter: Tissue Value: Less Than 5mm Siliques vs. Whole Plant
  misc_feature: MA Experiment ID: 20000264 Result: Down-regulated in Transcription
  misc_feature: MA Experiment 20000264 PARAMETER Experiment Name: At_Open_Flower_P Parameter: Age (day) Value: 21
  misc_feature: MA Experiment 20000264 PARAMETER Experiment Name: At_Open_Flower_P Parameter: Plant Line Value: WS
  misc_feature: MA Experiment 20000264 PARAMETER Experiment Name: At_Open_Flower_P Parameter: Tissue Value: Open Flower vs. Whole Plant
  misc_feature: MA Experiment ID: 20000265 Result: Down-regulated in Transcription
  misc_feature: MA Experiment 20000265 PARAMETER Experiment Name: At_Open_Flower_P Parameter: Age (day) Value: 21
  misc_feature: MA Experiment 20000265 PARAMETER Experiment Name: At_Open_Flower_P Parameter: Plant Line Value: WS
  misc_feature: MA Experiment 20000265 PARAMETER Experiment Name: At_Open_Flower_P Parameter: Tissue Value: Closed Flower vs. Whole Plant
  misc_feature: MA Experiment ID: 20000286 Result: Down-regulated in Transcription
  misc_feature: MA Experiment 20000286 PARAMETER Experiment Name: At_Open_Flower_P Parameter: Age (day) Value: 21
  misc_feature: MA Experiment 20000286 PARAMETER Experiment Name: At_Open_Flower_P Parameter: Plant Line Value: WS
  misc_feature: MA Experiment 20000286 PARAMETER Experiment Name: At_Open_Flower_P Parameter: Tissue Value: Half Open vs. Whole Plant
  misc_feature: MA Experiment ID: 20000437 Result: Up-regulated in Transcription
  misc_feature: MA Experiment 20000437 PARAMETER Experiment Name: At_Drought_P Parameter: Age (day) Value: 8
  misc_feature: MA Experiment 20000437 PARAMETER Experiment Name: At_Drought_P Parameter: Organism Value: A. thaliana
  misc_feature: MA Experiment 20000437 PARAMETER Experiment Name: At_Drought_P Parameter: Plant Line Value: WS
  misc_feature: MA Experiment 20000437 PARAMETER Experiment Name: At_Drought_P Parameter: Timepoint (hr) Value: 24
  misc_feature: MA Experiment 20000437 PARAMETER Experiment Name: At_Drought_P Parameter: Tissue Value: Whole Plant
  misc_feature: MA Experiment 20000437 PARAMETER Experiment Name: At_Drought_P Parameter: Treatment Value: Drought vs. No Drought
  misc_feature: MA Experiment ID: 20000439 Result: Up-regulated in Transcription
  misc_feature: MA Experiment 20000439 PARAMETER Experiment Name: At_Roots__P Parameter: Age (day) Value: 14 vs. 21
  misc_feature: MA Experiment 20000439 PARAMETER Experiment Name: At_Roots__P Parameter: Organism Value: A. thaliana
  misc_feature: MA Experiment 20000439 PARAMETER Experiment Name: At_Roots__P Parameter: Tissue Value: Roots vs. Whole Plant
  misc_feature: MA Experiment ID: 20001247 Result: Up-regulated in Transcription
  misc_feature: MA Experiment 20001247 PARAMETER Experiment Name: At_Far-red-induction_P Parameter: Age (day) Value: 7
  misc_feature: MA Experiment 20001247 PARAMETER Experiment Name: At_Far-red-induction_P Parameter: Light Value: Far-red vs. White
  misc_feature: MA Experiment 20001247 PARAMETER Experiment Name: At_Far-red-induction_P Parameter: Organism Value: A. thaliana
  misc_feature: MA Experiment 20001247 PARAMETER Experiment Name: At_Far-red-induction_P Parameter: Plant Line Value: Columbia
  misc_feature: MA Experiment 20001247 PARAMETER Experiment Name: At_Far-red-induction_P Parameter: Timepoint (hr) Value: 1
  misc_feature: MA Experiment 20001247 PARAMETER Experiment Name: At_Far-red-induction_P Parameter: Tissue Value: Whole Plant
  misc_feature: MA Experiment ID: 20001248 Result: Up-regulated in Transcription
  misc_feature: MA Experiment 20001248 PARAMETER Experiment Name: At_Far-red-induction_P Parameter: Age (day) Value: 7
  misc_feature: MA Experiment 20001248 PARAMETER Experiment Name: At_Far-red-induction_P Parameter: Light Value: Far-red vs. White
  misc_feature: MA Experiment 20001248 PARAMETER Experiment Name: At_Far-red-induction_P Parameter: Organism Value: A. thaliana
  misc_feature: MA Experiment 20001248 PARAMETER Experiment Name: At_Far-red-induction_P Parameter: Plant Line Value: Columbia
  misc_feature: MA Experiment 20001248 PARAMETER Experiment Name: At_Far-red-induction_P Parameter: Timepoint (hr) Value: 4
  misc_feature: MA Experiment 20001248 PARAMETER Experiment Name: At_Far-red-induction_P Parameter: Tissue Value: Whole Plant
  misc_feature: MA Experiment ID: 20001451 Result: Up-regulated in Transcription
  misc_feature: MA Experiment 20001451 PARAMETER Experiment Name: At_Far-red-induction_P Parameter: Age (day) Value: 7
  misc_feature: MA Experiment 20001451 PARAMETER Experiment Name: At_Far-red-induction_P Parameter: Light Value: Far-red vs. White
  misc_feature: MA Experiment 20001451 PARAMETER Experiment Name: At_Far-red-induction_P Parameter: Organism Value: A. thaliana
  misc_feature: MA Experiment 20001451 PARAMETER Experiment Name: At_Far-red-induction_P Parameter: Plant Line Value: Columbia
  misc_feature: MA Experiment 20001451 PARAMETER Experiment Name: At_Far-red-induction_P Parameter: Timepoint (hr) Value: 24
  misc_feature: MA Experiment 20001451 PARAMETER Experiment Name: At_Far-red-induction_P Parameter: Tissue Value: Whole Plant
  misc_feature: MA Experiment ID: 20001757 Result: Up-regulated in Transcription
  misc_feature: MA Experiment 20001757 PARAMETER Experiment Name: At_50mM_NH4NO3_L-to-H_P Parameter: Timepoint (hr) Value: 6
  misc_feature: MA Experiment 20001757 PARAMETER Experiment Name: At_50mM_NH4NO3_L-to-H_P Parameter: Tissue Value: Leaf
  misc_feature: MA Experiment 20001757 PARAMETER Experiment Name: At_50mM_NH4NO3_L-to-H_P Parameter: Treatment Value: 50mM NH4NO3 vs 100mM Mannitol
  misc_feature: MA Experiment ID: 20001905 Result: Up-regulated in Transcription
  misc_feature: MA Experiment 20001905 PARAMETER Experiment Name: At_Drought_Reproduction_P Parameter: Age (day) Value: 40
  misc_feature: MA Experiment 20001905 PARAMETER Experiment Name: At_Drought_Reproduction_P Parameter: Organism Value: A. thaliana
  misc_feature: MA Experiment 20001905 PARAMETER Experiment Name: At_Drought_Reproduction_P Parameter: Plant Line Value: WS
  misc_feature: MA Experiment 20001905 PARAMETER Experiment Name: At_Drought_Reproduction_P Parameter: Timepoint (day) Value: 10
  misc_feature: MA Experiment 20001905 PARAMETER Experiment Name: At_Drought_Reproduction_P Parameter: Tissue Value: Rosettes
  misc_feature: MA Experiment 20001905 PARAMETER Experiment Name: At_Drought_Reproduction_P Parameter: Treatment Value: Drought vs. No Drought
  misc_feature: MA Experiment ID: 20001911 Result: Up-regulated in Transcription
  misc_feature: MA Experiment 20001911 PARAMETER Experiment Name: At_Drought_Reproduction_P Parameter: Age (day) Value: 40
  misc_feature: MA Experiment 20001911 PARAMETER Experiment Name: At_Drought_Reproduction_P Parameter: Organism Value: A. thaliana
  misc_feature: MA Experiment 20001911 PARAMETER Experiment Name: At_Drought_Reproduction_P Parameter: Plant Line Value: WS
  misc_feature: MA Experiment 20001911 PARAMETER Experiment Name: At_Drought_Reproduction_P Parameter: Timepoint (day) Value: 10
  misc_feature: MA Experiment 20001911 PARAMETER Experiment Name: At_Drought_Reproduction_P Parameter: Tissue Value: Flowers
  misc_feature: MA Experiment 20001911 PARAMETER Experiment Name: At_Drought_Reproduction_P Parameter: Treatment Value: Drought vs. No Drought
atgatgaacccgtttctcccggaaggctgcgatccaccaccaccaccacaaccaatggagggtttacacgaaaatgctccacctccatttctgaccaagacatttgagatggtggatgatccaaacactgaccacatcgtatcttggaacagaggaggaacaagttttgtcgtctgggatttgcattctttctccacgattctccttcctcgtcatttcaaacacagcaatttctcaagtttcatcagacaactcaatacttatggtttcagaaagatagaagcagagagatgggaatttgcaaacgaagagtttttgttaggacaaagacagttgttgaagaacatcaagaggagaaacccttttactccatcatcttcaccaagccatgacgcttgcaacgagcttcgcagagagaagcaagtgctaatgatggagatagtgagtctaagacagcagcaacaaacaacgaaaagctacatcaaagctatggaacagaggatagaaggaacagagaggaaacagagacaaatgatgtcgtttctggctagagcaatgcagagtccttcgtttttgcatcagttgttgaaacaaagagataaaaaaattaaggagcttgaggataatgagtcagcaaagaggaaaagaggttcttcttcgatgtcggaattggaagttttggctttggagatgcaagggcatggaaaacagaggaatatgttggaagaagaggatcatcaactggtggtagagagagagttggatgatggtttctgggaagagttgcttagtgatgagagtttggcttccacctcctaa

SEQ ID NO: 96547 - protein, 272 aa, Arabidopsis thaliana
  peptide (1)..(272): Ceres Seq. ID no. 12733774
  misc_feature (28)..(182): Pfam Name: HSF-type DNA-binding Pfam Description: HSF-type DNA-binding
  misc_feature (1)..(272): Homolog of NCBI NO: 15231071 NR Description: putative heat shock transcription factor; protein At3g51910.1 [Arabidopsis thaliana] >gi|11277183|pir||T49070
  misc_feature (2)..(263): Homolog of NCBI NO: 15229416 NR Description: heat shock transcription factor-like protein; id: At3g63350.1 [Arabidopsis thaliana] >gi|11277182|pir||T48124
  misc_feature (16)..(216): Homolog of NCBI NO: 28971956 NR Description: putative heat shock transcription factor [Oryza
  misc_feature (16)..(216): Homolog of NCBI NO: 37534406 NR Description: putative auxin-induced protein [Oryza sativa
  misc_feature (16)..(216): Homolog of NCBI NO: 33087081 NR Description: heat stress protein [Oryza sativa (japonica
  misc_feature (89)..(214): Homolog of NCBI NO: 29028788 NR Description: At3g51910 [Arabidopsis thaliana]
  misc_feature (16)..(141): Homolog of NCBI NO: 30017583 NR Description: putative heat shock factor [Oryza sativa
  misc_feature (134)..(216): Homolog of NCBI NO: 30017583 NR Description: putative heat shock factor [Oryza sativa
  misc_feature (16)..(256): Homolog of NCBI NO: 15225255 NR Description: putative heat shock transcription factor; protein At2g26150.1 [Arabidopsis thaliana] >gi|7485001|pir||T02609
  misc_feature (16)..(254): Homolog of NCBI NO: 10177954 NR Description: heat shock transcription factor-like protein
MMNPFLPEGCDPPPPPQPMEGLHENAPPPFLTKTFEMVDDPNTDHIVSWNRGGTSFVVWDLHSFSTILLPRHFKHSNFSSFIRQLNTYGFRKIEAERWEFANEEFLLGQRQLLKNIKRRNPFTPSSSPSHDACNELRREKQVLMMEIVSLRQQQQTTKSYIKAMEQRIEGTERKQRQMMSFLARAMQSPSFLHQLLKQRDKKIKELEDNESAKRKRGSSSMSELEVLALEMQGHGKQRNMLEEEDHQLVVERELDDGFWEELLSDESLASTS

SEQ ID NO: 96548 - protein, 271 aa, Arabidopsis thaliana
  peptide (1)..(271): Ceres Seq. ID no. 12733775
  misc_feature (27)..(181): Pfam Name: HSF-type DNA-binding Pfam Description: HSF-type DNA-binding
  misc_feature (1)..(271): Homolog of NCBI NO: 15231071 NR Description: putative heat shock transcription factor; protein At3g51910.1 [Arabidopsis thaliana] >gi|11277183|pir||T49070
  misc_feature (1)..(262): Homolog of NCBI NO: 15229416 NR Description: heat shock transcription factor-like protein; id: At3g63350.1 [Arabidopsis thaliana] >gi|11277182|pir||T48124
  misc_feature (15)..(215): Homolog of NCBI NO: 28971956 NR Description: putative heat shock transcription factor [Oryza
  misc_feature (15)..(215): Homolog of NCBI NO: 37534406 NR Description: putative auxin-induced protein [Oryza sativa
  misc_feature (15)..(215): Homolog of NCBI NO: 33087081 NR Description: heat stress protein [Oryza sativa (japonica
  misc_feature (88)..(213): Homolog of NCBI NO: 29028788 NR Description: At3g51910 [Arabidopsis thaliana]
  misc_feature (15)..(140): Homolog of NCBI NO: 30017583 NR Description: putative heat shock factor [Oryza sativa
  misc_feature (133)..(215): Homolog of NCBI NO: 30017583 NR Description: putative heat shock factor [Oryza sativa
  misc_feature (15)..(255): Homolog of NCBI NO: 15225255 NR Description: putative heat shock transcription factor; protein At2g26150.1 [Arabidopsis thaliana] >gi|7485001|pir||T02609
  misc_feature (15)..(253): Homolog of NCBI NO: 10177954 NR Description: heat shock transcription factor-like protein
MNPFLPEGCDPPPPPQPMEGLHENAPPPFLTKTFEMVDDPNTDHIVSWNRGGTSFVVWDLHSFSTILLPRHFKHSNFSSFIRQLNTYGFRKIEAERWEFANEEFLLGQRQLLKNIKRRNPFTPSSSPSHDACNELRREKQVLMMEIVSLRQQQQTTKSYIKAMEQRIEGTERKQRQMMSFLARAMQSPSFLHQLLKQRDKKIKELEDNESAKRKRGSSSMSELEVLALEMQGHGKQRNMLEEEDHQLVVERELDDGFWEELLSDESLASTS

SEQ ID NO: 96549 - protein, 254 aa, Arabidopsis thaliana
  peptide (1)..(254): Ceres Seq. ID no. 12733776
  misc_feature (10)..(164): Pfam Name: HSF-type DNA-binding Pfam Description: HSF-type DNA-binding
  misc_feature (1)..(254): Homolog of NCBI NO: 15231071 NR Description: putative heat shock transcription factor; protein At3g51910.1 [Arabidopsis thaliana] >gi|11277183|pir||T49070
  misc_feature (1)..(245): Homolog of NCBI NO: 15229416 NR Description: heat shock transcription factor-like protein; id: At3g63350.1 [Arabidopsis thaliana] >gi|11277182|pir||T48124
  misc_feature (1)..(198): Homolog of NCBI NO: 28971956 NR Description: putative heat shock transcription factor [Oryza
  misc_feature (1)..(198): Homolog of NCBI NO: 37534406 NR Description: putative auxin-induced protein [Oryza sativa
  misc_feature (1)..(198): Homolog of NCBI NO: 33087081 NR Description: heat stress protein [Oryza sativa (japonica
  misc_feature (71)..(196): Homolog of NCBI NO: 29028788 NR Description: At3g51910 [Arabidopsis thaliana]
  misc_feature (1)..(123): Homolog of NCBI NO: 30017583 NR Description: putative heat shock factor [Oryza sativa
  misc_feature (116)..(198): Homolog of NCBI NO: 30017583 NR Description: putative heat shock factor [Oryza sativa
  misc_feature (1)..(238): Homolog of NCBI NO: 15225255 NR Description: putative heat shock transcription factor; protein At2g26150.1 [Arabidopsis thaliana] >gi|7485001|pir||T02609
  misc_feature (1)..(236): Homolog of NCBI NO: 10177954 NR Description: heat shock transcription factor-like protein
MEGLHENAPPPFLTKTFEMVDDPNTDHIVSWNRGGTSFVVWDLHSFSTILLPRHFKHSNFSSFIRQLNTYGFRKIEAERWEFANEEFLLGQRQLLKNIKRRNPFTPSSSPSHDACNELRREKQVLMMEIVSLRQQQQTTKSYIKAMEQRIEGTERKQRQMMSFLARAMQSPSFLHQLLKQRDKKIKELEDNESAKRKRGSSSMSELEVLALEMQGHGKQRNMLEEEDHQLVVERELDDGFWEELLSDESLASTS

SEQ ID NO: 96550 - DNA, 1248 bp, Arabidopsis thaliana
  misc_feature (1)..(1248): Ceres Seq. ID no. 12733781
  misc_feature: MA Experiment ID: 20000184 Result: Up-regulated in Transcription
  misc_feature: MA Experiment 20000184 PARAMETER Experiment Name: At_Shoots__P Parameter: Age (day) Value: 7
  misc_feature: MA Experiment 20000184 PARAMETER Experiment Name: At_Shoots__P Parameter: Tissue Value: Shoots vs. Whole Plant
  misc_feature: MA Experiment ID: 20000185 Result: Up-regulated in Transcription
  misc_feature: MA Experiment 20000185 PARAMETER Experiment Name: At_Roots__P Parameter: Age (day) Value: 7 vs. 21
  misc_feature: MA Experiment 20000185 PARAMETER Experiment Name: At_Roots__P Parameter: Organism Value: A. thaliana
  misc_feature: MA Experiment 20000185 PARAMETER Experiment Name: At_Roots__P Parameter: Tissue Value: Roots vs. Whole Plant
  misc_feature: MA Experiment ID: 20000439 Result: Up-regulated in Transcription
  misc_feature: MA Experiment 20000439 PARAMETER Experiment Name: At_Roots__P Parameter: Age (day) Value: 14 vs. 21
  misc_feature: MA Experiment 20000439 PARAMETER Experiment Name: At_Roots__P Parameter: Organism Value: A. thaliana
  misc_feature: MA Experiment 20000439 PARAMETER Experiment Name: At_Roots__P Parameter: Tissue Value: Roots vs. Whole Plant
atggtgagatcaatccaagaaggagtcttgatgtcttcatcttcttcctcaaccacaagcaacagcaacgactccgacggttctctcagcccatctgcgtccaccaaaagcttcgtcctcaacactctccgtccgcctatcaccggcgcgtacaagccactcgctgttctctctgctcatgtcggctctgtttcttccttagcgctctgtggtgagttcttgctgagtgcgtctcagggaaaagatatcatcgtttggcaacagcctgatctcaagatctttgcgaaattcggacaaggtgatgggtctgtgaaggctttggtcagcgtgggaagcaaagtgttcacggcgcatcaagatagtagaatcagagtttggaaagtttctcggagaaactctgagaatgctttcaggcttgttgatacacttcccacgactaaagactatctggggaagtttatgaaacagagcaattacgttcagacgaggaggaaccataagcgtctctggattgaacacgccgatagcatttcgtgccttgcggtacacgctgggataatctactctggatcgtgggataagactctcaaagtctggagactgtcggatctcaagtgtcttgaatcgatcaaggctcatgatgacgcaatcaatggtcttgtcgccggagatggcagggtatactctgcttccgcagatgggaaggtcaagatatgggggaaagagaagagaaagcagattgagtctacttcttcctcttcctcttctttacatgttttgaaggctacgttggagggtcgtgcagaggtgtcagtgaactcggtggtggtttccggtgacggtaattgggtatacggaggaggatcagacgggtttgtgatcggatgggagaagaaagagaaagaaggagactttgaggaatggagattagggtttgagacaagaggacataacatggcagttctgtgtatgtgtgtagttggggaaatggtatgcagtggatcggctgataagagcattgggttgtggaggagagaagtgactggcatgctctgtaaattcggagtcatacatggccatgaaggtccggtcaaatgcttacaagcgtcgccaaacaatgtcggtgctggcttcatgctttacagtggaggccttgacaagagtctcagggtttggtgggtaccaaaacaagacaacttagaagagaagaaatcaagctttaagacattgttgacgcaaaaggaatga

SEQ ID NO: 96551 - protein, 415 aa, Arabidopsis thaliana
  peptide (1)..(415): Ceres Seq. ID no. 12733782
  misc_feature (1)..(415): Homolog of NCBI NO: 15231088 NR Description: G-protein beta family; protein id: At3g51930.1
  misc_feature (13)..(404): Homolog of NCBI NO: 34906600 NR Description: hypothetical protein~similar to Arabidopsis
  misc_feature (62)..(394): Homolog of NCBI NO: 15225317 NR Description: G-protein beta family; protein id: At2g26490.1
  misc_feature (62)..(394): Homolog of NCBI NO: 15230244 NR Description: hypothetical protein; protein id: At3g18950.1
  misc_feature (62)..(396): Homolog of NCBI NO: 15220271 NR Description: G-protein beta family; protein id: At1g47610.1
  misc_feature (62)..(394): Homolog of NCBI NO: 15222143 NR Description: En/Spm-like transposon protein, putative; protein At1g49450.1, supported by cDNA: gi_17979258 [Arabidopsis >gi|25405310|pir||B96531 hypothetical protein F13F21.11
  misc_feature (12)..(394): Homolog of NCBI NO: 15229740 NR Description: G-protein beta family; protein id: At3g50390.1
  misc_feature (62)..(394): Homolog of NCBI NO: 17979259 NR Description: At1g49450/F13F21_11 [Arabidopsis thaliana]
  misc_feature (15)..(392): Homolog of NCBI NO: 15221675 NR Description: G-protein beta family; protein id: At1g24130.1
  misc_feature (13)..(397): Homolog of NCBI NO: 15235354 NR Description: G-protein beta family; protein id: At4g34380.1
MVRSIQEGVLMSSSSSSTTSNSNDSDGSLSPSASTKSFVLNTLRPPITGAYKPLAVLSAHVGSVSSLALCGEFLLSASQGKDIIVWQQPDLKIFAKFGQGDGSVKALVSVGSKVFTAHQDSRIRVWKVSRRNSENAFRLVDTLPTTKDYLGKFMKQSNYVQTRRNHKRLWIEHADSISCLAVHAGIIYSGSWDKTLKVWRLSDLKCLESIKAHDDAINGLVAGDGRVYSASADGKVKIWGKEKRKQIESTSSSSSSLHVLKATLEGRAEVSVNSVVVSGDGNWVYGGGSDGFVIGWEKKEKEGDFEEWRLGFETRGHNMAVLCMCVVGEMVCSGSADKSIGLWRREVTGMLCKFGVIHGHEGPVKCLQASPNNVGAGFMLYSGGLDKSLRVWWVPKQDNLEEKKSSFKTLLTQKE

SEQ ID NO: 96552 - protein, 405 aa, Arabidopsis thaliana
  peptide (1)..(405): Ceres Seq. ID no. 12733783
  misc_feature (1)..(405): Homolog of NCBI NO: 15231088 NR Description: G-protein beta family; protein id: At3g51930.1
  misc_feature (3)..(394): Homolog of NCBI NO: 34906600 NR Description: hypothetical protein~similar to Arabidopsis
  misc_feature (52)..(384): Homolog of NCBI NO: 15225317 NR Description: G-protein beta family; protein id: At2g26490.1
  misc_feature (52)..(384): Homolog of NCBI NO: 15230244 NR Description: hypothetical protein; protein id: At3g18950.1
  misc_feature (52)..(386): Homolog of NCBI NO: 15220271 NR Description: G-protein beta family; protein id: At1g47610.1
  misc_feature (52)..(384): Homolog of NCBI NO: 15222143 NR Description: En/Spm-like transposon protein, putative; protein At1g49450.1, supported by cDNA: gi_17979258 [Arabidopsis >gi|25405310|pir||B96531 hypothetical protein F13F21.11
  misc_feature (2)..(384): Homolog of NCBI NO: 15229740 NR Description: G-protein beta family; protein id: At3g50390.1
  misc_feature (52)..(384): Homolog of NCBI NO: 17979259 NR Description: At1g49450/F13F21_11 [Arabidopsis thaliana]
  misc_feature (5)..(382): Homolog of NCBI NO: 15221675 NR Description: G-protein beta family; protein id: At1g24130.1
  misc_feature (3)..(387): Homolog of NCBI NO: 15235354 NR Description: G-protein beta family; protein id: At4g34380.1
MSSSSSSTTSNSNDSDGSLSPSASTKSFVLNTLRPPITGAYKPLAVLSAHVGSVSSLALCGEFLLSASQGKDIIVWQQPDLKIFAKFGQGDGSVKALVSVGSKVFTAHQDSRIRVWKVSRRNSENAFRLVDTLPTTKDYLGKFMKQSNYVQTRRNHKRLWIEHADSISCLAVHAGIIYSGSWDKTLKVWRLSDLKCLESIKAHDDAINGLVAGDGRVYSASADGKVKIWGKEKRKQIESTSSSSSSLHVLKATLEGRAEVSVNSVVVSGDGNWVYGGGSDGFVIGWEKKEKEGDFEEWRLGFETRGHNMAVLCMCVVGEMVCSGSADKSIGLWRREVTGMLCKFGVIHGHEGPVKCLQASPNNVGAGFMLYSGGLDKSLRVWWVPKQDNLEEKKSSFKTLLTQKE

SEQ ID NO: 96553 - protein, 262 aa, Arabidopsis thaliana
  peptide (1)..(262): Ceres Seq. ID no. 12733784
  misc_feature (1)..(262): Homolog of NCBI NO: 15231088 NR Description: G-protein beta family; protein id: At3g51930.1
  misc_feature (1)..(251): Homolog of NCBI NO: 34906600 NR Description: hypothetical protein~similar to Arabidopsis
  misc_feature (1)..(241): Homolog of NCBI NO: 15225317 NR Description: G-protein beta family; protein id: At2g26490.1
  misc_feature (1)..(241): Homolog of NCBI NO: 15230244 NR Description: hypothetical protein; protein id: At3g18950.1
  misc_feature (1)..(243): Homolog of NCBI NO: 15220271 NR Description: G-protein beta family; protein id: At1g47610.1
  misc_feature (1)..(241): Homolog of NCBI NO: 15222143 NR Description: En/Spm-like transposon protein, putative; protein At1g49450.1, supported by cDNA: gi_17979258 [Arabidopsis >gi|25405310|pir||B96531 hypothetical protein F13F21.11
  misc_feature (1)..(241): Homolog of NCBI NO: 15229740 NR Description: G-protein beta family; protein id: At3g50390.1
  misc_feature (1)..(241): Homolog of NCBI NO: 17979259 NR Description: At1g49450/F13F21_11 [Arabidopsis thaliana]
  misc_feature (1)..(239): Homolog of NCBI NO: 15221675 NR Description: G-protein beta family; protein id: At1g24130.1
  misc_feature (1)..(244): Homolog of NCBI NO: 15235354 NR Description: G-protein beta family; protein id: At4g34380.1
MKQSNYVQTRRNHKRLWIEHADSISCLAVHAGIIYSGSWDKTLKVWRLSDLKCLESIKAHDDAINGLVAGDGRVYSASADGKVKIWGKEKRKQIESTSSSSSSLHVLKATLEGRAEVSVNSVVVSGDGNWVYGGGSDGFVIGWEKKEKEGDFEEWRLGFETRGHNMAVLCMCVVGEMVCSGSADKSIGLWRREVTGMLCKFGVIHGHEGPVKCLQASPNNVGAGFMLYSGGLDKSLRVWWVPKQDNLEEKKSSFKTLLTQKE

SEQ ID NO: 96554 - DNA, 474 bp, Arabidopsis thaliana
  misc_feature (1)..(474): Ceres Seq. ID no. 12733785
  misc_feature: MA Experiment ID: 20000264 Result: Down-regulated in Transcription
  misc_feature: MA Experiment 20000264 PARAMETER Experiment Name: At_Open_Flower_P Parameter: Age (day) Value: 21
  misc_feature: MA Experiment 20000264 PARAMETER Experiment Name: At_Open_Flower_P Parameter: Plant Line Value: WS
  misc_feature: MA Experiment 20000264 PARAMETER Experiment Name: At_Open_Flower_P Parameter: Tissue Value: Open Flower vs. Whole Plant
  misc_feature: MA Experiment ID: 20000265 Result: Down-regulated in Transcription
  misc_feature: MA Experiment 20000265 PARAMETER Experiment Name: At_Open_Flower_P Parameter: Age (day) Value: 21
  misc_feature: MA Experiment 20000265 PARAMETER Experiment Name: At_Open_Flower_P Parameter: Plant Line Value: WS
  misc_feature: MA Experiment 20000265 PARAMETER Experiment Name: At_Open_Flower_P Parameter: Tissue Value: Closed Flower vs. Whole Plant
  misc_feature: MA Experiment ID: 20000286 Result: Down-regulated in Transcription
  misc_feature: MA Experiment 20000286 PARAMETER Experiment Name: At_Open_Flower_P Parameter: Age (day) Value: 21
  misc_feature: MA Experiment 20000286 PARAMETER Experiment Name: At_Open_Flower_P Parameter: Plant Line Value: WS
  misc_feature: MA Experiment 20000286 PARAMETER Experiment Name: At_Open_Flower_P Parameter: Tissue Value: Half Open vs. Whole Plant
  misc_feature: MA Experiment ID: 20001904 Result: Up-regulated in Transcription
  misc_feature: MA Experiment 20001904 PARAMETER Experiment Name: At_Drought_Reproduction_P Parameter: Age (day) Value: 37
  misc_feature: MA Experiment 20001904 PARAMETER Experiment Name: At_Drought_Reproduction_P Parameter: Organism Value: A. thaliana
  misc_feature: MA Experiment 20001904 PARAMETER Experiment Name: At_Drought_Reproduction_P Parameter: Plant Line Value: WS
  misc_feature: MA Experiment 20001904 PARAMETER Experiment Name: At_Drought_Reproduction_P Parameter: Timepoint (day) Value: 7
  misc_feature: MA Experiment 20001904 PARAMETER Experiment Name: At_Drought_Reproduction_P Parameter: Tissue Value: Rosettes
  misc_feature: MA Experiment 20001904 PARAMETER Experiment Name: At_Drought_Reproduction_P Parameter: Treatment Value: Drought vs. No Drought
atgaatgaggaagaagataaagatcaagatcgagtaacgagaggatgtagtcacactcatagctgtaaccctccaggcccagaggatgcttctcactcccacacatgcttccacgctcacactcatctcatcatctctcaggatcagcaagagaatgatcattctgacagtagcaacaagaaacggttatgtggtaatagagaggcagtgaggaagtacagggagaagaagaaggctcgcactgcataccttgaagatgaagtgatgagattgcaatctctgaatgagcaattccttagaaaacttcagagccaagaaatggtggaaactgaattgatcagactccgggctcttctggtagagatgcaggggaaaattgaagttgaactttgtagtttctcgtttcagaaacaatgcaacggttctggttttgtgttcaaagaaggtgatttctcctactatttggtttactag

SEQ ID NO: 96555 - protein, 157 aa, Arabidopsis thaliana
  peptide (1)..(157): Ceres Seq. ID no. 12733786
  misc_feature (60)..(121): Pfam Name: bZIP transcription factor Pfam Description: bZIP transcription factor
  misc_feature (1)..(157): Homolog of NCBI NO: 11357780 NR Description: hypothetical protein F4F15.70 - Arabidopsis >gi|4678925|emb|CAB41316.1| putative protein [Arabidopsis
  misc_feature (1)..(148): Homolog of NCBI NO: 30693563 NR Description: bZIP family transcription factor [Arabidopsis
  misc_feature (1)..(148): Homolog of NCBI NO: 30693560 NR Description: bZIP family transcription factor [Arabidopsis >gi|26450338|dbj|BAC42285.1| putative bZip transcription factor
  misc_feature (11)..(137): Homolog of NCBI NO: 25370607 NR Description: hypothetical protein At2g16770 [imported] - thaliana >gi|4581120|gb|AAD24610.1| hypothetical protein
  misc_feature (11)..(137): Homolog of NCBI NO: 30679757 NR Description: bZIP protein [Arabidopsis thaliana] putative bzip transcription factor atbzip23 [Arabidopsis
  misc_feature (16)..(137): Homolog of NCBI NO: 21554283 NR Description: putative transcription factor [Arabidopsis
  misc_feature (16)..(137): Homolog of NCBI NO: 7486791 NR Description: hypothetical protein M4E13.100 - Arabidopsis >gi|2924515|emb|CAA17769.1| putative protein [Arabidopsis >gi|7270455|emb|CAB80221.1| putative protein [Arabidopsis
  misc_feature (16)..(137): Homolog of NCBI NO: 18418563 NR Description: bZIP protein; protein id: At4g35040.1, supported cDNA: 21838., supported by cDNA: gi_18252902 [Arabidopsis >gi|18252903|gb|AAL62378.1| putative protein [Arabidopsis
  misc_feature (5)..(153): Homolog of NCBI NO: 18855044 NR Description: putative transcription factor [Oryza sativa]
  misc_feature (51)..(142): Homolog of NCBI NO: 34908964 NR Description: P0003D09.19 [Oryza sativa (japonica
MNEEEDKDQDRVTRGCSHTHSCNPPGPEDASHSHTCFHAHTHLIISQDQQENDHSDSSNKKRLCGNREAVRKYREKKKARTAYLEDEVMRLQSLNEQFLRKLQSQEMVETELIRLRALLVEMQGKIEVELCSFSFQKQCNGSGFVFKEGDFSYYLVY

SEQ ID NO: 96556 - DNA, 1038 bp, Arabidopsis thaliana
  misc_feature (1)..(1038): Ceres Seq. ID no. 12733787
  misc_feature: MA Experiment ID: 20000171 Result: Up-regulated in Transcription
  misc_feature: MA Experiment 20000171 PARAMETER Experiment Name: At_42deg_Heat_P Parameter: Age (day) Value: 14
  misc_feature: MA Experiment 20000171 PARAMETER Experiment Name: At_42deg_Heat_P Parameter: Organism Value: A. thaliana
  misc_feature: MA Experiment 20000171 PARAMETER Experiment Name: At_42deg_Heat_P Parameter: Plant Line Value: WS
  misc_feature: MA Experiment 20000171 PARAMETER Experiment Name: At_42deg_Heat_P Parameter: Temperature (deg C) Value: 42 vs. 22
  misc_feature: MA Experiment 20000171 PARAMETER Experiment Name: At_42deg_Heat_P Parameter: Timepoint (hr) Value: 1
  misc_feature: MA Experiment 20000171 PARAMETER Experiment Name: At_42deg_Heat_P Parameter: Tissue Value: Aerial
  misc_feature: MA Experiment ID: 20000180 Result: Up-regulated in Transcription
  misc_feature: MA Experiment 20000180 PARAMETER Experiment Name: At_Germinating_Seeds_P Parameter: Age (hr) Value: 24 vs. 0
  misc_feature: MA Experiment 20000180 PARAMETER Experiment Name: At_Germinating_Seeds_P Parameter: Tissue Value: Germinating Seeds
  misc_feature: MA Experiment ID: 20001247 Result: Up-regulated in Transcription
  misc_feature: MA Experiment 20001247 PARAMETER Experiment Name: At_Far-red-induction_P Parameter: Age (day) Value: 7
  misc_feature: MA Experiment 20001247 PARAMETER Experiment Name: At_Far-red-induction_P Parameter: Light Value: Far-red vs. White
  misc_feature: MA Experiment 20001247 PARAMETER Experiment Name: At_Far-red-induction_P Parameter: Organism Value: A. thaliana
  misc_feature: MA Experiment 20001247 PARAMETER Experiment Name: At_Far-red-induction_P Parameter: Plant Line Value: Columbia
  misc_feature: MA Experiment 20001247 PARAMETER Experiment Name: At_Far-red-induction_P Parameter: Timepoint (hr) Value: 1
  misc_feature: MA Experiment 20001247 PARAMETER Experiment Name: At_Far-red-induction_P Parameter: Tissue Value: Whole Plant
  misc_feature: MA Experiment ID: 20001905 Result: Up-regulated in Transcription
  misc_feature: MA Experiment 20001905 PARAMETER Experiment Name: At_Drought_Reproduction_P Parameter: Age (day) Value: 40
  misc_feature: MA Experiment 20001905 PARAMETER Experiment Name: At_Drought_Reproduction_P Parameter: Organism Value: A. thaliana
  misc_feature: MA Experiment 20001905 PARAMETER Experiment Name: At_Drought_Reproduction_P Parameter: Plant Line Value: WS
  misc_feature: MA Experiment 20001905 PARAMETER Experiment Name: At_Drought_Reproduction_P Parameter: Timepoint (day) Value: 10
  misc_feature: MA Experiment 20001905 PARAMETER Experiment Name: At_Drought_Reproduction_P Parameter: Tissue Value: Rosettes
  misc_feature: MA Experiment 20001905 PARAMETER Experiment Name: At_Drought_Reproduction_P Parameter: Treatment Value: Drought vs. No Drought
atggcgagtttcatcaaggcatggggtttagtgatcatctcactgtgttacacttttttcattgccaaattggttccaaaaggaatcaaaaggctcatactatttttccctgtcttcctcattttcttcatagtacctttcttgatatattccttacatttactcggcatcacggctttcttcatcgcttggctagcaaatttcaagctcttattatttgcattagggcgcggtcctctctcttcaaaccataaacccctatctctccctattttcttagctgtctcttgcttgcccatcaagattcagctgagcccaaaacctacaaaaactcactcccatgaaggatccacagagggtcctttgatttataccataaaggcagtttttgtggttctcatcatcaaagcctacgaatacagtaccaaattgcctgagaaagtcgtgctgactctctacgcgatccacatatatttcgcccttgagatcatccttgccgccacagctgctgcggttcgagccatgtcggatcttgagctcgagccacagttcaacaagccgtacctagcgacatcacttcaagatttctgggggagacgatggaacctgatggtcactggaatcttacggccaaccgtgtacgaaccgtcacttcaactgttctcggttttgggcccgaactattcccagattcttgcagctttcgggacgtttgttgtctctgggataatgcacgagctcatcttcttctacatgggacggttgaggccagactggaagatgatgtggttcttcctcataaatggattttgcacgaccgtggagatcgccatcaagaaaaccattaacggtaggtggagattcccgaaagcaatcagtcaggttttgacactcacttttgtgatggtgacggcattgtggctgttcttgcccgaatttaatcggtgcaacatagttgagaaggctcttgatgagtacgcagccataggcgcatttgcagtcgaggtcaggaggaaactgaccgcatatcttttttaa

SEQ ID NO: 96557 - protein, 345 aa, Arabidopsis thaliana
  peptide (1)..(345): Ceres Seq. ID no. 12733788
  misc_feature (20)..(315): Pfam Name: MBOAT family Pfam Description: MBOAT family
  misc_feature (1)..(345): Homolog of NCBI NO: 15231093 NR Description: wax synthase-like protein; protein id: At3g51970.1
  misc_feature (1)..(344): Homolog of NCBI NO: 27728716 NR Description: wax synthase isoform 2 [Vitis vinifera]
  misc_feature (1)..(344): Homolog of NCBI NO: 27728714 NR Description: wax synthase isoform 1 [Vitis vinifera]
  misc_feature (1)..(326): Homolog of NCBI NO: 11362836 NR Description: wax synthase [imported] - Simmondsia chinensis
  misc_feature (3)..(325): Homolog of NCBI NO: 15240500 NR Description: wax synthase-like protein; protein id:
  misc_feature (1)..(332): Homolog of NCBI NO: 15240496 NR Description: putative protein; protein id: At5g55340.1, by cDNA: 115917. [Arabidopsis thaliana] contains similarity to wax synthase~gene_id:MTE17.5 [Arabidopsis
  misc_feature (1)..(330): Homolog of NCBI NO: 15240497 NR Description: wax synthase-like protein; protein id: At5g55350.1
  misc_feature (5)..(325): Homolog of NCBI NO: 27728718 NR Description: wax synthase isoform 3 [Vitis vinifera]
  misc_feature (1)..(344): Homolog of NCBI NO: 8778260 NR Description: F12K21.17 [Arabidopsis thaliana]
  misc_feature (1)..(325): Homolog of NCBI NO: 15240498 NR Description: wax synthase-like protein; protein id: At5g55360.1
MASFIKAWGLVIISLCYTFFIAKLVPKGIKRLILFFPVFLIFFIVPFLIYSLHLLGITAFFIAWLANFKLLLFALGRGPLSSNHKPLSLPIFLAVSCLPIKIQLSPKPTKTHSHEGSTEGPLIYTIKAVFVVLIIKAYEYSTKLPEKVVLTLYAIHIYFALEIILAATAAAVRAMSDLELEPQFNKPYLATSLQDFWGRRWNLMVTGILRPTVYEPSLQLFSVLGPNYSQILAAFGTFVVSGIMHELIFFYMGRLRPDWKMMWFFLINGFCTTVEIAIKKTINGRWRFPKAISQVLTLTFVMVTALWLFLPEFNRCNIVEKALDEYAAIGAFAVEVRRKLTAYLF

SEQ ID NO: 96558 - DNA, 783 bp, Arabidopsis thaliana
  misc_feature (1)..(783): Ceres Seq. ID no. 12733807
  misc_feature: MA Experiment ID: 20000180 Result: Up-regulated in Transcription
  misc_feature: MA Experiment 20000180 PARAMETER Experiment Name: At_Germinating_Seeds_P Parameter: Age (hr) Value: 24 vs. 0
  misc_feature: MA Experiment 20000180 PARAMETER Experiment Name: At_Germinating_Seeds_P Parameter: Tissue Value: Germinating Seeds
  misc_feature: MA Experiment ID: 20000185 Result: Down-regulated in Transcription
  misc_feature: MA Experiment 20000185 PARAMETER Experiment Name: At_Roots__P Parameter: Age (day) Value: 7 vs. 21
  misc_feature: MA Experiment 20000185 PARAMETER Experiment Name: At_Roots__P Parameter: Organism Value: A. thaliana
  misc_feature: MA Experiment 20000185 PARAMETER Experiment Name: At_Roots__P Parameter: Tissue Value: Roots vs. Whole Plant
  misc_feature: MA Experiment ID: 20000234 Result: Up-regulated in Transcription
  misc_feature: MA Experiment 20000234 PARAMETER Experiment Name: At_Siliques_P Parameter: Age (day) Value: 21
  misc_feature: MA Experiment 20000234 PARAMETER Experiment Name: At_Siliques_P Parameter: Organism Value: A. thaliana
  misc_feature: MA Experiment 20000234 PARAMETER Experiment Name: At_Siliques_P Parameter: Plant Line Value: WS
  misc_feature: MA Experiment 20000234 PARAMETER Experiment Name: At_Siliques_P Parameter: Tissue Value: Less Than 5mm Siliques vs. Whole Plant
  misc_feature: MA Experiment ID: 20000436 Result: Down-regulated in Transcription
  misc_feature: MA Experiment 20000436 PARAMETER Experiment Name: At_Drought_P Parameter: Age (day) Value: 7
  misc_feature: MA Experiment 20000436 PARAMETER Experiment Name: At_Drought_P Parameter: Organism Value: A. thaliana
  misc_feature: MA Experiment 20000436 PARAMETER Experiment Name: At_Drought_P Parameter: Plant Line Value: WS
  misc_feature: MA Experiment 20000436 PARAMETER Experiment Name: At_Drought_P Parameter: Timepoint (hr) Value: 12
  misc_feature: MA Experiment 20000436 PARAMETER Experiment Name: At_Drought_P Parameter: Tissue Value: Whole Plant
  misc_feature: MA Experiment 20000436 PARAMETER Experiment Name: At_Drought_P Parameter: Treatment Value: Drought vs. No Drought
  misc_feature: MA Experiment ID: 20000437 Result: Down-regulated in Transcription
  misc_feature: MA Experiment 20000437 PARAMETER Experiment Name: At_Drought_P Parameter: Age (day) Value: 8
  misc_feature: MA Experiment 20000437 PARAMETER Experiment Name: At_Drought_P Parameter: Organism Value: A. thaliana
  misc_feature: MA Experiment 20000437 PARAMETER Experiment Name: At_Drought_P Parameter: Plant Line Value: WS
  misc_feature: MA Experiment 20000437 PARAMETER Experiment Name: At_Drought_P Parameter: Timepoint (hr) Value: 24
  misc_feature: MA Experiment 20000437 PARAMETER Experiment Name: At_Drought_P Parameter: Tissue Value: Whole Plant
  misc_feature: MA Experiment 20000437 PARAMETER Experiment Name: At_Drought_P Parameter: Treatment Value: Drought vs. No Drought
  misc_feature: MA Experiment ID: 20000438 Result: Up-regulated in Transcription
  misc_feature: MA Experiment 20000438 PARAMETER Experiment Name: At_Shoots__P Parameter: Age (day) Value: 14
  misc_feature: MA Experiment 20000438 PARAMETER Experiment Name: At_Shoots__P Parameter: Tissue Value: Shoots vs. Whole Plant
  misc_feature: MA Experiment ID: 20000439 Result: Down-regulated in Transcription
  misc_feature: MA Experiment 20000439 PARAMETER Experiment Name: At_Roots__P Parameter: Age (day) Value: 14 vs. 21
  misc_feature: MA Experiment 20000439 PARAMETER Experiment Name: At_Roots__P Parameter: Organism Value: A. thaliana
  misc_feature: MA Experiment 20000439 PARAMETER Experiment Name: At_Roots__P Parameter: Tissue Value: Roots vs. Whole Plant
  misc_feature: MA Experiment ID: 20000794 Result: Down-regulated in Transcription
  misc_feature: MA Experiment 20000794 PARAMETER Experiment Name: At_Petals_P Parameter: Age (day) Value: 23-25 days
  misc_feature: MA Experiment 20000794 PARAMETER Experiment Name: At_Petals_P Parameter: Plant Line Value: WS
  misc_feature: MA Experiment 20000794 PARAMETER Experiment Name: At_Petals_P Parameter: Tissue Value: Petals vs. Whole plant
  misc_feature: MA Experiment ID: 20001450 Result: Down-regulated in Transcription
  misc_feature: MA Experiment 20001450 PARAMETER Experiment Name: At_Far-red-induction_P Parameter: Age (day) Value: 7
  misc_feature: MA Experiment 20001450 PARAMETER Experiment Name: At_Far-red-induction_P Parameter: Light Value: Far-red vs. White
  misc_feature: MA Experiment 20001450 PARAMETER Experiment Name: At_Far-red-induction_P Parameter: Organism Value: A. thaliana
  misc_feature: MA Experiment 20001450 PARAMETER Experiment Name: At_Far-red-induction_P Parameter: Plant Line Value: Columbia
  misc_feature: MA Experiment 20001450 PARAMETER Experiment Name: At_Far-red-induction_P Parameter: Timepoint (hr) Value: 8
  misc_feature: MA Experiment 20001450 PARAMETER Experiment Name: At_Far-red-induction_P Parameter: Tissue Value: Whole Plant
  misc_feature: MA Experiment ID: 20001757 Result: Up-regulated in Transcription
  misc_feature: MA Experiment 20001757 PARAMETER Experiment Name: At_50mM_NH4NO3_L-to-H_P Parameter: Timepoint (hr) Value: 6
  misc_feature: MA Experiment 20001757 PARAMETER Experiment Name: At_50mM_NH4NO3_L-to-H_P Parameter: Tissue Value: Leaf
  misc_feature: MA Experiment 20001757 PARAMETER Experiment Name: At_50mM_NH4NO3_L-to-H_P Parameter: Treatment Value: 50mM NH4NO3 vs 100mM Mannitol
  misc_feature: MA Experiment ID: 20001905 Result: Down-regulated in Transcription
  misc_feature: MA Experiment 20001905 PARAMETER Experiment Name: At_Drought_Reproduction_P Parameter: Age (day) Value: 40
  misc_feature: MA Experiment 20001905 PARAMETER Experiment Name: At_Drought_Reproduction_P Parameter: Organism Value: A. thaliana
  misc_feature: MA Experiment 20001905 PARAMETER Experiment Name: At_Drought_Reproduction_P Parameter: Plant Line Value: WS
  misc_feature: MA Experiment 20001905 PARAMETER Experiment Name: At_Drought_Reproduction_P Parameter: Timepoint (day) Value: 10
  misc_feature: MA Experiment 20001905 PARAMETER Experiment Name: At_Drought_Reproduction_P Parameter: Tissue Value: Rosettes
  misc_feature: MA Experiment 20001905 PARAMETER Experiment Name: At_Drought_Reproduction_P Parameter: Treatment Value: Drought vs. No Drought
  misc_feature: MA Experiment ID: 20001906 Result: Down-regulated in Transcription
  misc_feature: MA Experiment 20001906 PARAMETER Experiment Name: At_Drought_Reproduction_P Parameter: Age (day) Value: 35
  misc_feature: MA Experiment 20001906 PARAMETER Experiment Name: At_Drought_Reproduction_P Parameter: Organism Value: A. thaliana
  misc_feature: MA Experiment 20001906 PARAMETER Experiment Name: At_Drought_Reproduction_P Parameter: Plant Line Value: WS
  misc_feature: MA Experiment 20001906 PARAMETER Experiment Name: At_Drought_Reproduction_P Parameter: Timepoint (day) Value: 5
  misc_feature: MA Experiment 20001906 PARAMETER Experiment Name: At_Drought_Reproduction_P Parameter: Tissue Value: Siliques
  misc_feature: MA Experiment 20001906 PARAMETER Experiment Name: At_Drought_Reproduction_P Parameter: Treatment Value: Drought vs. No Drought
  misc_feature: MA Experiment ID: 20001911 Result: Down-regulated in Transcription
  misc_feature: MA Experiment 20001911 PARAMETER Experiment Name: At_Drought_Reproduction_P Parameter: Age (day) Value: 40
  misc_feature: MA Experiment 20001911 PARAMETER Experiment Name: At_Drought_Reproduction_P Parameter: Organism Value: A. thaliana
  misc_feature: MA Experiment 20001911 PARAMETER Experiment Name: At_Drought_Reproduction_P Parameter: Plant Line Value: WS
  misc_feature: MA Experiment 20001911 PARAMETER Experiment Name: At_Drought_Reproduction_P Parameter: Timepoint (day) Value: 10
  misc_feature: MA Experiment 20001911 PARAMETER Experiment Name: At_Drought_Reproduction_P Parameter: Tissue Value: Flowers
  misc_feature: MA Experiment 20001911 PARAMETER Experiment Name: At_Drought_Reproduction_P Parameter: Treatment Value: Drought vs. No Drought
atggcgactttcctaacaaatgttgtttcaatcaaacctacaatcttctcattccagtccgaatccttcactcctttgcatacacgggtcaatgtattctcctcgaaaccctttccttctctcgctggaactttctcccggagctctagaacgagattcattccttatgctgtaacggagacggaagaaaaacccgccgctttggaccctagttcagaagctgccaggcgtgtgtatatcggtaacatacccaggacggtgaccaatgagcagctcactaaacttgttgaagaacacggtgctgttgaaaaagttcaggtgatgtatgataagtattcaggaagaagccgtcgatttgggtttgctacaatgaaatcagttgaagatgctaatgctgtggttgagaaattgaatggcaatagcttgtttttggtttctcagaccgttgaagggcgtgagataaaggttaacattacagagaaacctatagcatcatcacctgatttatcagttcttcagtctgaggattcagcatttgtagatagcccttacaaagtgtatgttgggaatctagcaaagactgttacaaaagagatgcttgagaatttgttttctgagaaagggaaagtagtaagtgctaaggtttcaagagtacctggaacttccaaatccaccgggtttggattcgttacgttttcttctgaagaagatgtggaagcagccattgttgctcttaacaattcgttgctggaaggacagaagattcgggtgaataaggcttag

SEQ ID NO: 96559 - protein, 260 aa, Arabidopsis thaliana
  peptide (1)..(260): Ceres Seq. ID no. 12733808
  misc_feature (78)..(156): Pfam Name: RNA recognition motif. (a.k.a. RRM, RBD, or RNP domain) Pfam Description: RNA recognition motif. (a.k.a. RRM, RBD, or RNP
  misc_feature (1)..(257): Homolog of NCBI NO: 11357772 NR Description: hypothetical protein F4F15.260 - Arabidopsis >gi|4678944|emb|CAB41335.1| putative protein [Arabidopsis
  misc_feature (1)..(260): Homolog of NCBI NO: 30693595 NR Description: RNA recognition motif (RRM)-containing protein thaliana] >gi|17979394|gb|AAL49922.1| unknown protein thaliana] >gi|22136722|gb|AAM91680.1| unknown protein
  misc_feature (10)..(260): Homolog of NCBI NO: 7578881 NR Description: plastid-specific ribosomal protein 2 precursor
  misc_feature (151)..(260): Homolog of NCBI NO: 1076509 NR Description: RNA-binding protein RNP1 precursor - kidney bean
  misc_feature (60)..(167): Homolog of NCBI NO: 1076509 NR Description: RNA-binding protein RNP1 precursor - kidney bean
  misc_feature (2)..(260): Homolog of NCBI NO: 18921322 NR Description: putative ribonucleoprotein [Oryza sativa]
  misc_feature (60)..(260): Homolog of NCBI NO: 15231200 NR Description: chloroplast RNA-binding protein cp33; protein id: supported by cDNA: 14246., supported by cDNA: gi_14517543, by cDNA: gi_17064757, supported by cDNA: gi_18700225 protein cp33
  misc_feature (60)..(260): Homolog of NCBI NO: 17064758 NR Description: ubiquitin / ribosomal protein CEP52 [Arabidopsis
  misc_feature (151)..(260): Homolog of NCBI NO: 7446361 NR Description: RNA-binding protein - fava bean (fragment)
  misc_feature (77)..(164): Homolog of NCBI NO: 7446361 NR Description: RNA-binding protein - fava bean (fragment)
MATFLTNVVSIKPTIFSFQSESFTPLHTRVNVFSSKPFPSLAGTFSRSSRTRFIPYAVTETEEKPAALDPSSEAARRVYIGNIPRTVTNEQLTKLVEEHGAVEKVQVMYDKYSGRSRRFGFATMKSVEDANAVVEKLNGNSLFLVSQTVEGREIKVNITEKPIASSPDLSVLQSEDSAFVDSPYKVYVGNLAKTVTKEMLENLFSEKGKVVSAKVSRVPGTSKSTGFGFVTFSSEEDVEAAIVALNNSLLEGQKIRVNKA

SEQ ID NO: 96560 - protein, 153 aa, Arabidopsis thaliana
  peptide (1)..(153): Ceres Seq. ID no. 12733809
  misc_feature (79)..(150): Pfam Name: RNA recognition motif. (a.k.a. RRM, RBD, or RNP domain) Pfam Description: RNA recognition motif. (a.k.a. RRM, RBD, or RNP
  misc_feature (1)..(150): Homolog of NCBI NO: 11357772 NR Description: hypothetical protein F4F15.260 - Arabidopsis >gi|4678944|emb|CAB41335.1| putative protein [Arabidopsis
  misc_feature (1)..(153): Homolog of NCBI NO: 30693595 NR Description: RNA recognition motif (RRM)-containing protein thaliana] >gi|17979394|gb|AAL49922.1| unknown protein thaliana] >gi|22136722|gb|AAM91680.1| unknown protein
  misc_feature (1)..(153): Homolog of NCBI NO: 7578881 NR Description: plastid-specific ribosomal protein 2 precursor
  misc_feature (44)..(153): Homolog of NCBI NO: 1076509 NR Description: RNA-binding protein RNP1 precursor - kidney bean
  misc_feature (1)..(60): Homolog of NCBI NO: 1076509 NR Description: RNA-binding protein RNP1 precursor - kidney bean
  misc_feature (1)..(153): Homolog of NCBI NO: 18921322 NR Description: putative ribonucleoprotein [Oryza sativa]
  misc_feature (1)..(153): Homolog of NCBI NO: 15231200 NR Description: chloroplast RNA-binding protein cp33; protein id: supported by cDNA: 14246., supported by cDNA: gi_14517543, by cDNA: gi_17064757, supported by cDNA: gi_18700225 protein cp33
  misc_feature (1)..(153): Homolog of NCBI NO: 17064758 NR Description: ubiquitin / ribosomal protein CEP52 [Arabidopsis
  misc_feature (44)..(153): Homolog of NCBI NO: 7446361 NR Description: RNA-binding protein - fava bean (fragment)
  misc_feature (1)..(57): Homolog of NCBI NO: 7446361 NR Description: RNA-binding protein - fava bean (fragment)
MYDKYSGRSRRFGFATMKSVEDANAVVEKLNGNSLFLVSQTVEGREIKVNITEKPIASSPDLSVLQSEDSAFVDSPYKVYVGNLAKTVTKEMLENLFSEKGKVVSAKVSRVPGTSKSTGFGFVTFSSEEDVEAAIVALNNSLLEGQKIRVNKA

SEQ ID NO: 96561 - protein, 137 aa, Arabidopsis thaliana
  peptide (1)..(137): Ceres Seq. ID no. 12733810
  misc_feature (63)..(134): Pfam Name: RNA recognition motif. (a.k.a. RRM, RBD, or RNP domain) Pfam Description: RNA recognition motif. (a.k.a. RRM, RBD, or RNP
  misc_feature (1)..(134): Homolog of NCBI NO: 11357772 NR Description: hypothetical protein F4F15.260 - Arabidopsis >gi|4678944|emb|CAB41335.1| putative protein [Arabidopsis
  misc_feature (1)..(137): Homolog of NCBI NO: 30693595 NR Description: RNA recognition motif (RRM)-containing protein thaliana] >gi|17979394|gb|AAL49922.1| unknown protein thaliana] >gi|22136722|gb|AAM91680.1| unknown protein
  misc_feature (1)..(137): Homolog of NCBI NO: 7578881 NR Description: plastid-specific ribosomal protein 2 precursor
  misc_feature (28)..(137): Homolog of NCBI NO: 1076509 NR Description: RNA-binding protein RNP1 precursor - kidney bean
  misc_feature (1)..(44): Homolog of NCBI NO: 1076509 NR Description: RNA-binding protein RNP1 precursor - kidney bean
  misc_feature (1)..(137): Homolog of NCBI NO: 18921322 NR Description: putative ribonucleoprotein [Oryza sativa]
  misc_feature (1)..(137): Homolog of NCBI NO: 15231200 NR Description: chloroplast RNA-binding protein cp33; protein id: supported by cDNA: 14246., supported by cDNA: gi_14517543, by cDNA: gi_17064757, supported by cDNA: gi_18700225 protein cp33
  misc_feature (1)..(137): Homolog of NCBI NO: 17064758 NR Description: ubiquitin / ribosomal protein CEP52 [Arabidopsis
  misc_feature (28)..(137): Homolog of NCBI NO: 7446361 NR Description: RNA-binding protein - fava bean (fragment)
  misc_feature (1)..(41): Homolog of NCBI NO: 7446361 NR Description: RNA-binding protein - fava bean (fragment)
MKSVEDANAVVEKLNGNSLFLVSQTVEGREIKVNITEKPIASSPDLSVLQSEDSAFVDSPYKVYVGNLAKTVTKEMLENLFSEKGKVVSAKVSRVPGTSKSTGFGFVTFSSEEDVEAAIVALNNSLLEGQKIRVNKA

SEQ ID NO: 96562 - DNA, 828 bp, Arabidopsis thaliana
  misc_feature (1)..(828): Ceres Seq. ID no. 12733811
  misc_feature: MA Experiment ID: 20000180 Result: Up-regulated in Transcription
  misc_feature: MA Experiment 20000180 PARAMETER Experiment Name: At_Germinating_Seeds_P Parameter: Age (hr) Value: 24 vs. 0
  misc_feature: MA Experiment 20000180 PARAMETER Experiment Name: At_Germinating_Seeds_P Parameter: Tissue Value: Germinating Seeds
  misc_feature: MA Experiment ID: 20000185 Result: Down-regulated in Transcription
  misc_feature: MA Experiment 20000185 PARAMETER Experiment Name: At_Roots__P Parameter: Age (day) Value: 7 vs. 21
  misc_feature: MA Experiment 20000185 PARAMETER Experiment Name: At_Roots__P Parameter: Organism Value: A. thaliana
  misc_feature: MA Experiment 20000185 PARAMETER Experiment Name: At_Roots__P Parameter: Tissue Value: Roots vs. Whole Plant
  misc_feature: MA Experiment ID: 20000439 Result: Down-regulated in Transcription
  misc_feature: MA Experiment 20000439 PARAMETER Experiment Name: At_Roots__P Parameter: Age (day) Value: 14 vs. 21
  misc_feature: MA Experiment 20000439 PARAMETER Experiment Name: At_Roots__P Parameter: Organism Value: A. thaliana
  misc_feature: MA Experiment 20000439 PARAMETER Experiment Name: At_Roots__P Parameter: Tissue Value: Roots vs. Whole Plant
  misc_feature: MA Experiment ID: 20001905 Result: Down-regulated in Transcription
  misc_feature: MA Experiment 20001905 PARAMETER Experiment Name: At_Drought_Reproduction_P Parameter: Age (day) Value: 40
  misc_feature: MA Experiment 20001905 PARAMETER Experiment Name: At_Drought_Reproduction_P Parameter: Organism Value: A. thaliana
  misc_feature: MA Experiment 20001905 PARAMETER Experiment Name: At_Drought_Reproduction_P Parameter: Plant Line Value: WS
  misc_feature: MA Experiment 20001905 PARAMETER Experiment Name: At_Drought_Reproduction_P Parameter: Timepoint (day) Value: 10
  misc_feature: MA Experiment 20001905 PARAMETER Experiment Name: At_Drought_Reproduction_P Parameter: Tissue Value: Rosettes
  misc_feature: MA Experiment 20001905 PARAMETER Experiment Name: At_Drought_Reproduction_P Parameter: Treatment Value: Drought vs. No Drought
agaaataaagaaattacctttctttaactaaaaatcaagccagagatgcttagcttgcagtgtcttcctcctttcttcatctccgtcccaaatcggagcaccaattcttgctccacggctccacttcgtgcggtcagtgacttcgctgcttctccgtcgacctcaatctctcgccgtcttatccttctccgtcacgctcacagttcctgggatgatctttccctcagagaccatgatcgtcctctaagtaaaaccggagaagcagatgctgccaaagtagctcaaatcctctcctcactcggttggcttccccaacttattctctcaagcgacgccactcggactagagagacactgaagtcgatgcaggctcaagtagatgggtttatggaggcaaatgtacatttcattcctagcttttactccattgctgctatggatggccaaacagccgagcatcttcaaaacattatctccaaatattcaacccctgatatctccactatcatgtgtatggggcataataagggttgggaagaagcagcttccatgctctctggagcttctattaagttgaaaacatgcaatgctgctttgcttcaggcttttggcaactcctgggaagaagcttttgcgctgtccgggcctggtggatggaaacttgagggtctagtggctccagatagtagcatctttgtgtaagagaatggaacattacaaagcttcaatttttagctttttccatggttgcaacttttgctcctacagtatgtcattcttcaacttcatgtctgttgcataatatatataaaaaggttgcaacgtctc

SEQ ID NO: 96563 - protein, 218 aa, Arabidopsis thaliana
  peptide (1)..(218): Ceres Seq. ID no. 12733812
  misc_feature (43)..(172): Pfam Name: Phosphoglycerate mutase family Pfam Description: Phosphoglycerate mutase family
  misc_feature (1)..(218): Homolog of NCBI NO: 18409499 NR Description: Expressed protein; protein id: At3g52155.1, by cDNA: gi_14517465 [Arabidopsis thaliana] AT3g52150/F4F15_260 [Arabidopsis thaliana]
  misc_feature (62)..(218): Homolog of NCBI NO: 11357772 NR Description: hypothetical protein F4F15.260 - Arabidopsis >gi|4678944|emb|CAB41335.1| putative protein [Arabidopsis
  misc_feature (3)..(200): Homolog of NCBI NO: 11357772 NR Description: hypothetical protein F4F15.260 - Arabidopsis >gi|4678944|emb|CAB41335.1| putative protein [Arabidopsis
  misc_feature (41)..(201): Homolog of NCBI NO: 22959081 NR Description: hypothetical protein [Rhodobacter sphaeroides]
  misc_feature (43)..(178): Homolog of NCBI NO: 13476591 NR Description: hypothetical protein [Mesorhizobium loti]
  misc_feature (43)..(183): Homolog of NCBI NO: 22961147 NR Description: hypothetical protein [Rhodopseudomonas palustris]
  misc_feature (34)..(212): Homolog of NCBI NO: 29833593 NR Description: hypothetical protein [Streptomyces avermitilis
  misc_feature (44)..(191): Homolog of NCBI NO: 13470938 NR Description: hypothetical protein [Mesorhizobium loti]
  misc_feature (43)..(200): Homolog of NCBI NO: 23012693 NR Description: hypothetical protein [Magnetospirillum
  misc_feature (41)..(192): Homolog of NCBI NO: 23136095 NR Description: hypothetical protein [Cytophaga hutchinsonii]
MLSLQCLPPFFISVPNRSTNSCSTAPLRAVSDFAASPSTSISRRLILLRHAHSSWDDLSLRDHDRPLSKTGEADAAKVAQILSSLGWLPQLILSSDATRTRETLKSMQAQVDGFMEANVHFIPSFYSIAAMDGQTAEHLQNIISKYSTPDISTIMCMGHNKGWEEAASMLSGASIKLKTCNAALLQAFGNSWEEAFALSGPGGWKLEGLVAPDSSIFV

SEQ ID NO: 96564 - protein, 112 aa, Arabidopsis thaliana
  peptide (1)..(112): Ceres Seq. ID no. 12733813
  misc_feature (1)..(66): Pfam Name: Phosphoglycerate mutase family Pfam Description: Phosphoglycerate mutase family
  misc_feature (1)..(112): Homolog of NCBI NO: 18409499 NR Description: Expressed protein; protein id: At3g52155.1, by cDNA: gi_14517465 [Arabidopsis thaliana] AT3g52150/F4F15_260 [Arabidopsis thaliana]
  misc_feature (1)..(112): Homolog of NCBI NO: 11357772 NR Description: hypothetical protein F4F15.260 - Arabidopsis >gi|4678944|emb|CAB41335.1| putative protein [Arabidopsis
  misc_feature (1)..(94): Homolog of NCBI NO: 11357772 NR Description: hypothetical protein F4F15.260 - Arabidopsis >gi|4678944|emb|CAB41335.1| putative protein [Arabidopsis
  misc_feature (1)..(95): Homolog of NCBI NO: 22959081 NR Description: hypothetical protein [Rhodobacter sphaeroides]
  misc_feature (1)..(72): Homolog of NCBI NO: 13476591 NR Description: hypothetical protein [Mesorhizobium loti]
  misc_feature (1)..(77): Homolog of NCBI NO: 22961147 NR Description: hypothetical protein [Rhodopseudomonas palustris]
  misc_feature (1)..(106): Homolog of NCBI NO: 29833593 NR Description: hypothetical protein [Streptomyces avermitilis
  misc_feature (1)..(85): Homolog of NCBI NO: 13470938 NR Description: hypothetical protein [Mesorhizobium loti]
  misc_feature (1)..(94): Homolog of NCBI NO: 23012693 NR Description: hypothetical protein [Magnetospirillum
  misc_feature (1)..(86): Homolog of NCBI NO: 23136095 NR Description: hypothetical protein [Cytophaga hutchinsonii]
MQAQVDGFMEANVHFIPSFYSIAAMDGQTAEHLQNIISKYSTPDISTIMCMGHNKGWEEAASMLSGASIKLKTCNAALLQAFGNSWEEAFALSGPGGWKLEGLVAPDSSIFV

SEQ ID NO: 96565 - DNA, 1764 bp, Arabidopsis thaliana
  misc_feature (1)..(1764): Ceres Seq. ID no. 12733838
  misc_feature: MA Experiment ID: 20000315 Result: Down-regulated in Transcription
  misc_feature: MA Experiment 20000315 PARAMETER Experiment Name: At_14day_Shoots-Roots_Sub_P Parameter: Age (day) Value: 14
  misc_feature: MA Experiment 20000315 PARAMETER Experiment Name: At_14day_Shoots-Roots_Sub_P Parameter: Organism Value: A. thaliana
  misc_feature: MA Experiment 20000315 PARAMETER Experiment Name: At_14day_Shoots-Roots_Sub_P Parameter: Plant Line Value: WS
  misc_feature: MA Experiment 20000315 PARAMETER Experiment Name: At_14day_Shoots-Roots_Sub_P Parameter: Tissue Value: Shoots vs. Whole Plant
  misc_feature: MA Experiment ID: 20000355 Result: Up-regulated in Transcription
  misc_feature: MA Experiment 20000355 PARAMETER Experiment Name: At_Siliques_Sub_P Parameter: Age (day) Value: 21
  misc_feature: MA Experiment 20000355 PARAMETER Experiment Name: At_Siliques_Sub_P Parameter: Organism Value: A. thaliana
  misc_feature: MA Experiment 20000355 PARAMETER Experiment Name: At_Siliques_Sub_P Parameter: Plant Line Value: WS
  misc_feature: MA Experiment 20000355 PARAMETER Experiment Name: At_Siliques_Sub_P Parameter: Tissue Value: Less Than 5mm Siliques vs. Whole Plant
  misc_feature: MA Experiment ID: 20000440 Result: Up-regulated in Transcription
  misc_feature: MA Experiment 20000440 PARAMETER Experiment Name: At_Closed-Flower__Sub_P Parameter: Tissue Value: Closed Flower vs. Whole Plant
atgagtgctccaaagtttggttatgtattactattgattgtattaatcaatattagcaataatggcgtcgatgcatttcacaaagttttcaagaaattgcaatcaaaatcgacatcattggagtcagtaagtcctcttcacagaaccgcttatcactttcaacctccccgccattggatcaacgctccaatgctctacaagggagtttaccatctcttctaccaatacaatcccaaaggtgcggtttggggtaacattgtgtgggctcactcggtttctaaggacttgatcaattgggaagcccttgaaccagccatttacccatccaaatggttcgacatcaacggtacatggtccggttcagctacccacgtaccgggaaaaggaccggttatcctctacaccggtatcaccgagaaccagactcagattcaaaactacgccattccacaagatctttccgacccatacctcaagacatggataaagccagacgataaccccatcgtaaaacccgataatggcgagaacggatccgctttccgtgacccgaccacggcttggttcaacaaaaaagatgggtattggagaatgcttgttggctcaaagagaaagaacagaggaattgcttatatgtacaagagccgtgacttcaaaaaatgggtcaaaagcaaacgtcctatccactcaagaaagaaaaccggtatgtgggaatgtcccgatttcttcccggtatccgtaaccgacaagaaaaacggtttggacttcagctacgacggtccaaacgccaagcatgtgttgaaggttagtttggacttgaccagatacgagtactacactcttggaacgtatgacaccaagaaggatcgttacaggccagacggttacactcctgacggttgggatggtttgagatttgattatggtaactactatgcgtcaaagacattctttgatgacaagacgaacagaagaattctttgggggtgggccaatgaatccgacaccgttcaagatgataccgtgaagggttgggccggaattcagcttatcccaagaacaatcttgcttgactctagcggtaagcaactcgtgttttggcctattgaagagattgagtcattgagaggaaagaatgtccaaatgaccaaccagaaaatggagatgggccaacgctttgaggtccaaggaatcactcctgctcaggtggatgtggatgtgacattcaacgttggaaatctagagaaggccgaaaagtttgacgaaagcttcgcaactaaaccactagagttatgtaacttgaaaggttcgaatgtgaatggtggagttggtccttttggtttgatcacgttggctacatctgacttagaagaatacactcctgttttctttagagtcttcaaagatgccgcatccaacaagcctaaggttctcatgtgctctgacgccaagccttcgagtctcaaaaaagacaccgggactgacgccaaggagaggatgtacaaaccatcgtttgctggttttgtggatgtcggtctccttgacggaaagatctctctaaggagtttgattgatcactcggttgtggagagctttggagcaaaaggaaagacagtgataacatctagagtgtatccgacaaaagcagtaggagaaaaagctcatttgtttgtctttaacaacggctcacaacctgtgaccgtagagagcctcaatgcatggaacatgcagaagcctctgaagatgaaccaaggtgcaaagtga

SEQ ID NO: 96566 - protein, 587 aa, Arabidopsis thaliana
  peptide (1)..(587): Ceres Seq. ID no. 12733839
  misc_feature (52)..(536): Pfam Name: Glycosyl hydrolases family 32 Pfam Description: Glycosyl hydrolases family 32
  misc_feature (9)..(586): Homolog of NCBI NO: 25289548 NR Description: probable beta-fructofuranosidase (invertase)
  misc_feature (9)..(586): Homolog of NCBI NO: 18404067 NR Description: glycosyl hydrolase family 32; protein id: supported by cDNA: 118038., supported by cDNA: gi_18147080
  misc_feature (9)..(586): Homolog of NCBI NO: 21537018 NR Description: putative beta-fructofuranosidase (invertase)
  misc_feature (10)..(583): Homolog of NCBI NO: 2129916 NR Description: beta-fructofuranosidase (EC 3.2.1.26) 1
  misc_feature (10)..(583): Homolog of NCBI NO: 124712 NR Description: BETA-FRUCTOFURANOSIDASE, INSOLUBLE ISOENZYME 1
  misc_feature (8)..(576): Homolog of NCBI NO: 480566 NR Description: beta-fructofuranosidase (EC 3.2.1.26) - potato
  misc_feature (8)..(576): Homolog of NCBI NO: 20805672 NR Description: cell-wall invertase [Lycopersicon esculentum]
  misc_feature (42)..(578): Homolog of NCBI NO: 30024213 NR Description: fructan 1-exohydrolase w1 precursor [Triticum
  misc_feature (48)..(584): Homolog of NCBI NO: 480996 NR Description: beta-fructofuranosidase (EC 3.2.1.26) isozyme I
  misc_feature (48)..(584): Homolog of NCBI NO: 480998 NR Description: beta-fructofuranosidase (EC 3.2.1.26) isozyme I
MSAPKFGYVLLLIVLINISNNGVDAFHKVFKKLQSKSTSLESVSPLHRTAYHFQPPRHWINAPMLYKGVYHLFYQYNPKGAVWGNIVWAHSVSKDLINWEALEPAIYPSKWFDINGTWSGSATHVPGKGPVILYTGITENQTQIQNYAIPQDLSDPYLKTWIKPDDNPIVKPDNGENGSAFRDPTTAWFNKKDGYWRMLVGSKRKNRGIAYMYKSRDFKKWVKSKRPIHSRKKTGMWECPDFFPVSVTDKKNGLDFSYDGPNAKHVLKVSLDLTRYEYYTLGTYDTKKDRYRPDGYTPDGWDGLRFDYGNYYASKTFFDDKTNRRILWGWANESDTVQDDTVKGWAGIQLIPRTILLDSSGKQLVFWPIEEIESLRGKNVQMTNQKMEMGQRFEVQGITPAQVDVDVTFNVGNLEKAEKFDESFATKPLELCNLKGSNVNGGVGPFGLITLATSDLEEYTPVFFRVFKDAASNKPKVLMCSDAKPSSLKKDTGTDAKERMYKPSFAGFVDVGLLDGKISLRSLIDHSVVESFGAKGKTVITSRVYPTKAVGEKAHLFVFNNGSQPVTVESLNAWNMQKPLKMNQGAK

SEQ ID NO: 96567 - protein, 524 aa, Arabidopsis thaliana
  peptide (1)..(524): Ceres Seq. ID no. 12733840
  misc_feature (1)..(473): Pfam Name: Glycosyl hydrolases family 32 Pfam Description: Glycosyl hydrolases family 32
  misc_feature (1)..(523): Homolog of NCBI NO: 25289548 NR Description: probable beta-fructofuranosidase (invertase)
  misc_feature (1)..(523): Homolog of NCBI NO: 18404067 NR Description: glycosyl hydrolase family 32; protein id: supported by cDNA: 118038., supported by cDNA: gi_18147080
  misc_feature (1)..(523): Homolog of NCBI NO: 21537018 NR Description: putative beta-fructofuranosidase (invertase)
  misc_feature (1)..(520): Homolog of NCBI NO: 2129916 NR Description: beta-fructofuranosidase (EC 3.2.1.26) 1
  misc_feature (1)..(520): Homolog of NCBI NO: 124712 NR Description: BETA-FRUCTOFURANOSIDASE, INSOLUBLE ISOENZYME 1
  misc_feature (1)..(513): Homolog of NCBI NO: 480566 NR Description: beta-fructofuranosidase (EC 3.2.1.26) - potato
  misc_feature (1)..(513): Homolog of NCBI NO: 20805672 NR Description: cell-wall invertase [Lycopersicon esculentum]
  misc_feature (1)..(515): Homolog of NCBI NO: 30024213 NR Description: fructan 1-exohydrolase w1 precursor [Triticum
  misc_feature (1)..(521): Homolog of NCBI NO: 480996 NR Description: beta-fructofuranosidase (EC 3.2.1.26) isozyme I
  misc_feature (1)..(521): Homolog of NCBI NO: 480998 NR Description: beta-fructofuranosidase (EC 3.2.1.26) isozyme I
MLYKGVYHLFYQYNPKGAVWGNIVWAHSVSKDLINWEALEPAIYPSKWFDINGTWSGSATHVPGKGPVILYTGITENQTQIQNYAIPQDLSDPYLKTWIKPDDNPIVKPDNGENGSAFRDPTTAWFNKKDGYWRMLVGSKRKNRGIAYMYKSRDFKKWVKSKRPIHSRKKTGMWECPDFFPVSVTDKKNGLDFSYDGPNAKHVLKVSLDLTRYEYYTLGTYDTKKDRYRPDGYTPDGWDGLRFDYGNYYASKTFFDDKTNRRILWGWANESDTVQDDTVKGWAGIQLIPRTILLDSSGKQLVFWPIEEIESLRGKNVQMTNQKMEMGQRFEVQGITPAQVDVDVTFNVGNLEKAEKFDESFATKPLELCNLKGSNVNGGVGPFGLITLATSDLEEYTPVFFRVFKDAASNKPKVLMCSDAKPSSLKKDTGTDAKERMYKPSFAGFVDVGLLDGKISLRSLIDHSVVESFGAKGKTVITSRVYPTKAVGEKAHLFVFNNGSQPVTVESLNAWNMQKPLKMNQGAK

SEQ ID NO: 96568 - protein, 390 aa, Arabidopsis thaliana
  peptide (1)..(390): Ceres Seq. ID no. 12733841
  misc_feature (1)..(339): Pfam Name: Glycosyl hydrolases family 32 Pfam Description: Glycosyl hydrolases family 32
  misc_feature (1)..(389): Homolog of NCBI NO: 25289548 NR Description: probable beta-fructofuranosidase (invertase)
  misc_feature (1)..(389): Homolog of NCBI NO: 18404067 NR Description: glycosyl hydrolase family 32; protein id: supported by cDNA: 118038., supported by cDNA: gi_18147080
  misc_feature (1)..(389): Homolog of NCBI NO: 21537018 NR Description: putative beta-fructofuranosidase (invertase)
  misc_feature (1)..(386): Homolog of NCBI NO: 2129916 NR Description: beta-fructofuranosidase (EC 3.2.1.26) 1
  misc_feature (1)..(386): Homolog of NCBI NO: 124712 NR Description: BETA-FRUCTOFURANOSIDASE, INSOLUBLE ISOENZYME 1
  misc_feature (1)..(379): Homolog of NCBI NO: 480566 NR Description: beta-fructofuranosidase (EC 3.2.1.26) - potato
  misc_feature (1)..(379): Homolog of NCBI NO: 20805672 NR Description: cell-wall invertase [Lycopersicon esculentum]
  misc_feature (1)..(381): Homolog of NCBI NO: 30024213 NR Description: fructan 1-exohydrolase w1 precursor [Triticum
  misc_feature (1)..(387): Homolog of NCBI NO: 480996 NR Description: beta-fructofuranosidase (EC 3.2.1.26) isozyme I
  misc_feature (1)..(387): Homolog of NCBI NO: 480998 NR Description: beta-fructofuranosidase (EC 3.2.1.26) isozyme I
MLVGSKRKNRGIAYMYKSRDFKKWVKSKRPIHSRKKTGMWECPDFFPVSVTDKKNGLDFSYDGPNAKHVLKVSLDLTRYEYYTLGTYDTKKDRYRPDGYTPDGWDGLRFDYGNYYASKTFFDDKTNRRILWGWANESDTVQDDTVKGWAGIQLIPRTILLDSSGKQLVFWPIEEIESLRGKNVQMTNQKMEMGQRFEVQGITPAQVDVDVTFNVGNLEKAEKFDESFATKPLELCNLKGSNVNGGVGPFGLITLATSDLEEYTPVFFRVFKDAASNKPKVLMCSDAKPSSLKKDTGTDAKERMYKPSFAGFVDVGLLDGKISLRSLIDHSVVESFGAKGKTVITSRVYPTKAVGEKAHLFVFNNGSQPVTVESLNAWNMQKPLKMNQGAK

SEQ ID NO: 96569 - DNA, 1322 bp, Arabidopsis thaliana
  misc_feature (1)..(1322): Ceres Seq. ID no. 12733850
  misc_feature: MA Experiment ID: 20000169 Result: Down-regulated in Transcription
  misc_feature: MA Experiment 20000169 PARAMETER Experiment Name: At_100uM_ABA_P Parameter: Age (day) Value: 14
  misc_feature: MA Experiment 20000169 PARAMETER Experiment Name: At_100uM_ABA_P Parameter: Organism Value: A. thaliana
  misc_feature: MA Experiment 20000169 PARAMETER Experiment Name: At_100uM_ABA_P Parameter: Plant Line Value: WS
  misc_feature: MA Experiment 20000169 PARAMETER Experiment Name: At_100uM_ABA_P Parameter: Timepoint (hr) Value: 6
  misc_feature: MA Experiment 20000169 PARAMETER Experiment Name: At_100uM_ABA_P Parameter: Tissue Value: Aerial
  misc_feature: MA Experiment 20000169 PARAMETER Experiment Name: At_100uM_ABA_P Parameter: Treatment Value: 100uM ABA vs. No Treatment
  misc_feature: MA Experiment ID: 20000180 Result: Up-regulated in Transcription
  misc_feature: MA Experiment 20000180 PARAMETER Experiment Name: At_Germinating_Seeds_P Parameter: Age (hr) Value: 24 vs. 0
  misc_feature: MA Experiment 20000180 PARAMETER Experiment Name: At_Germinating_Seeds_P Parameter: Tissue Value: Germinating Seeds
  misc_feature: MA Experiment ID: 20000182 Result: Down-regulated in Transcription
  misc_feature: MA Experiment 20000182 PARAMETER Experiment Name: At_2mM_SA_P Parameter: Age (day) Value: 14
  misc_feature: MA Experiment 20000182 PARAMETER Experiment Name: At_2mM_SA_P Parameter: Organism Value: A. thaliana
  misc_feature: MA Experiment 20000182 PARAMETER Experiment Name: At_2mM_SA_P Parameter: Plant Line Value: WS
  misc_feature: MA Experiment 20000182 PARAMETER Experiment Name: At_2mM_SA_P Parameter: Timepoint (hr) Value: 6
  misc_feature: MA Experiment 20000182 PARAMETER Experiment Name: At_2mM_SA_P Parameter: Tissue Value: Aerial
  misc_feature: MA Experiment 20000182 PARAMETER Experiment Name: At_2mM_SA_P Parameter: Treatment Value: 2mM SA vs. No Treatment
  misc_feature: MA Experiment ID: 20000184 Result: Up-regulated in Transcription
  misc_feature: MA Experiment 20000184 PARAMETER Experiment Name: At_Shoots__P Parameter: Age (day) Value: 7
  misc_feature: MA Experiment 20000184 PARAMETER Experiment Name: At_Shoots__P Parameter: Tissue Value: Shoots vs. Whole Plant
  misc_feature: MA Experiment ID: 20000185 Result: Down-regulated in Transcription
  misc_feature: MA Experiment 20000185 PARAMETER Experiment Name: At_Roots__P Parameter: Age (day) Value: 7 vs. 21
  misc_feature: MA Experiment 20000185 PARAMETER Experiment Name: At_Roots__P Parameter: Organism Value: A. thaliana
  misc_feature: MA Experiment 20000185 PARAMETER Experiment Name: At_Roots__P Parameter: Tissue Value: Roots vs. Whole Plant
  misc_feature: MA Experiment ID: 20000436 Result: Down-regulated in Transcription
  misc_feature: MA Experiment 20000436 PARAMETER Experiment Name: At_Drought_P Parameter: Age (day) Value: 7
  misc_feature: MA Experiment 20000436 PARAMETER Experiment Name: At_Drought_P Parameter: Organism Value: A. thaliana
  misc_feature: MA Experiment 20000436 PARAMETER Experiment Name: At_Drought_P Parameter: Plant Line Value: WS
  misc_feature: MA Experiment 20000436 PARAMETER Experiment Name: At_Drought_P Parameter: Timepoint (hr) Value: 12
  misc_feature: MA Experiment 20000436 PARAMETER Experiment Name: At_Drought_P Parameter: Tissue Value: Whole Plant
  misc_feature: MA Experiment 20000436 PARAMETER Experiment Name: At_Drought_P Parameter: Treatment Value: Drought vs. No Drought
  misc_feature: MA Experiment ID: 20000437 Result: Down-regulated in Transcription
  misc_feature: MA Experiment 20000437 PARAMETER Experiment Name: At_Drought_P Parameter: Age (day) Value: 8
  misc_feature: MA Experiment 20000437 PARAMETER Experiment Name: At_Drought_P Parameter: Organism Value: A. thaliana
  misc_feature: MA Experiment 20000437 PARAMETER Experiment Name: At_Drought_P Parameter: Plant Line Value: WS
  misc_feature: MA Experiment 20000437 PARAMETER Experiment Name: At_Drought_P Parameter: Timepoint (hr) Value: 24
  misc_feature: MA Experiment 20000437 PARAMETER Experiment Name: At_Drought_P Parameter: Tissue Value: Whole Plant
  misc_feature: MA Experiment 20000437 PARAMETER Experiment Name: At_Drought_P Parameter: Treatment Value: Drought vs. No Drought
  misc_feature: MA Experiment ID: 20000438 Result: Up-regulated in Transcription
  misc_feature: MA Experiment 20000438 PARAMETER Experiment Name: At_Shoots__P Parameter: Age (day) Value: 14
  misc_feature: MA Experiment 20000438 PARAMETER Experiment Name: At_Shoots__P Parameter: Tissue Value: Shoots vs. Whole Plant
  misc_feature: MA Experiment ID: 20000453 Result: Down-regulated in Transcription
  misc_feature: MA Experiment 20000453 PARAMETER Experiment Name: At_100uM_ABA_P Parameter: Age (day) Value: 15
  misc_feature: MA Experiment 20000453 PARAMETER Experiment Name: At_100uM_ABA_P Parameter: Organism Value: A. thaliana
  misc_feature: MA Experiment 20000453 PARAMETER Experiment Name: At_100uM_ABA_P Parameter: Plant Line Value: WS
  misc_feature: MA Experiment 20000453 PARAMETER Experiment Name: At_100uM_ABA_P Parameter: Timepoint (hr) Value: 24
  misc_feature: MA Experiment 20000453 PARAMETER Experiment Name: At_100uM_ABA_P Parameter: Tissue Value: Aerial
  misc_feature: MA Experiment 20000453 PARAMETER Experiment Name: At_100uM_ABA_P Parameter: Treatment Value: 100uM ABA vs. No Treatment
  misc_feature: MA Experiment ID: 20000495 Result: Up-regulated in Transcription
  misc_feature: MA Experiment 20000495 PARAMETER Experiment Name: At_Guard_Cells_P Parameter: Harvest Date Value: 8/2/2002
  misc_feature: MA Experiment 20000495 PARAMETER Experiment Name: At_Guard_Cells_P Parameter: Organism Value: A. thaliana
  misc_feature: MA Experiment 20000495 PARAMETER Experiment Name: At_Guard_Cells_P Parameter: Tissue Value: Guard Cells vs. Leaves
  misc_feature: MA Experiment ID: 20000573 Result: Down-regulated in Transcription
  misc_feature: MA Experiment 20000573 PARAMETER Experiment Name: At_100uM_ABA_Mutants__P Parameter: Organism Value: A. thaliana
  misc_feature: MA Experiment 20000573 PARAMETER Experiment Name: At_100uM_ABA_Mutants__P Parameter: Plant Line Value: CS22 vs. Ler wt
  misc_feature: MA Experiment 20000573 PARAMETER Experiment Name: At_100uM_ABA_Mutants__P Parameter: Timepoint (hr) Value: N/A
  misc_feature: MA Experiment 20000573 PARAMETER Experiment Name: At_100uM_ABA_Mutants__P Parameter: Tissue Value: Whole Plant
  misc_feature: MA Experiment 20000573 PARAMETER Experiment Name: At_100uM_ABA_Mutants__P Parameter: Treatment Value: None
  misc_feature: MA Experiment ID: 20000574 Result: Down-regulated in Transcription
  misc_feature: MA Experiment 20000574 PARAMETER Experiment Name: At_100uM_ABA_Mutants__P Parameter: Organism Value: A. thaliana
  misc_feature: MA Experiment 20000574 PARAMETER Experiment Name: At_100uM_ABA_Mutants__P Parameter: Plant Line Value: CS23 vs. Ler wt
  misc_feature: MA Experiment 20000574 PARAMETER Experiment Name: At_100uM_ABA_Mutants__P Parameter: Timepoint (hr) Value: N/A
  misc_feature: MA Experiment 20000574 PARAMETER Experiment Name: At_100uM_ABA_Mutants__P Parameter: Tissue Value: Whole Plant
  misc_feature: MA Experiment 20000574 PARAMETER Experiment Name: At_100uM_ABA_Mutants__P Parameter: Treatment Value: None
  misc_feature: MA Experiment ID: 20000575 Result: Up-regulated in Transcription
  misc_feature: MA Experiment 20000575 PARAMETER Experiment Name: At_100uM_ABA_Mutants__P Parameter: Organism Value: A. thaliana
  misc_feature: MA Experiment 20000575 PARAMETER Experiment Name: At_100uM_ABA_Mutants__P Parameter: Plant Line Value: CS22
  misc_feature: MA Experiment 20000575 PARAMETER Experiment Name: At_100uM_ABA_Mutants__P Parameter: Timepoint (hr) Value: 6
  misc_feature: MA Experiment 20000575 PARAMETER Experiment Name: At_100uM_ABA_Mutants__P Parameter: Tissue Value: Whole Plant
  misc_feature: MA Experiment 20000575 PARAMETER Experiment Name: At_100uM_ABA_Mutants__P Parameter: Treatment Value: 1uM ABA vs. No Treatment
  misc_feature: MA Experiment ID: 20000576 Result: Up-regulated in Transcription
  misc_feature: MA Experiment 20000576 PARAMETER Experiment Name: At_100uM_ABA_Mutants__P Parameter: Organism Value: A. thaliana
  misc_feature: MA Experiment 20000576 PARAMETER Experiment Name: At_100uM_ABA_Mutants__P Parameter: Plant Line Value: CS23
  misc_feature: MA Experiment 20000576 PARAMETER Experiment Name: At_100uM_ABA_Mutants__P Parameter: Timepoint (hr) Value: 6
  misc_feature: MA Experiment 20000576 PARAMETER Experiment Name: At_100uM_ABA_Mutants__P Parameter: Tissue Value: Whole Plant
  misc_feature: MA Experiment 20000576 PARAMETER Experiment Name: At_100uM_ABA_Mutants__P Parameter: Treatment Value: 1uM ABA vs. No Treatment
  misc_feature: MA Experiment ID: 20000709 Result: Up-regulated in Transcription
  misc_feature: MA Experiment 20000709 PARAMETER Experiment Name: At_15mM_NH4NO3_L-to-H_P Parameter: Age (hr) Value: 14
  misc_feature: MA Experiment 20000709 PARAMETER Experiment Name: At_15mM_NH4NO3_L-to-H_P Parameter: Organism Value: A. thaliana
  misc_feature: MA Experiment 20000709 PARAMETER Experiment Name: At_15mM_NH4NO3_L-to-H_P Parameter: Plant Line Value: WS
  misc_feature: MA Experiment 20000709 PARAMETER Experiment Name: At_15mM_NH4NO3_L-to-H_P Parameter: Timepoint (hr) Value: 4
  misc_feature: MA Experiment 20000709 PARAMETER Experiment Name: At_15mM_NH4NO3_L-to-H_P Parameter: Tissue Value: Aerial
  misc_feature: MA Experiment 20000709 PARAMETER Experiment Name: At_15mM_NH4NO3_L-to-H_P Parameter: Treatment Value: 15mM NH4NO3 vs. 30mM Mannitol
  misc_feature: MA Experiment ID: 20001248 Result: Down-regulated in Transcription
  misc_feature: MA Experiment 20001248 PARAMETER Experiment Name: At_Far-red-induction_P Parameter: Age (day) Value: 7
  misc_feature: MA Experiment 20001248 PARAMETER Experiment Name: At_Far-red-induction_P Parameter: Light Value: Far-red vs. White
  misc_feature: MA Experiment 20001248 PARAMETER Experiment Name: At_Far-red-induction_P Parameter: Organism Value: A. thaliana
  misc_feature: MA Experiment 20001248 PARAMETER Experiment Name: At_Far-red-induction_P Parameter: Plant Line Value: Columbia
  misc_feature: MA Experiment 20001248 PARAMETER Experiment Name: At_Far-red-induction_P Parameter: Timepoint (hr) Value: 4
  misc_feature: MA Experiment 20001248 PARAMETER Experiment Name: At_Far-red-induction_P Parameter: Tissue Value: Whole Plant
  misc_feature: MA Experiment ID: 20001451 Result: Up-regulated in Transcription
  misc_feature: MA Experiment 20001451 PARAMETER Experiment Name: At_Far-red-induction_P Parameter: Age (day) Value: 7
  misc_feature: MA Experiment 20001451 PARAMETER Experiment Name: At_Far-red-induction_P Parameter: Light Value: Far-red vs. White
  misc_feature: MA Experiment 20001451 PARAMETER Experiment Name: At_Far-red-induction_P Parameter: Organism Value: A. thaliana
  misc_feature: MA Experiment 20001451 PARAMETER Experiment Name: At_Far-red-induction_P Parameter: Plant Line Value: Columbia
  misc_feature: MA Experiment 20001451 PARAMETER Experiment Name: At_Far-red-induction_P Parameter: Timepoint (hr) Value: 24
  misc_feature: MA Experiment 20001451 PARAMETER Experiment Name: At_Far-red-induction_P Parameter: Tissue Value: Whole Plant
  misc_feature: MA Experiment ID: 20001503 Result: Up-regulated in Transcription
  misc_feature: MA Experiment 20001503 PARAMETER Experiment Name: At_Far-red-enriched_P Parameter: Age (day) Value: 7
  misc_feature: MA Experiment 20001503 PARAMETER Experiment Name: At_Far-red-enriched_P Parameter: Light Value: Far-red enriched vs. White
  misc_feature: MA Experiment 20001503 PARAMETER Experiment Name: At_Far-red-enriched_P Parameter: Organism Value: A. thaliana
  misc_feature: MA Experiment 20001503 PARAMETER Experiment Name: At_Far-red-enriched_P Parameter: Plant Line Value: Columbia
  misc_feature: MA Experiment 20001503 PARAMETER Experiment Name: At_Far-red-enriched_P Parameter: Timepoint (day) Value: 3
  misc_feature: MA Experiment 20001503 PARAMETER Experiment Name: At_Far-red-enriched_P Parameter: Tissue Value: Whole Plant
  misc_feature: MA Experiment ID: 20001557 Result: Down-regulated in Transcription
  misc_feature: MA Experiment 20001557 PARAMETER Experiment Name: At_Drought_Soil_Dry_P Parameter: Age (day) Value: 27
  misc_feature: MA Experiment 20001557 PARAMETER Experiment Name: At_Drought_Soil_Dry_P Parameter: Organism Value: A. thaliana
  misc_feature: MA Experiment 20001557 PARAMETER Experiment Name: At_Drought_Soil_Dry_P Parameter: Plant Line Value: WS
  misc_feature: MA Experiment 20001557 PARAMETER Experiment Name: At_Drought_Soil_Dry_P Parameter: Post Timepoint (hr) Value: 3
  misc_feature: MA Experiment 20001557 PARAMETER Experiment Name: At_Drought_Soil_Dry_P Parameter: Post-Treatment Value: Re-Water vs. No Drought
  misc_feature: MA Experiment 20001557 PARAMETER Experiment Name: At_Drought_Soil_Dry_P Parameter: Timepoint (day) Value: 13
  misc_feature: MA Experiment 20001557 PARAMETER Experiment Name: At_Drought_Soil_Dry_P Parameter: Treatment Value: Drought vs. No Drought
  misc_feature: MA Experiment ID: 20001756 Result: Up-regulated in Transcription
  misc_feature: MA Experiment 20001756 PARAMETER Experiment Name: At_50mM_NH4NO3_L-to-H_P Parameter: Timepoint (hr) Value: 4
  misc_feature: MA Experiment 20001756 PARAMETER Experiment Name: At_50mM_NH4NO3_L-to-H_P Parameter: Tissue Value: Leaf
  misc_feature: MA Experiment 20001756 PARAMETER Experiment Name: At_50mM_NH4NO3_L-to-H_P Parameter: Treatment Value: 50mM NH4NO3 vs 100mM Mannitol
  misc_feature: MA Experiment ID: 20001905 Result: Down-regulated in Transcription
  misc_feature: MA Experiment 20001905 PARAMETER Experiment Name: At_Drought_Reproduction_P Parameter: Age (day) Value: 40
  misc_feature: MA Experiment 20001905 PARAMETER Experiment Name: At_Drought_Reproduction_P Parameter: Organism Value: A. thaliana
  misc_feature: MA Experiment 20001905 PARAMETER Experiment Name: At_Drought_Reproduction_P Parameter: Plant Line Value: WS
  misc_feature: MA Experiment 20001905 PARAMETER Experiment Name: At_Drought_Reproduction_P Parameter: Timepoint (day) Value: 10
  misc_feature: MA Experiment 20001905 PARAMETER Experiment Name: At_Drought_Reproduction_P Parameter: Tissue Value: Rosettes
  misc_feature: MA Experiment 20001905 PARAMETER Experiment Name: At_Drought_Reproduction_P Parameter: Treatment Value: Drought vs. No Drought
  misc_feature: MA Experiment ID: 20001906 Result: Down-regulated in Transcription
  misc_feature: MA Experiment 20001906 PARAMETER Experiment Name: At_Drought_Reproduction_P Parameter: Age (day) Value: 35
  misc_feature: MA Experiment 20001906 PARAMETER Experiment Name: At_Drought_Reproduction_P Parameter: Organism Value: A. thaliana
  misc_feature: MA Experiment 20001906 PARAMETER Experiment Name: At_Drought_Reproduction_P Parameter: Plant Line Value: WS
  misc_feature: MA Experiment 20001906 PARAMETER Experiment Name: At_Drought_Reproduction_P Parameter: Timepoint (day) Value: 5
  misc_feature: MA Experiment 20001906 PARAMETER Experiment Name: At_Drought_Reproduction_P Parameter: Tissue Value: Siliques
  misc_feature: MA Experiment 20001906 PARAMETER Experiment Name: At_Drought_Reproduction_P Parameter: Treatment Value: Drought vs. No Drought
atgcagtaatctgataaaaccctccacagagatttccaacaaaacaggaactaaaacacaagatgaagattatgatgatgattaagctctgcttcttctccatgtccctcatctgcattgcacctgcagatgctcgtaatgcttacactctttgtttctctctccctccatttctatattcatagtatgcattcacatgtttatagttttatttagagaaaacacaataaattaatcagaaagttcaaagtttgatacataggatgggatttaattaagtttaaaacgatcaagtaaatgatggtaatcgtgctattatatgagagtttttggtatgggtctaaccgtctaaaacgatatgtgttgtgcttagtgaatataactttataagttttaaccgtattcaaattggtaataaatgagcagagacagaaggagtagtgtttggatataaaggcaaaaatggaccaaaccaatggggacacttaaaccctcacttcaccacatgcgcggtcggtaaattgcaatctccaattgatattcaaaggaggcaaatattttacaaccacaaattgaattcaatacaccgtgaatactacttcacaaacgcaacactagtgaaccacgtctgtaatgttgccatgttcttcggggagggagcaggagatgtgataatagaaaacaagaactataccttactgcaaatgcattggcacactccttctgaacatcacctccatggagtccaatatgcagctgagctgcacatggtacaccaagcaaaagatggaagctttgctgtggtggcaagtctcttcaaaatcggcactgaagagcctttcctctctcagatgaaggagaaattggtgaagctaaaggaagagagactcaaagggaaccacacagcacaagtggaagtaggaagaatcgacacaagacacattgaacgtaagactcgaaagtactacagatacattggttcactcactactcctccttgctccgagaacgtttcttggaccatccttggcaaggtgaggtcaatgtcaaaggaacaagtagaactactcagatctccattggacacttctttcaagaacaattcaagaccgtgtcaacccctcaacggccggagagttgagatgttccacgaccacgagcgtgtcgataaaaaagaaaccggtaacaaaaagaaaaaacccaattaaaatagttttacattgtctattggtttgtttagaaccctaattagctttgtaaaactaataatctcttatgtagtactgtgttgttgtttacgacttgatatacgatttccaaat

SEQ ID NO: 96570 - protein, 188 aa, Arabidopsis thaliana
  peptide (1)..(188): Ceres Seq. ID no. 12733851
  misc_feature (1)..(169): Pfam Name: Eukaryotic-type carbonic anhydrase Pfam Description: Eukaryotic-type carbonic anhydrase
  misc_feature (1)..(188): Homolog of NCBI NO: 30693687 NR Description: carbonic anhydrase (CAH1) [Arabidopsis thaliana]
  misc_feature (1)..(132): Homolog of NCBI NO: 30693691 NR Description: carbonic anhydrase (CAH1) [Arabidopsis thaliana]
  misc_feature (1)..(188): Homolog of NCBI NO: 15450773 NR Description: carbonic anhydrase (CAH1) [Arabidopsis thaliana]
  misc_feature (1)..(170): Homolog of NCBI NO: 38346319 NR Description: OJ000126_13.1 [Oryza sativa (japonica
  misc_feature (1)..(169): Homolog of NCBI NO: 25291473 NR Description: probable carbonic anhydrase [imported] - thaliana >gi|4803960|gb|AAD29832.1| putative carbonic anhydrase
  misc_feature (1)..(169): Homolog of NCBI NO: 15223122 NR Description: storage protein, putative; protein id: [Arabidopsis thaliana] >gi|21689637|gb|AAM67440.1| putative
  misc_feature (1)..(171): Homolog of NCBI NO: 15233471 NR Description: carbonic anhydrase -like protein; protein id:
  misc_feature (1)..(169): Homolog of NCBI NO: 15223097 NR Description: carbonic anhydrase, putative; protein id:
  misc_feature (1)..(169): Homolog of NCBI NO: 34904986 NR Description: putative carbonic anhydrase precursor [Oryza
  misc_feature (1)..(179): Homolog of NCBI NO: 29468280 NR Description: nectarin III [Nicotiana langsdorffii x Nicotiana
MFFGEGAGDVIIENKNYTLLQMHWHTPSEHHLHGVQYAAELHMVHQAKDGSFAVVASLFKIGTEEPFLSQMKEKLVKLKEERLKGNHTAQVEVGRIDTRHIERKTRKYYRYIGSLTTPPCSENVSWTILGKVRSMSKEQVELLRSPLDTSFKNNSRPCQPLNGRRVEMFHDHERVDKKETGNKKKKPN

SEQ ID NO: 96571 - protein, 167 aa, Arabidopsis thaliana
  peptide (1)..(167): Ceres Seq. ID no. 12733852
  misc_feature (1)..(148): Pfam Name: Eukaryotic-type carbonic anhydrase Pfam Description: Eukaryotic-type carbonic anhydrase
  misc_feature (1)..(167): Homolog of NCBI NO: 30693687 NR Description: carbonic anhydrase (CAH1) [Arabidopsis thaliana]
  misc_feature (1)..(111): Homolog of NCBI NO: 30693691 NR Description: carbonic anhydrase (CAH1) [Arabidopsis thaliana]
  misc_feature (1)..(167): Homolog of NCBI NO: 15450773 NR Description: carbonic anhydrase (CAH1) [Arabidopsis thaliana]
  misc_feature (1)..(149): Homolog of NCBI NO: 38346319 NR Description: OJ000126_13.1 [Oryza sativa (japonica
  misc_feature (1)..(148): Homolog of NCBI NO: 25291473 NR Description: probable carbonic anhydrase [imported] - thaliana >gi|4803960|gb|AAD29832.1| putative carbonic anhydrase
  misc_feature (1)..(148): Homolog of NCBI NO: 15223122 NR Description: storage protein, putative; protein id: [Arabidopsis thaliana] >gi|21689637|gb|AAM67440.1| putative
  misc_feature (1)..(150): Homolog of NCBI NO: 15233471 NR Description: carbonic anhydrase -like protein; protein id:
  misc_feature (1)..(148): Homolog of NCBI NO: 15223097 NR Description: carbonic anhydrase, putative; protein id:
  misc_feature (1)..(148): Homolog of NCBI NO: 34904986 NR Description: putative carbonic anhydrase precursor [Oryza
  misc_feature (1)..(158): Homolog of NCBI NO: 29468280 NR Description: nectarin III [Nicotiana langsdorffii x Nicotiana
MHWHTPSEHHLHGVQYAAELHMVHQAKDGSFAVVASLFKIGTEEPFLSQMKEKLVKLKEERLKGNHTAQVEVGRIDTRHIERKTRKYYRYIGSLTTPPCSENVSWTILGKVRSMSKEQVELLRSPLDTSFKNNSRPCQPLNGRRVEMFHDHERVDKKETGNKKKKPN

SEQ ID NO: 96572 - protein, 146 aa, Arabidopsis thaliana
  peptide (1)..(146): Ceres Seq. ID no. 12733853
  misc_feature (1)..(127): Pfam Name: Eukaryotic-type carbonic anhydrase Pfam Description: Eukaryotic-type carbonic anhydrase
  misc_feature (1)..(146): Homolog of NCBI NO: 30693687 NR Description: carbonic anhydrase (CAH1) [Arabidopsis thaliana]
  misc_feature (1)..(90): Homolog of NCBI NO: 30693691 NR Description: carbonic anhydrase (CAH1) [Arabidopsis thaliana]
  misc_feature (1)..(146): Homolog of NCBI NO: 15450773 NR Description: carbonic anhydrase (CAH1) [Arabidopsis thaliana]
  misc_feature (1)..(128): Homolog of NCBI NO: 38346319 NR Description: OJ000126_13.1 [Oryza sativa (japonica
  misc_feature (1)..(127): Homolog of NCBI NO: 25291473 NR Description: probable carbonic anhydrase [imported] - thaliana >gi|4803960|gb|AAD29832.1| putative carbonic anhydrase
  misc_feature (1)..(127): Homolog of NCBI NO: 15223122 NR Description: storage protein, putative; protein id: [Arabidopsis thaliana] >gi|21689637|gb|AAM67440.1| putative
  misc_feature (1)..(129): Homolog of NCBI NO: 15233471 NR Description: carbonic anhydrase -like protein; protein id:
  misc_feature (1)..(127): Homolog of NCBI NO: 15223097 NR Description: carbonic anhydrase, putative; protein id:
  misc_feature (1)..(127): Homolog of NCBI NO: 34904986 NR Description: putative carbonic anhydrase precursor [Oryza
  misc_feature (1)..(137): Homolog of NCBI NO: 29468280 NR Description: nectarin III [Nicotiana langsdorffii x Nicotiana
MVHQAKDGSFAVVASLFKIGTEEPFLSQMKEKLVKLKEERLKGNHTAQVEVGRIDTRHIERKTRKYYRYIGSLTTPPCSENVSWTILGKVRSMSKEQVELLRSPLDTSFKNNSRPCQPLNGRRVEMFHDHERVDKKETGNKKKKPN

SEQ ID NO: 96573 - DNA, 2476 bp, Arabidopsis thaliana
  misc_feature (1)..(2476): Ceres Seq. ID no. 12733866
  misc_feature: MA Experiment ID: 20000185 Result: Down-regulated in Transcription
  misc_feature: MA Experiment 20000185 PARAMETER Experiment Name: At_Roots__P Parameter: Age (day) Value: 7 vs. 21
  misc_feature: MA Experiment 20000185 PARAMETER Experiment Name: At_Roots__P Parameter: Organism Value: A. thaliana
  misc_feature: MA Experiment 20000185 PARAMETER Experiment Name: At_Roots__P Parameter: Tissue Value: Roots vs. Whole Plant
  misc_feature: MA Experiment ID: 20000264 Result: Down-regulated in Transcription
  misc_feature: MA Experiment 20000264 PARAMETER Experiment Name: At_Open_Flower_P Parameter: Age (day) Value: 21
  misc_feature: MA Experiment 20000264 PARAMETER Experiment Name: At_Open_Flower_P Parameter: Plant Line Value: WS
  misc_feature: MA Experiment 20000264 PARAMETER Experiment Name: At_Open_Flower_P Parameter: Tissue Value: Open Flower vs. Whole Plant
  misc_feature: MA Experiment ID: 20000265 Result: Down-regulated in Transcription
  misc_feature: MA Experiment 20000265 PARAMETER Experiment Name: At_Open_Flower_P Parameter: Age (day) Value: 21
  misc_feature: MA Experiment 20000265 PARAMETER Experiment Name: At_Open_Flower_P Parameter: Plant Line Value: WS
  misc_feature: MA Experiment 20000265 PARAMETER Experiment Name: At_Open_Flower_P Parameter: Tissue Value: Closed Flower vs. Whole Plant
  misc_feature: MA Experiment ID: 20000439 Result: Down-regulated in Transcription
  misc_feature: MA Experiment 20000439 PARAMETER Experiment Name: At_Roots__P Parameter: Age (day) Value: 14 vs. 21
  misc_feature: MA Experiment 20000439 PARAMETER Experiment Name: At_Roots__P Parameter: Organism Value: A. thaliana
  misc_feature: MA Experiment 20000439 PARAMETER Experiment Name: At_Roots__P Parameter: Tissue Value: Roots vs. Whole Plant
  misc_feature: MA Experiment ID: 20000441 Result: Up-regulated in Transcription
  misc_feature: MA Experiment 20000441 PARAMETER Experiment Name: At_1uM_BR-BRZ__P Parameter: Tissue Value: Shoot Apices
  misc_feature: MA Experiment 20000441 PARAMETER Experiment Name: At_1uM_BR-BRZ__P Parameter: Treatment Value: 1uM BR vs. No Treatment
  misc_feature: MA Experiment ID: 20000451 Result: Down-regulated in Transcription
  misc_feature: MA Experiment 20000451 PARAMETER Experiment Name: At_CS6879_Shoots-Roots_P Parameter: Age (day) Value: 14
  misc_feature: MA Experiment 20000451 PARAMETER Experiment Name: At_CS6879_Shoots-Roots_P Parameter: Organism Value: A. thaliana
  misc_feature: MA Experiment 20000451 PARAMETER Experiment Name: At_CS6879_Shoots-Roots_P Parameter: Plant Line Value: CS6879 vs. WS
  misc_feature: MA Experiment 20000451 PARAMETER Experiment Name: At_CS6879_Shoots-Roots_P Parameter: Tissue Value: Roots
  misc_feature: MA Experiment ID: 20001556 Result: Down-regulated in Transcription
  misc_feature: MA Experiment 20001556 PARAMETER Experiment Name: At_Drought_Soil_Dry_P Parameter: Age (day) Value: 26
  misc_feature: MA Experiment 20001556 PARAMETER Experiment Name: At_Drought_Soil_Dry_P Parameter: Organism Value: A. thaliana
  misc_feature: MA Experiment 20001556 PARAMETER Experiment Name: At_Drought_Soil_Dry_P Parameter: Plant Line Value: WS
  misc_feature: MA Experiment 20001556 PARAMETER Experiment Name: At_Drought_Soil_Dry_P Parameter: Post Timepoint (hr) Value: None
  misc_feature: MA Experiment 20001556 PARAMETER Experiment Name: At_Drought_Soil_Dry_P Parameter: Post-Treatment Value: None
  misc_feature: MA Experiment 20001556 PARAMETER Experiment Name: At_Drought_Soil_Dry_P Parameter: Timepoint (day) Value: 12
  misc_feature: MA Experiment 20001556 PARAMETER Experiment Name: At_Drought_Soil_Dry_P Parameter: Treatment Value: Drought vs. No Drought
acagagctgataatttcagcagaatatttactattttttataaagaaacaaaaaaacatagaaaggtttggtttttcaaagaacgtgaaaatgagtatgcattttaggaataaagcatggattattctggcaattctgtgtttttcatctttgattcactcaacagaagcagtggtcacttatgatcacaaagctttaatcatcaatggacagagaaggatccttatctccggttctatacactatccaagaagcactcctgagatgtggcctgatcttataaagaaggccaaagaaggaggtttggatgttatacaaacatatgttttctggaatggacatgaaccttctcctggaaattactattttcaggatagatatgatctggttaaattcaccaaactggtgcaccaagctggactatatcttgatctaagaattggtccatatgtttgtgccgagtggaattttgggggatttccggtttggctcaaatatgttcctggtatggttttcagaacagataacgaacctttcaagattgcaatgcaaaaattcacaaagaagattgtggatatgatgaaagaagaaaagctgtttgagactcaaggaggacccatcattctctcacagatagagaatgagtatggaccaatgcaatgggagatgggagcagcaggaaaggcttactcaaaatggacagctgaaatggcattgggactgtccacaggtgtcccatggattatgagcaagcaagaggatgctccttaccctattatagacacatgcaatggattttattgtgagggtttcaaaccaaactcagacaataagccgaagttgtggacagagaactggactggttggttcacggaatttggaggtgcgataccaaatagaccagtcgaagacattgcgttctccgtggctcgtttcatacagaacggtggttcttttatgaattattatatgtattatggagggaccaactttgatagaacagccggtgttttcatcgccactagctatgactacgatgctcctattgacgaatatggattactaagagaacccaagtatagtcacttgaaagagttacataaagtcatcaagctatgtgaacctgcattggtctctgttgatcccaccatcacatcgctcggcgataaacaagaaattcatgtgttcaagtccaagacttcttgcgctgcatttctctcgaactacgacacgagttctgcagcaagagttatgtttaggggatttccgtatgatttgcctccttggtctgttagtattttaccagactgcaaaaccgaatattacaacactgcaaagatccgtgcaccaaccatacttatgaagatgattcctacaagcacaaagttttcctgggaatcgtacaacgaaggaagcccttcttcaaatgaagctggtacatttgttaaagatggtctagtggaacaaataagcatgaccagagataaaacagattatttctggtattttacggacattacaattggttctgatgagagcttcttgaagactggtgataatcctcttcttaccattttttcggctgggcatgctcttcatgtattcgttaatggcctgcttgcaggaacttcctatggagcactgagcaactcaaagctcacatttagtcaaaatatcaaattgagtgtaggcatcaacaaacttgctctgcttagtactgcagtgggtcttccgaacgctggtgtgcattatgagacttggaatactggtattctagggccagtcacattgaagggagtaaactctggaacatgggacatgtctaaatggaagtggtcttacaagattggtcttagaggtgaagctatgagccttcacaccttagctggaagttcagctgtgaaatggtggatcaaaggattcgtggtcaagaagcaacccttgacctggtacaagtcttcttttgatacaccgagaggcaacgaaccactggctttggacatgaacacaatggggaaaggtcaagtttgggtaaatggacataacattggacgccactggcctgcctacacggctcgtgggaactgtggacgttgcaactatgctggaatttacaacgagaagaaatgtctcagtcactgtggtgaaccttctcaaagatggtaccatgtacctcgttcatggctaaaaccgtttgggaaccttctagttatatttgaggaatggggtggtgatccaagtggaatctctcttgttaaaaggacagccaaatgaagcttcttacttcaaattttttccggaagcatgcagagattgtcatgtacagatatagttgcattcattggctcattgtggaagaatattatatatatatgtatcctgctctaaaaatgtattacaattgtataaaataatatttatacaatagaccaaaacaagccaatctcaatcaccccataagaggggttcttcttca

SEQ ID NO: 96574 - protein, 757 aa, Arabidopsis thaliana
  peptide (1)..(757): Ceres Seq. ID no. 12733867
  misc_feature (31)..(599): Homolog of NCBI NO: 24417238 NR Description: unknown [Arabidopsis thaliana]
  misc_feature (42)..(754): Homolog of NCBI NO: 3869280 NR Description: beta-galactosidase precursor [Carica papaya]
  misc_feature (40)..(754): Homolog of NCBI NO: 12583687 NR Description: beta-D-galactosidase [Pyrus pyrifolia]
  misc_feature (40)..(754): Homolog of NCBI NO: 1352078 NR Description: Beta-galactosidase precursor (Lactase) (Acid beta-
  misc_feature (29)..(755): Homolog of NCBI NO: 20384648 NR Description: beta-galactosidase [Citrus sinensis]
  misc_feature (39)..(757): Homolog of NCBI NO: 1352077 NR Description: Beta-galactosidase precursor (Lactase) (Acid beta-
  misc_feature (23)..(755): Homolog of NCBI NO: 3860420 NR Description: exo galactanase [Lupinus angustifolius]
  misc_feature (43)..(754): Homolog of NCBI NO: 14970839 NR Description: beta-galactosidase [Fragaria x ananassa]
  misc_feature (42)..(754): Homolog of NCBI NO: 4138137 NR Description: ss-galactosidase [Lycopersicon esculentum]
  misc_feature (41)..(755): Homolog of NCBI NO: 1168654 NR Description: Beta-galactosidase precursor (Lactase)
TELIISAEYLLFFIKKQKNIERFGFSKNVKMSMHFRNKAWIILAILCFSSLIHSTEAVVTYDHKALIINGQRRILISGSIHYPRSTPEMWPDLIKKAKEGGLDVIQTYVFWNGHEPSPGNYYFQDRYDLVKFTKLVHQAGLYLDLRIGPYVCAEWNFGGFPVWLKYVPGMVFRTDNEPFKIAMQKFTKKIVDMMKEEKLFETQGGPIILSQIENEYGPMQWEMGAAGKAYSKWTAEMALGLSTGVPWIMSKQEDAPYPIIDTCNGFYCEGFKPNSDNKPKLWTENWTGWFTEFGGAIPNRPVEDIAFSVARFIQNGGSFMNYYMYYGGTNFDRTAGVFIATSYDYDAPIDEYGLLREPKYSHLKELHKVIKLCEPALVSVDPTITSLGDKQEIHVFKSKTSCAAFLSNYDTSSAARVMFRGFPYDLPPWSVSILPDCKTEYYNTAKIRAPTILMKMIPTSTKFSWESYNEGSPSSNEAGTFVKDGLVEQISMTRDKTDYFWYFTDITIGSDESFLKTGDNPLLTIFSAGHALHVFVNGLLAGTSYGALSNSKLTFSQNIKLSVGINKLALLSTAVGLPNAGVHYETWNTGILGPVTLKGVNSGTWDMSKWKWSYKIGLRGEAMSLHTLAGSSAVKWWIKGFVVKKQPLTWYKSSFDTPRGNEPLALDMNTMGKGQVWVNGHNIGRHWPAYTARGNCGRCNYAGIYNEKKCLSHCGEPSQRWYHVPRSWLKPFGNLLVIFEEWGGDPSGISLVKRTAK

SEQ ID NO: 96575 - protein, 727 aa, Arabidopsis thaliana
  peptide (1)..(727): Ceres Seq. ID no. 12733868
  misc_feature (1)..(569): Homolog of NCBI NO: 24417238 NR Description: unknown [Arabidopsis thaliana]
  misc_feature (12)..(724): Homolog of NCBI NO: 3869280 NR Description: beta-galactosidase precursor [Carica papaya]
  misc_feature (10)..(724): Homolog of NCBI NO: 12583687 NR Description: beta-D-galactosidase [Pyrus pyrifolia]
  misc_feature (10)..(724): Homolog of NCBI NO: 1352078 NR Description: Beta-galactosidase precursor (Lactase) (Acid beta-
  misc_feature (1)..(725): Homolog of NCBI NO: 20384648 NR Description: beta-galactosidase [Citrus sinensis]
  misc_feature (9)..(727): Homolog of NCBI NO: 1352077 NR Description: Beta-galactosidase precursor (Lactase) (Acid beta-
  misc_feature (1)..(725): Homolog of NCBI NO: 3860420 NR Description: exo galactanase [Lupinus angustifolius]
  misc_feature (13)..(724): Homolog of NCBI NO: 14970839 NR Description: beta-galactosidase [Fragaria x ananassa]
  misc_feature (12)..(724): Homolog of NCBI NO: 4138137 NR Description: ss-galactosidase [Lycopersicon esculentum]
  misc_feature (11)..(725): Homolog of NCBI NO: 1168654 NR Description: Beta-galactosidase precursor (Lactase)
MSMHFRNKAWIILAILCFSSLIHSTEAVVTYDHKALIINGQRRILISGSIHYPRSTPEMWPDLIKKAKEGGLDVIQTYVFWNGHEPSPGNYYFQDRYDLVKFTKLVHQAGLYLDLRIGPYVCAEWNFGGFPVWLKYVPGMVFRTDNEPFKIAMQKFTKKIVDMMKEEKLFETQGGPIILSQIENEYGPMQWEMGAAGKAYSKWTAEMALGLSTGVPWIMSKQEDAPYPIIDTCNGFYCEGFKPNSDNKPKLWTENWTGWFTEFGGAIPNRPVEDIAFSVARFIQNGGSFMNYYMYYGGTNFDRTAGVFIATSYDYDAPIDEYGLLREPKYSHLKELHKVIKLCEPALVSVDPTITSLGDKQEIHVFKSKTSCAAFLSNYDTSSAARVMFRGFPYDLPPWSVSILPDCKTEYYNTAKIRAPTILMKMIPTSTKFSWESYNEGSPSSNEAGTFVKDGLVEQISMTRDKTDYFWYFTDITIGSDESFLKTGDNPLLTIFSAGHALHVFVNGLLAGTSYGALSNSKLTFSQNIKLSVGINKLALLSTAVGLPNAGVHYETWNTGILGPVTLKGVNSGTWDMSKWKWSYKIGLRGEAMSLHTLAGSSAVKWWIKGFVVKKQPLTWYKSSFDTPRGNEPLALDMNTMGKGQVWVNGHNIGRHWPAYTARGNCGRCNYAGIYNEKKCLSHCGEPSQRWYHVPRSWLKPFGNLLVIFEEWGGDPSGISLVKRTAK

SEQ ID NO: 96576 - protein, 725 aa, Arabidopsis thaliana
  peptide (1)..(725): Ceres Seq. ID no. 12733869
  misc_feature (1)..(567): Homolog of NCBI NO: 24417238 NR Description: unknown [Arabidopsis thaliana]
  misc_feature (10)..(722): Homolog of NCBI NO: 3869280 NR Description: beta-galactosidase precursor [Carica papaya]
  misc_feature (8)..(722): Homolog of NCBI NO: 12583687 NR Description: beta-D-galactosidase [Pyrus pyrifolia]
  misc_feature (8)..(722): Homolog of NCBI NO: 1352078 NR Description: Beta-galactosidase precursor (Lactase) (Acid beta-
  misc_feature (1)..(723): Homolog of NCBI NO: 20384648 NR Description: beta-galactosidase [Citrus sinensis]
  misc_feature (7)..(725): Homolog of NCBI NO: 1352077 NR Description: Beta-galactosidase precursor (Lactase) (Acid beta-
  misc_feature (1)..(723): Homolog of NCBI NO: 3860420 NR Description: exo galactanase [Lupinus angustifolius]
  misc_feature (11)..(722): Homolog of NCBI NO: 14970839 NR Description: beta-galactosidase [Fragaria x ananassa]
  misc_feature (10)..(722): Homolog of NCBI NO: 4138137 NR Description: ss-galactosidase [Lycopersicon esculentum]
  misc_feature (9)..(723): Homolog of NCBI NO: 1168654 NR Description: Beta-galactosidase precursor (Lactase)
MHFRNKAWIILAILCFSSLIHSTEAVVTYDHKALIINGQRRILISGSIHYPRSTPEMWPDLIKKAKEGGLDVIQTYVFWNGHEPSPGNYYFQDRYDLVKFTKLVHQAGLYLDLRIGPYVCAEWNFGGFPVWLKYVPGMVFRTDNEPFKIAMQKFTKKIVDMMKEEKLFETQGGPIILSQIENEYGPMQWEMGAAGKAYSKWTAEMALGLSTGVPWIMSKQEDAPYPIIDTCNGFYCEGFKPNSDNKPKLWTENWTGWFTEFGGAIPNRPVEDIAFSVARFIQNGGSFMNYYMYYGGTNFDRTAGVFIATSYDYDAPIDEYGLLREPKYSHLKELHKVIKLCEPALVSVDPTITSLGDKQEIHVFKSKTSCAAFLSNYDTSSAARVMFRGFPYDLPPWSVSILPDCKTEYYNTAKIRAPTILMKMIPTSTKFSWESYNEGSPSSNEAGTFVKDGLVEQISMTRDKTDYFWYFTDITIGSDESFLKTGDNPLLTIFSAGHALHVFVNGLLAGTSYGALSNSKLTFSQNIKLSVGINKLALLSTAVGLPNAGVHYETWNTGILGPVTLKGVNSGTWDMSKWKWSYKIGLRGEAMSLHTLAGSSAVKWWIKGFVVKKQPLTWYKSSFDTPRGNEPLALDMNTMGKGQVWVNGHNIGRHWPAYTARGNCGRCNYAGIYNEKKCLSHCGEPSQRWYHVPRSWLKPFGNLLVIFEEWGGDPSGISLVKRTAK

SEQ ID NO: 96577 - DNA, 2235 bp, Arabidopsis thaliana
  misc_feature (1)..(2235): Ceres Seq. ID no. 12733874
  misc_feature: MA Experiment ID: 20000355 Result: Up-regulated in Transcription
  misc_feature: MA Experiment 20000355 PARAMETER Experiment Name: At_Siliques_Sub_P Parameter: Age (day) Value: 21
  misc_feature: MA Experiment 20000355 PARAMETER Experiment Name: At_Siliques_Sub_P Parameter: Organism Value: A. thaliana
  misc_feature: MA Experiment 20000355 PARAMETER Experiment Name: At_Siliques_Sub_P Parameter: Plant Line Value: WS
  misc_feature: MA Experiment 20000355 PARAMETER Experiment Name: At_Siliques_Sub_P Parameter: Tissue Value: Less Than 5mm Siliques vs. Whole Plant
  misc_feature: MA Experiment ID: 20000440 Result: Up-regulated in Transcription
  misc_feature: MA Experiment 20000440 PARAMETER Experiment Name: At_Closed-Flower__Sub_P Parameter: Tissue Value: Closed Flower vs. Whole Plant
atgcctgtaaacgataaaccaagctcttcaaagagcgtacctcaacggtttgaagatccttctaaccccatttctgagccatctcaagctggaaccagttttggattacaaggagtggggaatcaaacgcgggagattaagctgttgcatagatccaacaaacctgggtcttgtcttagttctggcagtggagattatgagatagagttagatgaaaatgttgcgtctccttccactcatgcatttgttgaagatgatgtgatagaaatagacaaacacgttacttcactgccatctcactctagcaagaaagtcaatgcgacggagcttgacaagaatatttcctcatctgctgtagactcagagcagaaagggaagttggatgatgcacctaattcagggacagagaatggcaaaacagtacggaaggtaacaagaatgattccacgtcccaaacaaccgaaaaagaaaattttgcttaagaagaagttaaaaatcggggttgtgtcagcaacttacccaacaaaagacgatgaagaaattgttccttccttggactctagtgccaatcaacttctctgccagagatgtcactgttcgttgaagagcaccagcatcgatgacaacccaccttcatatacttctagtcataatcctaagatttgcacagatagtttgagctctgtttcaaataaagaagctcatcaaggatctgacgagaactcctctggctcgtgtaatgtcagtcaaagctctgaagctgacattgtcataatgaaacaagatgtttcctctagcaataatagtggaatcggtgcaatggtagaaaaagaaaccgagaatccgacttccagtgagaaattcgagttctctctgagttcaaaagatagtcttggggattatagcaggagcacaagcattagtgaggagagtaatctgagccgatttagctgtgggaataagcctcacatgtcgatggatgtgagatgggaagcgattaagcatatcaaggttcaatacggctctttgggtttacgacacttcaaccttctgaagaaacttggttgtggagatataggaacagtctatctcgccgagctgattggtacaaactgtttgtttgccataaaggttatggacaacgagttcttggcgagaaggaaaaagtctccccgggcacaagcagaaagagaaatacttaaaatgttggaccatccttttcttcctacattatacgcgcaatttacttcggataatttatcttgtctagtcatggaatattgtcctggaggagatcttcatgtcctcagacagaagcagctaggccggtgtttccctgaacctgcagcaagattctatgtggccgaaattctccttgcactggagtacttacacatgcttggtatcatataccgagatctgaaaccggaaaacattcttgtccgtgaagatggacacattatgcttacggattttgacctctcactccgttgtgcagtgaacccgactcttgtcaggtcaaactctccacctggtaaagatcccgcaaggatttcaggtccatacaacacatccaactgcatacaaccattctgtatcaccgaaccatcttgccaggtttcgtgtttcagccctaggctctcctcaaaccaacaacaaggtagaaaaccaaaaaggggtgatcatctttcgaaaacccaacaacacttgagtagatcattgcctcagctcgtggctgaaccaaccgaagcaagatccaattcctttgtgggaacacacgagtacctagccccagagatcatcaaaggagaaggacatggcgctgcagttgactggtggactttcggggttctcctttacgagcttttatacgggaaaacaccattcaaaggttacaacaacgacgagactttggccaatgttgtgttacagaacctcaagtttcctgatagcccgcttgtaagcttccaggcaaaagacttgatcaggggacttcttgttaaggaaccagagaacaggctcgggtcagagaaaggttctgtagagatcaaaagacatcctttttttgaaggattgaattgggctctgatccggtgtgcaatcccgcctgagctaccggatttctatgagtatggtggtggaccagaggcagcggcggattcgcctggaggcagtaataataggtatcttgaatgtaaagccataggcgatcatcttgagttcgagttgttttaa

SEQ ID NO: 96578 - protein, 744 aa, Arabidopsis thaliana
  peptide (1)..(744): Ceres Seq. ID no. 12733875
  misc_feature (348)..(689): Pfam Name: Protein kinase domain Pfam Description: Protein kinase domain
  misc_feature (14)..(744): Homolog of NCBI NO: 15227639 NR Description: putative protein kinase; protein id: At2g36350.1
  misc_feature (169)..(744): Homolog of NCBI NO: 15242814 NR Description: protein kinase -like protein; protein id:
  misc_feature (210)..(744): Homolog of NCBI NO: 15238798 NR Description: protein kinase (EC 2.7.1.37) 5 (pir||JN0505); id: At5g47750.1, supported by cDNA: gi_15809918, supported by gi_17064849, supported by cDNA: gi_20259909 [Arabidopsis
  misc_feature (210)..(744): Homolog of NCBI NO: 17064850 NR Description: protein kinase 5 [Arabidopsis thaliana]
  misc_feature (240)..(744): Homolog of NCBI NO: 15236802 NR Description: putative protein kinase; protein id: At4g26610.1, by cDNA: gi_17380933, supported by cDNA: gi_20258942 [Arabidopsis >gi|7488161|pir||T08927 probable protein kinase T15N24.60
  misc_feature (167)..(744): Homolog of NCBI NO: 7446383 NR Description: probable protein kinase PK1 - potato
  misc_feature (321)..(744): Homolog of NCBI NO: 320622 NR Description: probable protein kinase - maize (fragment)
  misc_feature (247)..(731): Homolog of NCBI NO: 15241076 NR Description: serine threonine-specific protein kinase ATPK64
  misc_feature (302)..(706): Homolog of NCBI NO: 1346057 NR Description: Protein kinase G11A >gi|100705|pir||B30311
  misc_feature (246)..(706): Homolog of NCBI NO: 125568 NR Description: Protein kinase PVPK-1 >gi|100013|pir||A30311
MPVNDKPSSSKSVPQRFEDPSNPISEPSQAGTSFGLQGVGNQTREIKLLHRSNKPGSCLSSGSGDYEIELDENVASPSTHAFVEDDVIEIDKHVTSLPSHSSKKVNATELDKNISSSAVDSEQKGKLDDAPNSGTENGKTVRKVTRMIPRPKQPKKKILLKKKLKIGVVSATYPTKDDEEIVPSLDSSANQLLCQRCHCSLKSTSIDDNPPSYTSSHNPKICTDSLSSVSNKEAHQGSDENSSGSCNVSQSSEADIVIMKQDVSSSNNSGIGAMVEKETENPTSSEKFEFSLSSKDSLGDYSRSTSISEESNLSRFSCGNKPHMSMDVRWEAIKHIKVQYGSLGLRHFNLLKKLGCGDIGTVYLAELIGTNCLFAIKVMDNEFLARRKKSPRAQAEREILKMLDHPFLPTLYAQFTSDNLSCLVMEYCPGGDLHVLRQKQLGRCFPEPAARFYVAEILLALEYLHMLGIIYRDLKPENILVREDGHIMLTDFDLSLRCAVNPTLVRSNSPPGKDPARISGPYNTSNCIQPFCITEPSCQVSCFSPRLSSNQQQGRKPKRGDHLSKTQQHLSRSLPQLVAEPTEARSNSFVGTHEYLAPEIIKGEGHGAAVDWWTFGVLLYELLYGKTPFKGYNNDETLANVVLQNLKFPDSPLVSFQAKDLIRGLLVKEPENRLGSEKGSVEIKRHPFFEGLNWALIRCAIPPELPDFYEYGGGPEAAADSPGGSNNRYLECKAIGDHLEFELF

SEQ ID NO: 96579 - protein, 598 aa, Arabidopsis thaliana
  peptide (1)..(598): Ceres Seq. ID no. 12733876
  misc_feature (202)..(543): Pfam Name: Protein kinase domain Pfam Description: Protein kinase domain
  misc_feature (1)..(598): Homolog of NCBI NO: 15227639 NR Description: putative protein kinase; protein id: At2g36350.1
  misc_feature (23)..(598): Homolog of NCBI NO: 15242814 NR Description: protein kinase -like protein; protein id:
  misc_feature (64)..(598): Homolog of NCBI NO: 15238798 NR Description: protein kinase (EC 2.7.1.37) 5 (pir||JN0505); id: At5g47750.1, supported by cDNA: gi_15809918, supported by gi_17064849, supported by cDNA: gi_20259909 [Arabidopsis
  misc_feature (64)..(598): Homolog of NCBI NO: 17064850 NR Description: protein kinase 5 [Arabidopsis thaliana]
  misc_feature (94)..(598): Homolog of NCBI NO: 15236802 NR Description: putative protein kinase; protein id: At4g26610.1, by cDNA: gi_17380933, supported by cDNA: gi_20258942 [Arabidopsis >gi|7488161|pir||T08927 probable protein kinase T15N24.60
  misc_feature (21)..(598): Homolog of NCBI NO: 7446383 NR Description: probable protein kinase PK1 - potato
  misc_feature (175)..(598): Homolog of NCBI NO: 320622 NR Description: probable protein kinase - maize (fragment)
  misc_feature (101)..(585): Homolog of NCBI NO: 15241076 NR Description: serine threonine-specific protein kinase ATPK64
  misc_feature (156)..(560): Homolog of NCBI NO: 1346057 NR Description: Protein kinase G11A >gi|100705|pir||B30311
  misc_feature (100)..(560): Homolog of NCBI NO: 125568 NR Description: Protein kinase PVPK-1 >gi|100013|pir||A30311
MIPRPKQPKKKILLKKKLKIGVVSATYPTKDDEEIVPSLDSSANQLLCQRCHCSLKSTSIDDNPPSYTSSHNPKICTDSLSSVSNKEAHQGSDENSSGSCNVSQSSEADIVIMKQDVSSSNNSGIGAMVEKETENPTSSEKFEFSLSSKDSLGDYSRSTSISEESNLSRFSCGNKPHMSMDVRWEAIKHIKVQYGSLGLRHFNLLKKLGCGDIGTVYLAELIGTNCLFAIKVMDNEFLARRKKSPRAQAEREILKMLDHPFLPTLYAQFTSDNLSCLVMEYCPGGDLHVLRQKQLGRCFPEPAARFYVAEILLALEYLHMLGIIYRDLKPENILVREDGHIMLTDFDLSLRCAVNPTLVRSNSPPGKDPARISGPYNTSNCIQPFCITEPSCQVSCFSPRLSSNQQQGRKPKRGDHLSKTQQHLSRSLPQLVAEPTEARSNSFVGTHEYLAPEIIKGEGHGAAVDWWTFGVLLYELLYGKTPFKGYNNDETLANVVLQNLKFPDSPLVSFQAKDLIRGLLVKEPENRLGSEKGSVEIKRHPFFEGLNWALIRCAIPPELPDFYEYGGGPEAAADSPGGSNNRYLECKAIGDHLEFELF

SEQ ID NO: 96580 - protein, 486 aa, Arabidopsis thaliana
  peptide (1)..(486): Ceres Seq. ID no. 12733877
  misc_feature (90)..(431): Pfam Name: Protein kinase domain Pfam Description: Protein kinase domain
  misc_feature (1)..(486): Homolog of NCBI NO: 15227639 NR Description: putative protein kinase; protein id: At2g36350.1
  misc_feature (1)..(486): Homolog of NCBI NO: 15242814 NR Description: protein kinase -like protein; protein id:
  misc_feature (1)..(486): Homolog of NCBI NO: 15238798 NR Description: protein kinase (EC 2.7.1.37) 5 (pir||JN0505); id: At5g47750.1, supported by cDNA: gi_15809918, supported by gi_17064849, supported by cDNA: gi_20259909 [Arabidopsis
  misc_feature (1)..(486): Homolog of NCBI NO: 17064850 NR Description: protein kinase 5 [Arabidopsis thaliana]
  misc_feature (1)..(486): Homolog of NCBI NO: 15236802 NR Description: putative protein kinase; protein id: At4g26610.1, by cDNA: gi_17380933, supported by cDNA: gi_20258942 [Arabidopsis >gi|7488161|pir||T08927 probable protein kinase T15N24.60
  misc_feature (1)..(486): Homolog of NCBI NO: 7446383 NR Description: probable protein kinase PK1 - potato
  misc_feature (63)..(486): Homolog of NCBI NO: 320622 NR Description: probable protein kinase - maize (fragment)
  misc_feature (1)..(473): Homolog of NCBI NO: 15241076 NR Description: serine threonine-specific protein kinase ATPK64
  misc_feature (44)..(448): Homolog of NCBI NO: 1346057 NR Description: Protein kinase G11A >gi|100705|pir||B30311
  misc_feature (1)..(448): Homolog of NCBI NO: 125568 NR Description: Protein kinase PVPK-1 >gi|100013|pir||A30311
MKQDVSSSNNSGIGAMVEKETENPTSSEKFEFSLSSKDSLGDYSRSTSISEESNLSRFSCGNKPHMSMDVRWEAIKHIKVQYGSLGLRHFNLLKKLGCGDIGTVYLAELIGTNCLFAIKVMDNEFLARRKKSPRAQAEREILKMLDHPFLPTLYAQFTSDNLSCLVMEYCPGGDLHVLRQKQLGRCFPEPAARFYVAEILLALEYLHMLGIIYRDLKPENILVREDGHIMLTDFDLSLRCAVNPTLVRSNSPPGKDPARISGPYNTSNCIQPFCITEPSCQVSCFSPRLSSNQQQGRKPKRGDHLSKTQQHLSRSLPQLVAEPTEARSNSFVGTHEYLAPEIIKGEGHGAAVDWWTFGVLLYELLYGKTPFKGYNNDETLANVVLQNLKFPDSPLVSFQAKDLIRGLLVKEPENRLGSEKGSVEIKRHPFFEGLNWALIRCAIPPELPDFYEYGGGPEAAADSPGGSNNRYLECKAIGDHLEFELF

SEQ ID NO: 96581 - DNA, 1539 bp, Arabidopsis thaliana
  misc_feature (1)..(1539): Ceres Seq. ID no. 12733878
atgattaatcaattaacaaagaacgagttaatcggattatttacatcgattgccgtcctcatatacgttacatgtctcttctacaccaaacgatgtcgtacgagactacctccgggaccaaatccatggccggtgattggaaacattttccagctcgctggtttaccgccacacgactcattgactaaactttcacggcgtcacgggccaatcatgactttacggatcgggtcgatgctgacggttgtgatctcttcgagtgaagtggctcgggagatcttcaagaagcatgacgcagctttggctggccggaagatttacgaggcgatgaaaggagggaagagtagtgacggctcgctcatcacggctcagtatggtgcgtattggcggatgctgcggaggctttgcaccactcagttctttgtcacgcgccgtcttgatgctatgagtgatgtacgctctaggtgtgttgatcagatgcttcggtttgtcgaggaaggtggccaaaacggtacaaaaacaatcgatgtggggagatatttcttcttgatggcatttaatctcataggaaacctcatgttctcgagagatttgcttgatcctgattcaaaaagaggatccgaattcttttaccacaccgggaaagtgatggagttcgccggaaaaccaaacgttgccgatttcttcccgttgctaaggtttcttgaccctcaaggaatcaggagaaaaacgcaattccacgtggaaaaagcgtttgagatcgccggagagttcatcagagaacgaacggaggttagggagagagaaaagagcgacgagaagacgaaagattacttagatgttcttttggagtttcgtggtggcgatggagtcgacgaagaaccttctagcttctcatcaagagatatcaacgaaatgtttacggctggaacggatacgacaacgagcacgttggagtgggcactagcggagcttctacacaacccaagaacactgaccaaactccaaaccgaactccggacctacttcaagtcctcgaaccaaaagctccaagaagaagacctaccaaaccttccctatctctcagctgttatcatggaaaccttaaggctacacccacctctgcctttcctcgtcccacacaaagccatgtcaacttgtcacatcttcgatcaatacactatccccaaggaaacacaagtcttggtcaatgtatgggccatcggacgcgatcctaaaacatggatcgacccgataatgttcaaacccgagagatttatatccgaccctgacgcccgagacttcaagggacaagattacgagttcttgccgttcgggtcgggtcgaaggatgtgtccagctttgcctttggcatcacgggttttgccgttggccattgggtcaatggtgagatcgtttgattgggctttagaaaatgggcttaatgcagaagaaatggatatgggagaaaggattggtataacattgaaaaaagctgttcctttggaagccattccaattccttatcgagggacttaa

SEQ ID NO: 96582 - protein, 512 aa, Arabidopsis thaliana
  peptide (1)..(512): Ceres Seq. ID no. 12733879
  misc_feature (1)..(512): Homolog of NCBI NO: 11249509 NR Description: cytochrome P450 homolog F8J2.140 [similarity] -
  misc_feature (1)..(512): Homolog of NCBI NO: 30693743 NR Description: cytochrome p450 family [Arabidopsis thaliana]
  misc_feature (1)..(512): Homolog of NCBI NO: 26451157 NR Description: putative cytochrome P450 [Arabidopsis thaliana]
  misc_feature (14)..(507): Homolog of NCBI NO: 27529726 NR Description: cytochrome P450 [Petunia x hybrida]
  misc_feature (13)..(506): Homolog of NCBI NO: 584865 NR Description: Cytochrome P450 76A2 (CYPLXXVIA2) (P-450EG7)
  misc_feature (5)..(506): Homolog of NCBI NO: 27529724 NR Description: cytochrome P450 [Petunia x hybrida]
  misc_feature (47)..(506): Homolog of NCBI NO: 584864 NR Description: Cytochrome P450 76A1 (CYPLXXVIA1) (P-450EG8)
  misc_feature (15)..(506): Homolog of NCBI NO: 17065916 NR Description: geraniol 10-hydroxylase [Catharanthus roseus]
  misc_feature (9)..(507): Homolog of NCBI NO: 7406712 NR Description: putative ripening-related P-450 enzyme [Vitis
  misc_feature (20)..(509): Homolog of NCBI NO: 27529728 NR Description: cytochrome P450 [Petunia x hybrida]
MINQLTKNELIGLFTSIAVLIYVTCLFYTKRCRTRLPPGPNPWPVIGNIFQLAGLPPHDSLTKLSRRHGPIMTLRIGSMLTVVISSSEVAREIFKKHDAALAGRKIYEAMKGGKSSDGSLITAQYGAYWRMLRRLCTTQFFVTRRLDAMSDVRSRCVDQMLRFVEEGGQNGTKTIDVGRYFFLMAFNLIGNLMFSRDLLDPDSKRGSEFFYHTGKVMEFAGKPNVADFFPLLRFLDPQGIRRKTQFHVEKAFEIAGEFIRERTEVREREKSDEKTKDYLDVLLEFRGGDGVDEEPSSFSSRDINEMFTAGTDTTTSTLEWALAELLHNPRTLTKLQTELRTYFKSSNQKLQEEDLPNLPYLSAVIMETLRLHPPLPFLVPHKAMSTCHIFDQYTIPKETQVLVNVWAIGRDPKTWIDPIMFKPERFISDPDARDFKGQDYEFLPFGSGRRMCPALPLASRVLPLAIGSMVRSFDWALENGLNAEEMDMGERIGITLKKAVPLEAIPIPYRGT

SEQ ID NO: 96583 - protein, 441 aa, Arabidopsis thaliana
  peptide (1)..(441): Ceres Seq. ID no. 12733880
  misc_feature (1)..(441): Homolog of NCBI NO: 11249509 NR Description: cytochrome P450 homolog F8J2.140 [similarity] -
  misc_feature (1)..(441): Homolog of NCBI NO: 30693743 NR Description: cytochrome p450 family [Arabidopsis thaliana]
  misc_feature (1)..(441): Homolog of NCBI NO: 26451157 NR Description: putative cytochrome P450 [Arabidopsis thaliana]
  misc_feature (1)..(436): Homolog of NCBI NO: 27529726 NR Description: cytochrome P450 [Petunia x hybrida]
  misc_feature (1)..(435): Homolog of NCBI NO: 584865 NR Description: Cytochrome P450 76A2 (CYPLXXVIA2) (P-450EG7)
  misc_feature (1)..(435): Homolog of NCBI NO: 27529724 NR Description: cytochrome P450 [Petunia x hybrida]
  misc_feature (1)..(435): Homolog of NCBI NO: 584864 NR Description: Cytochrome P450 76A1 (CYPLXXVIA1) (P-450EG8)
  misc_feature (1)..(435): Homolog of NCBI NO: 17065916 NR Description: geraniol 10-hydroxylase [Catharanthus roseus]
  misc_feature (1)..(436): Homolog of NCBI NO: 7406712 NR Description: putative ripening-related P-450 enzyme [Vitis
  misc_feature (1)..(438): Homolog of NCBI NO: 27529728 NR Description: cytochrome P450 [Petunia x hybrida]
MTLRIGSMLTVVISSSEVAREIFKKHDAALAGRKIYEAMKGGKSSDGSLITAQYGAYWRMLRRLCTTQFFVTRRLDAMSDVRSRCVDQMLRFVEEGGQNGTKTIDVGRYFFLMAFNLIGNLMFSRDLLDPDSKRGSEFFYHTGKVMEFAGKPNVADFFPLLRFLDPQGIRRKTQFHVEKAFEIAGEFIRERTEVREREKSDEKTKDYLDVLLEFRGGDGVDEEPSSFSSRDINEMFTAGTDTTTSTLEWALAELLHNPRTLTKLQTELRTYFKSSNQKLQEEDLPNLPYLSAVIMETLRLHPPLPFLVPHKAMSTCHIFDQYTIPKETQVLVNVWAIGRDPKTWIDPIMFKPERFISDPDARDFKGQDYEFLPFGSGRRMCPALPLASRVLPLAIGSMVRSFDWALENGLNAEEMDMGERIGITLKKAVPLEAIPIPYRGT

SEQ ID NO: 96584 - protein, 434 aa, Arabidopsis thaliana
  peptide (1)..(434): Ceres Seq. ID no. 12733881
  misc_feature (1)..(434): Homolog of NCBI NO: 11249509 NR Description: cytochrome P450 homolog F8J2.140 [similarity] -
  misc_feature (1)..(434): Homolog of NCBI NO: 30693743 NR Description: cytochrome p450 family [Arabidopsis thaliana]
  misc_feature (1)..(434): Homolog of NCBI NO: 26451157 NR Description: putative cytochrome P450 [Arabidopsis thaliana]
  misc_feature (1)..(429): Homolog of NCBI NO: 27529726 NR Description: cytochrome P450 [Petunia x hybrida]
  misc_feature (1)..(428): Homolog of NCBI NO: 584865 NR Description: Cytochrome P450 76A2 (CYPLXXVIA2) (P-450EG7)
  misc_feature (1)..(428): Homolog of NCBI NO: 27529724 NR Description: cytochrome P450 [Petunia x hybrida]
  misc_feature (1)..(428): Homolog of NCBI NO: 584864 NR Description: Cytochrome P450 76A1 (CYPLXXVIA1) (P-450EG8)
  misc_feature (1)..(428): Homolog of NCBI NO: 17065916 NR Description: geraniol 10-hydroxylase [Catharanthus roseus]
  misc_feature (1)..(429): Homolog of NCBI NO: 7406712 NR Description: putative ripening-related P-450 enzyme [Vitis
  misc_feature (1)..(431): Homolog of NCBI NO: 27529728 NR Description: cytochrome P450 [Petunia x hybrida]
MLTVVISSSEVAREIFKKHDAALAGRKIYEAMKGGKSSDGSLITAQYGAYWRMLRRLCTTQFFVTRRLDAMSDVRSRCVDQMLRFVEEGGQNGTKTIDVGRYFFLMAFNLIGNLMFSRDLLDPDSKRGSEFFYHTGKVMEFAGKPNVADFFPLLRFLDPQGIRRKTQFHVEKAFEIAGEFIRERTEVREREKSDEKTKDYLDVLLEFRGGDGVDEEPSSFSSRDINEMFTAGTDTTTSTLEWALAELLHNPRTLTKLQTELRTYFKSSNQKLQEEDLPNLPYLSAVIMETLRLHPPLPFLVPHKAMSTCHIFDQYTIPKETQVLVNVWAIGRDPKTWIDPIMFKPERFISDPDARDFKGQDYEFLPFGSGRRMCPALPLASRVLPLAIGSMVRSFDWALENGLNAEEMDMGERIGITLKKAVPLEAIPIPYRGT

SEQ ID NO: 96585 - DNA, 903 bp, Arabidopsis thaliana
  misc_feature (1)..(903): Ceres Seq. ID no. 12733886
  misc_feature: MA Experiment ID: 20000184 Result: Down-regulated in Transcription
  misc_feature: MA Experiment 20000184 PARAMETER Experiment Name: At_Shoots__P Parameter: Age (day) Value: 7
  misc_feature: MA Experiment 20000184 PARAMETER Experiment Name: At_Shoots__P Parameter: Tissue Value: Shoots vs. Whole Plant
  misc_feature: MA Experiment ID: 20000437 Result: Up-regulated in Transcription
  misc_feature: MA Experiment 20000437 PARAMETER Experiment Name: At_Drought_P Parameter: Age (day) Value: 8
  misc_feature: MA Experiment 20000437 PARAMETER Experiment Name: At_Drought_P Parameter: Organism Value: A. thaliana
  misc_feature: MA Experiment 20000437 PARAMETER Experiment Name: At_Drought_P Parameter: Plant Line Value: WS
  misc_feature: MA Experiment 20000437 PARAMETER Experiment Name: At_Drought_P Parameter: Timepoint (hr) Value: 24
  misc_feature: MA Experiment 20000437 PARAMETER Experiment Name: At_Drought_P Parameter: Tissue Value: Whole Plant
  misc_feature: MA Experiment 20000437 PARAMETER Experiment Name: At_Drought_P Parameter: Treatment Value: Drought vs. No Drought
  misc_feature: MA Experiment ID: 20000495 Result: Down-regulated in Transcription
  misc_feature: MA Experiment 20000495 PARAMETER Experiment Name: At_Guard_Cells_P Parameter: Harvest Date Value: 8/2/2002
  misc_feature: MA Experiment 20000495 PARAMETER Experiment Name: At_Guard_Cells_P Parameter: Organism Value: A. thaliana
  misc_feature: MA Experiment 20000495 PARAMETER Experiment Name: At_Guard_Cells_P Parameter: Tissue Value: Guard Cells vs. Leaves
atgggttcgtccttgtcgaatctaaacgacgggacgaatggtttggctatgggacctggtctcggcgatataccggaaagttgtgtcgcttgtgtgtttatgtatctgactccaccggagatttgcaatctggctggattgaatcgttcttttcgtggtgcggcttcttcggattctgtttgggaaaagaagcttccggagaattatcaggatctgcttgatttattgccgccggagaggtatcatagtctctcgaagaaagatatcttcgctgtgctttctcgtccaattccttttgatgatgataataaggaagtatggattgatagagttacaggacgagtttgtatggcgatttctgctagaggaatgtctattactggaattgaagaccggagatattggaactggattccaacggaagaatctaggttccatgttgtagcctacttacagcagatttggtggtttgaagttgatggaacagtgagattccatctcccacctggtgtatactctctatcattcagaatccatctagggagattcacaaaaaggctagggagacgtgtgtgccactttgaactcactcatggttgggatctaaagccggtaaggttttcgctttcgacttctgatggtcaagaagcatcatgtgaatattacttggacgacgtagagagaaacgaagcacttggaaaacacaaacgcggttactggatcgagtatagggttggagaattcatagtaaatggatcagaaccatcgacagaaatccaatggtcgatgaaacagattgactgcacgcactcgaaaggagggttatgtgttgattcagtcttcataaacccaattggtgatgtgaaagaacacaaaaggaaagctgttttgaaagaagcttga

SEQ ID NO: 96586 - protein, 300 aa, Arabidopsis thaliana
  peptide (1)..(300): Ceres Seq. ID no. 12733887
  misc_feature (1)..(300): Homolog of NCBI NO: 15231726 NR Description: putative protein; protein id: At3g53000.1
  misc_feature (14)..(290): Homolog of NCBI NO: 37536186 NR Description: unknown protein [Oryza sativa (japonica
  misc_feature (1)..(293): Homolog of NCBI NO: 15222051 NR Description: hypothetical protein; protein id: At1g12710.1 thaliana] >gi|9502385|gb|AAF88092.1|AC025417_20 T12C24.23 thaliana] >gi|26450401|dbj|BAC42315.1| unknown protein
  misc_feature (83)..(286): Homolog of NCBI NO: 38567911 NR Description: OSJNBa0088I22.7 [Oryza sativa (japonica
  misc_feature (24)..(75): Homolog of NCBI NO: 38567911 NR Description: OSJNBa0088I22.7 [Oryza sativa (japonica
  misc_feature (21)..(290): Homolog of NCBI NO: 30695337 NR Description: F-box protein (lectin-related) [Arabidopsis
  misc_feature (21)..(290): Homolog of NCBI NO: 23397334 NR Description: unknown protein [Arabidopsis thaliana]
  misc_feature (1)..(284): Homolog of NCBI NO: 15221677 NR Description: unknown protein; protein id: At1g63090.1
  misc_feature (20)..(284): Homolog of NCBI NO: 15242282 NR Description: putative protein; protein id: At5g52120.1, by cDNA: gi_18175687, supported by cDNA: gi_20465820 [Arabidopsis >gi|18175688|gb|AAL59911.1| unknown protein [Arabidopsis
  misc_feature (99)..(284): Homolog of NCBI NO: 27754673 NR Description: unknown protein [Arabidopsis thaliana]
MGSSLSNLNDGTNGLAMGPGLGDIPESCVACVFMYLTPPEICNLAGLNRSFRGAASSDSVWEKKLPENYQDLLDLLPPERYHSLSKKDIFAVLSRPIPFDDDNKEVWIDRVTGRVCMAISARGMSITGIEDRRYWNWIPTEESRFHVVAYLQQIWWFEVDGTVRFHLPPGVYSLSFRIHLGRFTKRLGRRVCHFELTHGWDLKPVRFSLSTSDGQEASCEYYLDDVERNEALGKHKRGYWIEYRVGEFIVNGSEPSTEIQWSMKQIDCTHSKGGLCVDSVFINPIGDVKEHKRKAVLKEA

SEQ ID NO: 96587 - protein, 284 aa, Arabidopsis thaliana
  peptide (1)..(284): Ceres Seq. ID no. 12733888
  misc_feature (1)..(284): Homolog of NCBI NO: 15231726 NR Description: putative protein; protein id: At3g53000.1
  misc_feature (1)..(274): Homolog of NCBI NO: 37536186 NR Description: unknown protein [Oryza sativa (japonica
  misc_feature (1)..(277): Homolog of NCBI NO: 15222051 NR Description: hypothetical protein; protein id: At1g12710.1 thaliana] >gi|9502385|gb|AAF88092.1|AC025417_20 T12C24.23 thaliana] >gi|26450401|dbj|BAC42315.1| unknown protein
  misc_feature (67)..(270): Homolog of NCBI NO: 38567911 NR Description: OSJNBa0088I22.7 [Oryza sativa (japonica
  misc_feature (8)..(59): Homolog of NCBI NO: 38567911 NR Description: OSJNBa0088I22.7 [Oryza sativa (japonica
  misc_feature (5)..(274): Homolog of NCBI NO: 30695337 NR Description: F-box protein (lectin-related) [Arabidopsis
  misc_feature (5)..(274): Homolog of NCBI NO: 23397334 NR Description: unknown protein [Arabidopsis thaliana]
  misc_feature (1)..(268): Homolog of NCBI NO: 15221677 NR Description: unknown protein; protein id: At1g63090.1
  misc_feature (4)..(268): Homolog of NCBI NO: 15242282 NR Description: putative protein; protein id: At5g52120.1, by cDNA: gi_18175687, supported by cDNA: gi_20465820 [Arabidopsis >gi|18175688|gb|AAL59911.1| unknown protein [Arabidopsis
  misc_feature (83)..(268): Homolog of NCBI NO: 27754673 NR Description: unknown protein [Arabidopsis thaliana]
MGPGLGDIPESCVACVFMYLTPPEICNLAGLNRSFRGAASSDSVWEKKLPENYQDLLDLLPPERYHSLSKKDIFAVLSRPIPFDDDNKEVWIDRVTGRVCMAISARGMSITGIEDRRYWNWIPTEESRFHVVAYLQQIWWFEVDGTVRFHLPPGVYSLSFRIHLGRFTKRLGRRVCHFELTHGWDLKPVRFSLSTSDGQEASCEYYLDDVERNEALGKHKRGYWIEYRVGEFIVNGSEPSTEIQWSMKQIDCTHSKGGLCVDSVFINPIGDVKEHKRKAVLKEA

SEQ ID NO: 96588 - protein, 267 aa, Arabidopsis thaliana
  peptide (1)..(267): Ceres Seq. ID no. 12733889
  misc_feature (1)..(267): Homolog of NCBI NO: 15231726 NR Description: putative protein; protein id: At3g53000.1
  misc_feature (1)..(257): Homolog of NCBI NO: 37536186 NR Description: unknown protein [Oryza sativa (japonica
  misc_feature (1)..(260): Homolog of NCBI NO: 15222051 NR Description: hypothetical protein; protein id: At1g12710.1 thaliana] >gi|9502385|gb|AAF88092.1|AC025417_20 T12C24.23 thaliana] >gi|26450401|dbj|BAC42315.1| unknown protein
  misc_feature (50)..(253): Homolog of NCBI NO: 38567911 NR Description: OSJNBa0088I22.7 [Oryza sativa (japonica
  misc_feature (1)..(42): Homolog of NCBI NO: 38567911 NR Description: OSJNBa0088I22.7 [Oryza sativa (japonica
  misc_feature (1)..(257): Homolog of NCBI NO: 30695337 NR Description: F-box protein (lectin-related) [Arabidopsis
  misc_feature (1)..(257): Homolog of NCBI NO: 23397334 NR Description: unknown protein [Arabidopsis thaliana]
  misc_feature (1)..(251): Homolog of NCBI NO: 15221677 NR Description: unknown protein; protein id: At1g63090.1
  misc_feature (1)..(251): Homolog of NCBI NO: 15242282 NR Description: putative protein; protein id: At5g52120.1, by cDNA: gi_18175687, supported by cDNA: gi_20465820 [Arabidopsis >gi|18175688|gb|AAL59911.1| unknown protein [Arabidopsis
  misc_feature (66)..(251): Homolog of NCBI NO: 27754673 NR Description: unknown protein [Arabidopsis thaliana]
MYLTPPEICNLAGLNRSFRGAASSDSVWEKKLPENYQDLLDLLPPERYHSLSKKDIFAVLSRPIPFDDDNKEVWIDRVTGRVCMAISARGMSITGIEDRRYWNWIPTEESRFHVVAYLQQIWWFEVDGTVRFHLPPGVYSLSFRIHLGRFTKRLGRRVCHFELTHGWDLKPVRFSLSTSDGQEASCEYYLDDVERNEALGKHKRGYWIEYRVGEFIVNGSEPSTEIQWSMKQIDCTHSKGGLCVDSVFINPIGDVKEHKRKAVLKEA

SEQ ID NO: 96589 - DNA, 1272 bp, Arabidopsis thaliana
  misc_feature (1)..(1272): Ceres Seq. ID no. 12733902
  misc_feature: MA Experiment ID: 20000307 Result: Up-regulated in Transcription
  misc_feature: MA Experiment 20000307 PARAMETER Experiment Name: At_Germinating_Seeds_Sub_P Parameter: Age (hr) Value: 24 vs. 0
  misc_feature: MA Experiment 20000307 PARAMETER Experiment Name: At_Germinating_Seeds_Sub_P Parameter: Organism Value: A. thaliana
  misc_feature: MA Experiment 20000307 PARAMETER Experiment Name: At_Germinating_Seeds_Sub_P Parameter: Plant Line Value: WS
  misc_feature: MA Experiment 20000307 PARAMETER Experiment Name: At_Germinating_Seeds_Sub_P Parameter: Tissue Value: Germinating Seeds
  misc_feature: MA Experiment ID: 20000315 Result: Down-regulated in Transcription
  misc_feature: MA Experiment 20000315 PARAMETER Experiment Name: At_14day_Shoots-Roots_Sub_P Parameter: Age (day) Value: 14
  misc_feature: MA Experiment 20000315 PARAMETER Experiment Name: At_14day_Shoots-Roots_Sub_P Parameter: Organism Value: A. thaliana
  misc_feature: MA Experiment 20000315 PARAMETER Experiment Name: At_14day_Shoots-Roots_Sub_P Parameter: Plant Line Value: WS
  misc_feature: MA Experiment 20000315 PARAMETER Experiment Name: At_14day_Shoots-Roots_Sub_P Parameter: Tissue Value: Shoots vs. Whole Plant
  misc_feature: MA Experiment ID: 20000328 Result: Down-regulated in Transcription
  misc_feature: MA Experiment 20000328 PARAMETER Experiment Name: At_42deg_Heat_Sub_P Parameter: Age (day) Value: 14
  misc_feature: MA Experiment 20000328 PARAMETER Experiment Name: At_42deg_Heat_Sub_P Parameter: Organism Value: A. thaliana
  misc_feature: MA Experiment 20000328 PARAMETER Experiment Name: At_42deg_Heat_Sub_P Parameter: Plant Line Value: WS
  misc_feature: MA Experiment 20000328 PARAMETER Experiment Name: At_42deg_Heat_Sub_P Parameter: Temperature (deg C) Value: 42 vs. 22
  misc_feature: MA Experiment 20000328 PARAMETER Experiment Name: At_42deg_Heat_Sub_P Parameter: Timepoint (hr) Value: 6
  misc_feature: MA Experiment 20000328 PARAMETER Experiment Name: At_42deg_Heat_Sub_P Parameter: Tissue Value: Aerial
  misc_feature: MA Experiment ID: 20000440 Result: Up-regulated in Transcription
  misc_feature: MA Experiment 20000440 PARAMETER Experiment Name: At_Closed-Flower__Sub_P Parameter: Tissue Value: Closed Flower vs. Whole Plant
atgcatgggttcgatttcaaagagatccaggagaagatctccgatagctttcgtccatggcaacgctcttttcaattctgggttcgagctactaatatctacacaggctacaaggtgtttcaacttcgagtaagtttagtaaaagatgcaaagaagcaagaggaaatgtgggaaagacaacatgaacaagctgctgataagatttacttcatgtgctctgatcttggtggtttcttccttaagattgctcaacttttagcaaaacctgacatggcaccagctgcgtgggtgaaaaagcttgtcactttgtgtgatcaagctcctgcgacgccgtttgatgcgattcaacttgttctagagaaggagttaggtaaaagcattggtgaaatctttgaaacgtttgatgaaaagcctcttggttctgcttctattgctcaggttcaacatcctggcattgaaagattgatgatgacagacataagaaacttgcaactattcgccttatacatgcagagaacagatatcaaatttgacctgcattccataacaaaggaaatggagaaacagattggttatgaatttgacttcaaaagggaggccaatgcaatggaaagaattcgatgttttctttatgagaacaacaaaaagtctcctgttttggtaccaagagttctgcgagatatggtgactaagagggttttggtgatggaatacattaatggaattccaatcctgagcattggtgatgagatggctaaaagagggataaatcctcatggtaagattgcagaggcagcaaagcacaatatacttaacagtttatcccgtgcgtatggccaaatgatactgaaaagtggtttctttcatgcggatccacatcctggaaatatcttgatttgcaaaggtcaagaggcaagtcatattttggaaatgggtttacatacagtggccaagtgtgagaatgagcagcaagaacttctgcggttagcacaaacactttttgatacaaagatgcctactggtcagacagttttacaacctttctcagatgactcttcgattaaaaagatagccgttgagacatttccagaggaactgttctctgtacttcgcactgtggttctgttaagaggactcagtgttgggatgggagttaattattcgtgtgcagaacaatggagagcaatggccgaagaggctttacttgcatctggaagagtgacaagaggtaagtggttatatcgtatagtactcactacactttttgcataa

SEQ ID NO: 96590 - protein, 423 aa, Arabidopsis thaliana
  peptide (1)..(423): Ceres Seq. ID no. 12733903
  misc_feature (121)..(225): Pfam Name: ABC1 family Pfam Description: ABC1 family
  misc_feature (1)..(423): Homolog of NCBI NO: 9758915 NR Description: contains similarity to ABC
  misc_feature (1)..(411): Homolog of NCBI NO: 30695871 NR Description: expressed protein [Arabidopsis thaliana]
  misc_feature (1)..(410): Homolog of NCBI NO: 15234008 NR Description: putative protein; protein id: At4g24810.1
  misc_feature (7)..(221): Homolog of NCBI NO: 34907760 NR Description: ABC transporter-like protein [Oryza sativa
  misc_feature (82)..(407): Homolog of NCBI NO: 34907760 NR Description: ABC transporter-like protein [Oryza sativa
  misc_feature (74)..(327): Homolog of NCBI NO: 17227685 NR Description: hypothetical protein [Nostoc sp. PCC 7120]
  misc_feature (30)..(338): Homolog of NCBI NO: 40254938 NR Description: aarF domain containing kinase 1 [Homo sapiens]
  misc_feature (61)..(297): Homolog of NCBI NO: 28207933 NR Description: unnamed protein product [Homo sapiens]
  misc_feature (12)..(384): Homolog of NCBI NO: 15218873 NR Description: hypothetical protein; protein id: At1g65950.1
  misc_feature (14)..(312): Homolog of NCBI NO: 24214035 NR Description: ABC1 family protein kinase [Leptospira serovar lai str. 56601] >gi|24194906|gb|AAN48534.1|AE011313_10 family protein kinase [Leptospira interrogans serovar lai str.
MHGFDFKEIQEKISDSFRPWQRSFQFWVRATNIYTGYKVFQLRVSLVKDAKKQEEMWERQHEQAADKIYFMCSDLGGFFLKIAQLLAKPDMAPAAWVKKLVTLCDQAPATPFDAIQLVLEKELGKSIGEIFETFDEKPLGSASIAQVQHPGIERLMMTDIRNLQLFALYMQRTDIKFDLHSITKEMEKQIGYEFDFKREANAMERIRCFLYENNKKSPVLVPRVLRDMVTKRVLVMEYINGIPILSIGDEMAKRGINPHGKIAEAAKHNILNSLSRAYGQMILKSGFFHADPHPGNILICKGQEASHILEMGLHTVAKCENEQQELLRLAQTLFDTKMPTGQTVLQPFSDDSSIKKIAVETFPEELFSVLRTVVLLRGLSVGMGVNYSCAEQWRAMAEEALLASGRVTRGKWLYRIVLTTLFA

SEQ ID NO: 96591 - protein, 368 aa, Arabidopsis thaliana
  peptide (1)..(368): Ceres Seq. ID no. 12733904
  misc_feature (66)..(170): Pfam Name: ABC1 family Pfam Description: ABC1 family
  misc_feature (1)..(368): Homolog of NCBI NO: 9758915 NR Description: contains similarity to ABC
  misc_feature (1)..(356): Homolog of NCBI NO: 30695871 NR Description: expressed protein [Arabidopsis thaliana]
  misc_feature (1)..(355): Homolog of NCBI NO: 15234008 NR Description: putative protein; protein id: At4g24810.1
  misc_feature (1)..(166): Homolog of NCBI NO: 34907760 NR Description: ABC transporter-like protein [Oryza sativa
  misc_feature (27)..(352): Homolog of NCBI NO: 34907760 NR Description: ABC transporter-like protein [Oryza sativa
  misc_feature (19)..(272): Homolog of NCBI NO: 17227685 NR Description: hypothetical protein [Nostoc sp. PCC 7120]
  misc_feature (1)..(283): Homolog of NCBI NO: 40254938 NR Description: aarF domain containing kinase 1 [Homo sapiens]
  misc_feature (6)..(242): Homolog of NCBI NO: 28207933 NR Description: unnamed protein product [Homo sapiens]
  misc_feature (1)..(329): Homolog of NCBI NO: 15218873 NR Description: hypothetical protein; protein id: At1g65950.1
  misc_feature (1)..(257): Homolog of NCBI NO: 24214035 NR Description: ABC1 family protein kinase [Leptospira serovar lai str. 56601] >gi|24194906|gb|AAN48534.1|AE011313_10 family protein kinase [Leptospira interrogans serovar lai str.
MWERQHEQAADKIYFMCSDLGGFFLKIAQLLAKPDMAPAAWVKKLVTLCDQAPATPFDAIQLVLEKELGKSIGEIFETFDEKPLGSASIAQVQHPGIERLMMTDIRNLQLFALYMQRTDIKFDLHSITKEMEKQIGYEFDFKREANAMERIRCFLYENNKKSPVLVPRVLRDMVTKRVLVMEYINGIPILSIGDEMAKRGINPHGKIAEAAKHNILNSLSRAYGQMILKSGFFHADPHPGNILICKGQEASHILEMGLHTVAKCENEQQELLRLAQTLFDTKMPTGQTVLQPFSDDSSIKKIAVETFPEELFSVLRTVVLLRGLSVGMGVNYSCAEQWRAMAEEALLASGRVTRGKWLYRIVLTTLFA

SEQ ID NO: 96592 - protein, 353 aa, Arabidopsis thaliana
  peptide (1)..(353): Ceres Seq. ID no. 12733905
  misc_feature (51)..(155): Pfam Name: ABC1 family Pfam Description: ABC1 family
  misc_feature (1)..(353): Homolog of NCBI NO: 9758915 NR Description: contains similarity to ABC
  misc_feature (1)..(341): Homolog of NCBI NO: 30695871 NR Description: expressed protein [Arabidopsis thaliana]
  misc_feature (1)..(340): Homolog of NCBI NO: 15234008 NR Description: putative protein; protein id: At4g24810.1
  misc_feature (1)..(151): Homolog of NCBI NO: 34907760 NR Description: ABC transporter-like protein [Oryza sativa
  misc_feature (12)..(337): Homolog of NCBI NO: 34907760 NR Description: ABC transporter-like protein [Oryza sativa
  misc_feature (4)..(257): Homolog of NCBI NO: 17227685 NR Description: hypothetical protein [Nostoc sp. PCC 7120]
  misc_feature (1)..(268): Homolog of NCBI NO: 40254938 NR Description: aarF domain containing kinase 1 [Homo sapiens]
  misc_feature (1)..(227): Homolog of NCBI NO: 28207933 NR Description: unnamed protein product [Homo sapiens]
  misc_feature (1)..(314): Homolog of NCBI NO: 15218873 NR Description: hypothetical protein; protein id: At1g65950.1
  misc_feature (1)..(242): Homolog of NCBI NO: 24214035 NR Description: ABC1 family protein kinase [Leptospira serovar lai str. 56601] >gi|24194906|gb|AAN48534.1|AE011313_10 family protein kinase [Leptospira interrogans serovar lai str.
MCSDLGGFFLKIAQLLAKPDMAPAAWVKKLVTLCDQAPATPFDAIQLVLEKELGKSIGEIFETFDEKPLGSASIAQVQHPGIERLMMTDIRNLQLFALYMQRTDIKFDLHSITKEMEKQIGYEFDFKREANAMERIRCFLYENNKKSPVLVPRVLRDMVTKRVLVMEYINGIPILSIGDEMAKRGINPHGKIAEAAKHNILNSLSRAYGQMILKSGFFHADPHPGNILICKGQEASHILEMGLHTVAKCENEQQELLRLAQTLFDTKMPTGQTVLQPFSDDSSIKKIAVETFPEELFSVLRTVVLLRGLSVGMGVNYSCAEQWRAMAEEALLASGRVTRGKWLYRIVLTTLFA

SEQ ID NO: 96593 - DNA, 609 bp, Arabidopsis thaliana
  misc_feature (1)..(609): Ceres Seq. ID no. 12733918
  misc_feature: MA Experiment ID: 20001451 Result: Up-regulated in Transcription
  misc_feature: MA Experiment 20001451 PARAMETER Experiment Name: At_Far-red-induction_P Parameter: Age (day) Value: 7
  misc_feature: MA Experiment 20001451 PARAMETER Experiment Name: At_Far-red-induction_P Parameter: Light Value: Far-red vs. White
  misc_feature: MA Experiment 20001451 PARAMETER Experiment Name: At_Far-red-induction_P Parameter: Organism Value: A. thaliana
  misc_feature: MA Experiment 20001451 PARAMETER Experiment Name: At_Far-red-induction_P Parameter: Plant Line Value: Columbia
  misc_feature: MA Experiment 20001451 PARAMETER Experiment Name: At_Far-red-induction_P Parameter: Timepoint (hr) Value: 24
  misc_feature: MA Experiment 20001451 PARAMETER Experiment Name: At_Far-red-induction_P Parameter: Tissue Value: Whole Plant
atggctgagaacaacaacaacaacggcgacaacatgaacaacgacaaccaccagcaaccaccgtcgtactcgcagctgccgccgatggcatcatccaaccctcagttacgtaattactggattgagcagatggaaaccgtctcggatttcaaaaaccgtcagcttccattggctcgaattaagaagatcatgaaggctgatccagatgtgcacatggtctccgcagaggctccgatcatcttcgcaaaggcttgcgaaatgttcatcgttgatctcacgatgcggtcgtggctcaaagccgaggagaacaaacgccacacgcttcagaaatcggatatctccaacgcagtggctagctctttcacctacgatttccttcttgatgttgtccctaaggacgagtctatcgccaccgctgatcctggctttgtggctatgccacatcctgacggtggaggagtaccgcaatattattatccaccgggagtggtgatgggaactcctatggttggtagtggaatgtacgcgccatcgcaggcgtggccagcagcggctggtgacggggaggatgatgctgaggataatggaggaaacggcggcggaaattga

SEQ ID NO: 96594 - protein, 202 aa, Arabidopsis thaliana
  peptide (1)..(202): Ceres Seq. ID no. 12733919
  misc_feature (1)..(202): Homolog of NCBI NO: 15241171 NR Description: transcription factor Hap5a-like; protein id:
  misc_feature (1)..(202): Homolog of NCBI NO: 15241170 NR Description: putative protein; protein id: At5g50470.1 thaliana] >gi|9758756|dbj|BAB09132.1| contains similarity to
  misc_feature (22)..(202): Homolog of NCBI NO: 15228405 NR Description: transcription factor Hap5a; protein id: supported by cDNA: 21604., supported by cDNA: gi_20260195
  misc_feature (24)..(202): Homolog of NCBI NO: 15241083 NR Description: transcription factor - like protein; protein id:
  misc_feature (35)..(202): Homolog of NCBI NO: 15242784 NR Description: transcription factor Hap5a-like protein; protein At5g63470.1, supported by cDNA: gi_18252934 [Arabidopsis
  misc_feature (13)..(200): Homolog of NCBI NO: 15241172 NR Description: putative protein; protein id: At5g50490.1 thaliana] >gi|9758758|dbj|BAB09134.1| contains similarity to
  misc_feature (21)..(178): Homolog of NCBI NO: 15221912 NR Description: heme activated protein, putative; protein id: [Arabidopsis thaliana] >gi|3776575|gb|AAC64892.1| Similar to
  misc_feature (35)..(159): Homolog of NCBI NO: 5257260 NR Description: Similar to sequence of BAC F7G19 from Arabidopsis
  misc_feature (35)..(159): Homolog of NCBI NO: 15223482 NR Description: transcription factor, putative; protein id: supported by cDNA: 26157., supported by cDNA: gi_18252952 thaliana] >gi|18252953|gb|AAL62403.1| transcription putative
  misc_feature (35)..(178): Homolog of NCBI NO: 15223986 NR Description: putative transcription factor; protein id: supported by cDNA: 1911. [Arabidopsis thaliana] putative transcription factor [Arabidopsis thaliana]
MAENNNNNGDNMNNDNHQQPPSYSQLPPMASSNPQLRNYWIEQMETVSDFKNRQLPLARIKKIMKADPDVHMVSAEAPIIFAKACEMFIVDLTMRSWLKAEENKRHTLQKSDISNAVASSFTYDFLLDVVPKDESIATADPGFVAMPHPDGGGVPQYYYPPGVVMGTPMVGSGMYAPSQAWPAAAGDGEDDAEDNGGNGGGN

SEQ ID NO: 96595 - protein, 191 aa, Arabidopsis thaliana
  peptide (1)..(191): Ceres Seq. ID no. 12733920
  misc_feature (1)..(191): Homolog of NCBI NO: 15241171 NR Description: transcription factor Hap5a-like; protein id:
  misc_feature (1)..(191): Homolog of NCBI NO: 15241170 NR Description: putative protein; protein id: At5g50470.1 thaliana] >gi|9758756|dbj|BAB09132.1| contains similarity to
  misc_feature (11)..(191): Homolog of NCBI NO: 15228405 NR Description: transcription factor Hap5a; protein id: supported by cDNA: 21604., supported by cDNA: gi_20260195
  misc_feature (13)..(191): Homolog of NCBI NO: 15241083 NR Description: transcription factor - like protein; protein id:
  misc_feature (24)..(191): Homolog of NCBI NO: 15242784 NR Description: transcription factor Hap5a-like protein; protein At5g63470.1, supported by cDNA: gi_18252934 [Arabidopsis
  misc_feature (2)..(189): Homolog of NCBI NO: 15241172 NR Description: putative protein; protein id: At5g50490.1 thaliana] >gi|9758758|dbj|BAB09134.1| contains similarity to
  misc_feature (10)..(167): Homolog of NCBI NO: 15221912 NR Description: heme activated protein, putative; protein id: [Arabidopsis thaliana] >gi|3776575|gb|AAC64892.1| Similar to
  misc_feature (24)..(148): Homolog of NCBI NO: 5257260 NR Description: Similar to sequence of BAC F7G19 from Arabidopsis
  misc_feature (24)..(148): Homolog of NCBI NO: 15223482 NR Description: transcription factor, putative; protein id: supported by cDNA: 26157., supported by cDNA: gi_18252952 thaliana] >gi|18252953|gb|AAL62403.1| transcription putative
  misc_feature (24)..(167): Homolog of NCBI NO: 15223986 NR Description: putative transcription factor; protein id: supported by cDNA: 1911. [Arabidopsis thaliana] putative transcription factor [Arabidopsis thaliana]
MNNDNHQQPPSYSQLPPMASSNPQLRNYWIEQMETVSDFKNRQLPLARIKKIMKADPDVHMVSAEAPIIFAKACEMFIVDLTMRSWLKAEENKRHTLQKSDISNAVASSFTYDFLLDVVPKDESIATADPGFVAMPHPDGGGVPQYYYPPGVVMGTPMVGSGMYAPSQAWPAAAGDGEDDAEDNGGNGGGN

SEQ ID NO: 96596 - protein, 174 aa, Arabidopsis thaliana
  peptide (1)..(174): Ceres Seq. ID no. 12733921
  misc_feature (1)..(174): Homolog of NCBI NO: 15241171 NR Description: transcription factor Hap5a-like; protein id:
  misc_feature (1)..(174): Homolog of NCBI NO: 15241170 NR Description: putative protein; protein id: At5g50470.1 thaliana] >gi|9758756|dbj|BAB09132.1| contains similarity to
  misc_feature (1)..(174): Homolog of NCBI NO: 15228405 NR Description: transcription factor Hap5a; protein id: supported by cDNA: 21604., supported by cDNA: gi_20260195
  misc_feature (1)..(174): Homolog of NCBI NO: 15241083 NR Description: transcription factor - like protein; protein id:
  misc_feature (7)..(174): Homolog of NCBI NO: 15242784 NR Description: transcription factor Hap5a-like protein; protein At5g63470.1, supported by cDNA: gi_18252934 [Arabidopsis
  misc_feature (1)..(172): Homolog of NCBI NO: 15241172 NR Description: putative protein; protein id: At5g50490.1 thaliana] >gi|9758758|dbj|BAB09134.1| contains similarity to
  misc_feature (1)..(150): Homolog of NCBI NO: 15221912 NR Description: heme activated protein, putative; protein id: [Arabidopsis thaliana] >gi|3776575|gb|AAC64892.1| Similar to
  misc_feature (7)..(131): Homolog of NCBI NO: 5257260 NR Description: Similar to sequence of BAC F7G19 from Arabidopsis
  misc_feature (7)..(131): Homolog of NCBI NO: 15223482 NR Description: transcription factor, putative; protein id: supported by cDNA: 26157., supported by cDNA: gi_18252952 thaliana] >gi|18252953|gb|AAL62403.1| transcription putative
  misc_feature (7)..(150): Homolog of NCBI NO: 15223986 NR Description: putative transcription factor; protein id: supported by cDNA: 1911. [Arabidopsis thaliana] putative transcription factor [Arabidopsis thaliana]
MASSNPQLRNYWIEQMETVSDFKNRQLPLARIKKIMKADPDVHMVSAEAPIIFAKACEMFIVDLTMRSWLKAEENKRHTLQKSDISNAVASSFTYDFLLDVVPKDESIATADPGFVAMPHPDGGGVPQYYYPPGVVMGTPMVGSGMYAPSQAWPAAAGDGEDDAEDNGGNGGGN

SEQ ID NO: 96597 - DNA, 1740 bp, Arabidopsis thaliana
  misc_feature (1)..(1740): Ceres Seq. ID no. 12733934
  misc_feature: MA Experiment ID: 20000171 Result: Down-regulated in Transcription
  misc_feature: MA Experiment 20000171 PARAMETER Experiment Name: At_42deg_Heat_P Parameter: Age (day) Value: 14
  misc_feature: MA Experiment 20000171 PARAMETER Experiment Name: At_42deg_Heat_P Parameter: Organism Value: A. thaliana
  misc_feature: MA Experiment 20000171 PARAMETER Experiment Name: At_42deg_Heat_P Parameter: Plant Line Value: WS
  misc_feature: MA Experiment 20000171 PARAMETER Experiment Name: At_42deg_Heat_P Parameter: Temperature (deg C) Value: 42 vs. 22
  misc_feature: MA Experiment 20000171 PARAMETER Experiment Name: At_42deg_Heat_P Parameter: Timepoint (hr) Value: 1
  misc_feature: MA Experiment 20000171 PARAMETER Experiment Name: At_42deg_Heat_P Parameter: Tissue Value: Aerial
  misc_feature: MA Experiment ID: 20000173 Result: Down-regulated in Transcription
  misc_feature: MA Experiment 20000173 PARAMETER Experiment Name: At_42deg_Heat_P Parameter: Age (day) Value: 14
  misc_feature: MA Experiment 20000173 PARAMETER Experiment Name: At_42deg_Heat_P Parameter: Organism Value: A. thaliana
  misc_feature: MA Experiment 20000173 PARAMETER Experiment Name: At_42deg_Heat_P Parameter: Plant Line Value: WS
  misc_feature: MA Experiment 20000173 PARAMETER Experiment Name: At_42deg_Heat_P Parameter: Temperature (deg C) Value: 42 vs. 22
  misc_feature: MA Experiment 20000173 PARAMETER Experiment Name: At_42deg_Heat_P Parameter: Timepoint (hr) Value: 6
  misc_feature: MA Experiment 20000173 PARAMETER Experiment Name: At_42deg_Heat_P Parameter: Tissue Value: Aerial
  misc_feature: MA Experiment ID: 20000182 Result: Up-regulated in Transcription
  misc_feature: MA Experiment 20000182 PARAMETER Experiment Name: At_2mM_SA_P Parameter: Age (day) Value: 14
  misc_feature: MA Experiment 20000182 PARAMETER Experiment Name: At_2mM_SA_P Parameter: Organism Value: A. thaliana
  misc_feature: MA Experiment 20000182 PARAMETER Experiment Name: At_2mM_SA_P Parameter: Plant Line Value: WS
  misc_feature: MA Experiment 20000182 PARAMETER Experiment Name: At_2mM_SA_P Parameter: Timepoint (hr) Value: 6
  misc_feature: MA Experiment 20000182 PARAMETER Experiment Name: At_2mM_SA_P Parameter: Tissue Value: Aerial
  misc_feature: MA Experiment 20000182 PARAMETER Experiment Name: At_2mM_SA_P Parameter: Treatment Value: 2mM SA vs. No Treatment
  misc_feature: MA Experiment ID: 20000234 Result: Down-regulated in Transcription
  misc_feature: MA Experiment 20000234 PARAMETER Experiment Name: At_Siliques_P Parameter: Age (day) Value: 21
  misc_feature: MA Experiment 20000234 PARAMETER Experiment Name: At_Siliques_P Parameter: Organism Value: A. thaliana
  misc_feature: MA Experiment 20000234 PARAMETER Experiment Name: At_Siliques_P Parameter: Plant Line Value: WS
  misc_feature: MA Experiment 20000234 PARAMETER Experiment Name: At_Siliques_P Parameter: Tissue Value: Less Than 5mm Siliques vs. Whole Plant
  misc_feature: MA Experiment ID: 20000235 Result: Down-regulated in Transcription
  misc_feature: MA Experiment 20000235 PARAMETER Experiment Name: At_Siliques_P Parameter: Age (day) Value: 21
  misc_feature: MA Experiment 20000235 PARAMETER Experiment Name: At_Siliques_P Parameter: Organism Value: A. thaliana
  misc_feature: MA Experiment 20000235 PARAMETER Experiment Name: At_Siliques_P Parameter: Plant Line Value: WS
  misc_feature: MA Experiment 20000235 PARAMETER Experiment Name: At_Siliques_P Parameter: Tissue Value: 5-10mm Siliques vs. Whole Plant
  misc_feature: MA Experiment ID: 20000264 Result: Down-regulated in Transcription
  misc_feature: MA Experiment 20000264 PARAMETER Experiment Name: At_Open_Flower_P Parameter: Age (day) Value: 21
  misc_feature: MA Experiment 20000264 PARAMETER Experiment Name: At_Open_Flower_P Parameter: Plant Line Value: WS
  misc_feature: MA Experiment 20000264 PARAMETER Experiment Name: At_Open_Flower_P Parameter: Tissue Value: Open Flower vs. Whole Plant
  misc_feature: MA Experiment ID: 20000265 Result: Down-regulated in Transcription
  misc_feature: MA Experiment 20000265 PARAMETER Experiment Name: At_Open_Flower_P Parameter: Age (day) Value: 21
  misc_feature: MA Experiment 20000265 PARAMETER Experiment Name: At_Open_Flower_P Parameter: Plant Line Value: WS
  misc_feature: MA Experiment 20000265 PARAMETER Experiment Name: At_Open_Flower_P Parameter: Tissue Value: Closed Flower vs. Whole Plant
  misc_feature: MA Experiment ID: 20000286 Result: Down-regulated in Transcription
  misc_feature: MA Experiment 20000286 PARAMETER Experiment Name: At_Open_Flower_P Parameter: Age (day) Value: 21
  misc_feature: MA Experiment 20000286 PARAMETER Experiment Name: At_Open_Flower_P Parameter: Plant Line Value: WS
  misc_feature: MA Experiment 20000286 PARAMETER Experiment Name: At_Open_Flower_P Parameter: Tissue Value: Half Open vs. Whole Plant
  misc_feature: MA Experiment ID: 20000794 Result: Down-regulated in Transcription
  misc_feature: MA Experiment 20000794 PARAMETER Experiment Name: At_Petals_P Parameter: Age (day) Value: 23-25 days
  misc_feature: MA Experiment 20000794 PARAMETER Experiment Name: At_Petals_P Parameter: Plant Line Value: WS
  misc_feature: MA Experiment 20000794 PARAMETER Experiment Name: At_Petals_P Parameter: Tissue Value: Petals vs. Whole plant
  misc_feature: MA Experiment ID: 20001560 Result: Down-regulated in Transcription
  misc_feature: MA Experiment 20001560 PARAMETER Experiment Name: At_Drought_Soil_Dry_P Parameter: Age (day) Value: 28
  misc_feature: MA Experiment 20001560 PARAMETER Experiment Name: At_Drought_Soil_Dry_P Parameter: Organism Value: A. thaliana
  misc_feature: MA Experiment 20001560 PARAMETER Experiment Name: At_Drought_Soil_Dry_P Parameter: Plant Line Value: WS
  misc_feature: MA Experiment 20001560 PARAMETER Experiment Name: At_Drought_Soil_Dry_P Parameter: Post Timepoint (hr) Value: None
  misc_feature: MA Experiment 20001560 PARAMETER Experiment Name: At_Drought_Soil_Dry_P Parameter: Post-Treatment Value: None
  misc_feature: MA Experiment 20001560 PARAMETER Experiment Name: At_Drought_Soil_Dry_P Parameter: Timepoint (day) Value: 14
  misc_feature: MA Experiment 20001560 PARAMETER Experiment Name: At_Drought_Soil_Dry_P Parameter: Treatment Value: Drought vs. No Drought
aaagttttgagagcgtttgactatgatgactttgtggcgtcacaaactagagctcctagtcaacgaccgatggctagttttcgtctgcgccatgtgggtccaatccgtcgccggcgttggctatctattcggcggctctatgtctccggcaatcaagacttcccttggctacaatcagaaacagatcgctcttctcggcgtagctaaaaacctcggtgacgccatcggattcgtctccggtgctttatctgaagtctcaccttcctgggtggttctactcgtcggtgcaactcagaaccttttcggctacggtgttgtttggctcgtcgtcactggccaattgcctaatttgcctctctggatgttgtttgttgctatattcgtgggaacaaatggggaaacatactacaatacagcgtcgcttgtgtcatgcattcataacttcccagaaagccgaggtcctgtggtgggaatcctgaaagggttttctggcttgagtggagcaatcttgactcaggtttatttgatgttcaacccttctcatgattcttcggttattctcatggttgctcttggaccaccagtcgtggttcttgctctactatttattgttagacccgtggaaagaagttgcagaacgaacttgcgatctgatgatttaagattcctggctatttacggtttctgtgttgtccttgcggtatatttactaggattgttggtacttcagagtgtttttgatatgactcaaacgattatcacaacctctggagccatccttgtcattttcatggttgttccagttcttgtccctttttcatcggttttcatctcgggtaataatgtcacctcagtgaagcctgaagaaggaacttccaatgtggatcagcatgaggctagaactttaattgagagaagtgacagaccgccggaaaagaaaagagcgccgtgtataggagaagatttcaccttgttacaagctttgggacaagctgacttctggcttatatttatgtctctggttctaggtgtaggttcgggaatcacgattatagacaatcttggtcagatttgttattccctcgggtacagcaacaccaaaatatttgtctcactgatcagcatctccaattttctcggccgtgttgctggtggctacttctctgagctaatcataaggaaactctcacttccaagaacgttggcaatgtctgtggttcaggcgataatgtctttggggctcatctactatgccatagattggccagggaagatctacgtagtgaccattgtgataggaatgggttatggcgctcattgggcgattgctcctgcttcagtctctgacatttttggcctgaagagcttcggttctctttacaatttccagattacagctttgcctattgggtcatttgtgttctcaggtgtgatcgctagtaacatctatgactactacgccagaaagcaagccggacccaccacagagactgagtcgctcgtctgcacgggctcggtgtgttattcagtcacgtgcagtctcatgtccatgttgtgtctaatggctatggttttgagtttgagtgtggtttataggacgaggaagttttacttgaggcttcatcaccgagtctcaaagacttgaagatagtgtaattgtgtaagcaattttcatttggtctttggaagatatatgtaagcaattttgaattccatactcaaaatctttaattggtgttc

SEQ ID NO: 96598 - protein, 540 aa, Arabidopsis thaliana
  peptide (1)..(540): Ceres Seq. ID no. 12733935
  misc_feature (304)..(499): Pfam Name: Sugar (and other) transporter Pfam Description: Sugar (and other) transporter
  misc_feature (1)..(540): Homolog of NCBI NO: 18423161 NR Description: nodulin-like protein; protein id: At5g50520.1,
  misc_feature (1)..(274): Homolog of NCBI NO: 15241312 NR Description: nodulin-like protein; protein id: At5g14120.1
  misc_feature (305)..(534): Homolog of NCBI NO: 15241312 NR Description: nodulin-like protein; protein id: At5g14120.1
  misc_feature (6)..(267): Homolog of NCBI NO: 18395988 NR Description: unknown protein; protein id: At3g01930.1 thaliana] >gi|6091732|gb|AAF03444.1|AC010797_20 unknown protein thaliana] >gi|6513938|gb|AAF14842.1|AC011664_24 unknown protein
  misc_feature (304)..(534): Homolog of NCBI NO: 18395988 NR Description: unknown protein; protein id: At3g01930.1 thaliana] >gi|6091732|gb|AAF03444.1|AC010797_20 unknown protein thaliana] >gi|6513938|gb|AAF14842.1|AC011664_24 unknown protein
  misc_feature (6)..(267): Homolog of NCBI NO: 11358583 NR Description: nodulin-like protein [imported] - Arabidopsis
  misc_feature (304)..(514): Homolog of NCBI NO: 11358583 NR Description: nodulin-like protein [imported] - Arabidopsis
  misc_feature (6)..(267): Homolog of NCBI NO: 1532169 NR Description: similar to a E. coli hypothetical protein F402
  misc_feature (304)..(386): Homolog of NCBI NO: 1532169 NR Description: similar to a E. coli hypothetical protein F402
  misc_feature (304)..(534): Homolog of NCBI NO: 30678455 NR Description: expressed protein [Arabidopsis thaliana]
MMTLWRHKLELLVNDRWLVFVCAMWVQSVAGVGYLFGGSMSPAIKTSLGYNQKQIALLGVAKNLGDAIGFVSGALSEVSPSWVVLLVGATQNLFGYGVVWLVVTGQLPNLPLWMLFVAIFVGTNGETYYNTASLVSCIHNFPESRGPVVGILKGFSGLSGAILTQVYLMFNPSHDSSVILMVALGPPVVVLALLFIVRPVERSCRTNLRSDDLRFLAIYGFCVVLAVYLLGLLVLQSVFDMTQTIITTSGAILVIFMVVPVLVPFSSVFISGNNVTSVKPEEGTSNVDQHEARTLIERSDRPPEKKRAPCIGEDFTLLQALGQADFWLIFMSLVLGVGSGITIIDNLGQICYSLGYSNTKIFVSLISISNFLGRVAGGYFSELIIRKLSLPRTLAMSVVQAIMSLGLIYYAIDWPGKIYVVTIVIGMGYGAHWAIAPASVSDIFGLKSFGSLYNFQITALPIGSFVFSGVIASNIYDYYARKQAGPTTETESLVCTGSVCYSVTCSLMSMLCLMAMVLSLSVVYRTRKFYLRLHHRVSKT

SEQ ID NO: 96599 - protein, 539 aa, Arabidopsis thaliana
  peptide (1)..(539): Ceres Seq. ID no. 12733936
  misc_feature (303)..(498): Pfam Name: Sugar (and other) transporter Pfam Description: Sugar (and other) transporter
  misc_feature (1)..(539): Homolog of NCBI NO: 18423161 NR Description: nodulin-like protein; protein id: At5g50520.1,
  misc_feature (1)..(273): Homolog of NCBI NO: 15241312 NR Description: nodulin-like protein; protein id: At5g14120.1
  misc_feature (304)..(533): Homolog of NCBI NO: 15241312 NR Description: nodulin-like protein; protein id: At5g14120.1
  misc_feature (5)..(266): Homolog of NCBI NO: 18395988 NR Description: unknown protein; protein id: At3g01930.1 thaliana] >gi|6091732|gb|AAF03444.1|AC010797_20 unknown protein thaliana] >gi|6513938|gb|AAF14842.1|AC011664_24 unknown protein
  misc_feature (303)..(533): Homolog of NCBI NO: 18395988 NR Description: unknown protein; protein id: At3g01930.1 thaliana] >gi|6091732|gb|AAF03444.1|AC010797_20 unknown protein thaliana] >gi|6513938|gb|AAF14842.1|AC011664_24 unknown protein
  misc_feature (5)..(266): Homolog of NCBI NO: 11358583 NR Description: nodulin-like protein [imported] - Arabidopsis
  misc_feature (303)..(513): Homolog of NCBI NO: 11358583 NR Description: nodulin-like protein [imported] - Arabidopsis
  misc_feature (5)..(266): Homolog of NCBI NO: 1532169 NR Description: similar to a E. coli hypothetical protein F402
  misc_feature (303)..(385): Homolog of NCBI NO: 1532169 NR Description: similar to a E. coli hypothetical protein F402
  misc_feature (303)..(533): Homolog of NCBI NO: 30678455 NR Description: expressed protein [Arabidopsis thaliana]
MTLWRHKLELLVNDRWLVFVCAMWVQSVAGVGYLFGGSMSPAIKTSLGYNQKQIALLGVAKNLGDAIGFVSGALSEVSPSWVVLLVGATQNLFGYGVVWLVVTGQLPNLPLWMLFVAIFVGTNGETYYNTASLVSCIHNFPESRGPVVGILKGFSGLSGAILTQVYLMFNPSHDSSVILMVALGPPVVVLALLFIVRPVERSCRTNLRSDDLRFLAIYGFCVVLAVYLLGLLVLQSVFDMTQTIITTSGAILVIFMVVPVLVPFSSVFISGNNVTSVKPEEGTSNVDQHEARTLIERSDRPPEKKRAPCIGEDFTLLQALGQADFWLIFMSLVLGVGSGITIIDNLGQICYSLGYSNTKIFVSLISISNFLGRVAGGYFSELIIRKLSLPRTLAMSVVQAIMSLGLIYYAIDWPGKIYVVTIVIGMGYGAHWAIAPASVSDIFGLKSFGSLYNFQITALPIGSFVFSGVIASNIYDYYARKQAGPTTETESLVCTGSVCYSVTCSLMSMLCLMAMVLSLSVVYRTRKFYLRLHHRVSKT

SEQ ID NO: 96600 - protein, 517 aa, Arabidopsis thaliana
  peptide (1)..(517): Ceres Seq. ID no. 12733937
  misc_feature (281)..(476): Pfam Name: Sugar (and other) transporter Pfam Description: Sugar (and other) transporter
  misc_feature (1)..(517): Homolog of NCBI NO: 18423161 NR Description: nodulin-like protein; protein id: At5g50520.1,
  misc_feature (1)..(251): Homolog of NCBI NO: 15241312 NR Description: nodulin-like protein; protein id: At5g14120.1
  misc_feature (282)..(511): Homolog of NCBI NO: 15241312 NR Description: nodulin-like protein; protein id: At5g14120.1
  misc_feature (1)..(244): Homolog of NCBI NO: 18395988 NR Description: unknown protein; protein id: At3g01930.1 thaliana] >gi|6091732|gb|AAF03444.1|AC010797_20 unknown protein thaliana] >gi|6513938|gb|AAF14842.1|AC011664_24 unknown protein
  misc_feature (281)..(511): Homolog of NCBI NO: 18395988 NR Description: unknown protein; protein id: At3g01930.1 thaliana] >gi|6091732|gb|AAF03444.1|AC010797_20 unknown protein thaliana] >gi|6513938|gb|AAF14842.1|AC011664_24 unknown protein
  misc_feature (1)..(244): Homolog of NCBI NO: 11358583 NR Description: nodulin-like protein [imported] - Arabidopsis
  misc_feature (281)..(491): Homolog of NCBI NO: 11358583 NR Description: nodulin-like protein [imported] - Arabidopsis
  misc_feature (1)..(244): Homolog of NCBI NO: 1532169 NR Description: similar to a E. coli hypothetical protein F402
  misc_feature (281)..(363): Homolog of NCBI NO: 1532169 NR Description: similar to a E. coli hypothetical protein F402
  misc_feature (281)..(511): Homolog of NCBI NO: 30678455 NR Description: expressed protein [Arabidopsis thaliana]
MWVQSVAGVGYLFGGSMSPAIKTSLGYNQKQIALLGVAKNLGDAIGFVSGALSEVSPSWVVLLVGATQNLFGYGVVWLVVTGQLPNLPLWMLFVAIFVGTNGETYYNTASLVSCIHNFPESRGPVVGILKGFSGLSGAILTQVYLMFNPSHDSSVILMVALGPPVVVLALLFIVRPVERSCRTNLRSDDLRFLAIYGFCVVLAVYLLGLLVLQSVFDMTQTIITTSGAILVIFMVVPVLVPFSSVFISGNNVTSVKPEEGTSNVDQHEARTLIERSDRPPEKKRAPCIGEDFTLLQALGQADFWLIFMSLVLGVGSGITIIDNLGQICYSLGYSNTKIFVSLISISNFLGRVAGGYFSELIIRKLSLPRTLAMSVVQAIMSLGLIYYAIDWPGKIYVVTIVIGMGYGAHWAIAPASVSDIFGLKSFGSLYNFQITALPIGSFVFSGVIASNIYDYYARKQAGPTTETESLVCTGSVCYSVTCSLMSMLCLMAMVLSLSVVYRTRKFYLRLHHRVSKT

SEQ ID NO: 96601 - DNA, 1152 bp, Arabidopsis thaliana
  misc_feature (1)..(1152): Ceres Seq. ID no. 12733944
  misc_feature: MA Experiment ID: 108434 Result: Up-regulated in Transcription
  misc_feature: MA Experiment 108434 PARAMETER Experiment Name: At_Root_Tips_cDNA_P Parameter: Tissue Value: Root Tips
  misc_feature: MA Experiment ID: 108464 Result: Down-regulated in Transcription
  misc_feature: MA Experiment 108464 PARAMETER Experiment Name: At_Germinating_Seeds_cDNA_P Parameter: Age (day) Value: 4 vs. 0
  misc_feature: MA Experiment 108464 PARAMETER Experiment Name: At_Germinating_Seeds_cDNA_P Parameter: Tissue Value: Germinating Seeds
  misc_feature: MA Experiment ID: 20000224 Result: Down-regulated in Transcription
atggcgagtaatcaacaaccaccgtcgaatctacagacctacggtgtaccaatttacgccgtcgactggattctagaggaagctgtcagatccaaaatcactaaggatcaggatgatgatgatgatgatggatcgtcgtcgtcgtcgtacatcgttttatccggcggaggaggagaaggacgaagtggaatacctaatgtcatcttaatctgtcgtgttgatctccacaccaattctctctctgaacaacctattggtaggcgtgtgattggcactgatctaccttatcgtatggctattcatcctcgtcaaggtggtcttatttgtgcattgcctaacagttgcagactgtttgattgggaaaacattatagaggatgataatgaggaagagtcagagaaagttgttaaagagttaaaagatgttggacaacagttgtctctctcgtttaatcaggatgggactgttctagctactggtgcagaggatgggactttgagggtttttgaatggccaagcatgaagactttacttaatgagtctaagacacatgcatcagttaaaagcctaactttcagcgaaagtggtaagtttcttgtatctcttggagctccactttgtcgggtttgggatgtgaatgcttctgctgctattgccagtctatcaaaagagaaggacgagatgtttgcctcgtgtagattctctgtagacaattcaggcagtgaagttctttatgttgctgcaaacactcaacgtggtgggagtattataacatgggatacaacatcatggagaagaagaagttcaaagcttattaaaagaaacaactctatatctgcctttaatgtctcagctgatgggaagcttcttgcagtaggaaccctcgaaggagatgttttaataattgattcgacaaagatgcaaactaaccaaatcgtcaagaaagctcatctcggtttggtcaccgcactgactttctcccctgattcaaggtgcttagtgtcagtatcttttgactcaagggcaaggctaaccgtgatcaaacaaaagggtgaaaaacgtcgagtatatctgtgggtggcggcattgttgtttgtgttggtatacgtggttttgtattatttgatggtggcaatggggatcatacattag

SEQ ID NO: 96602 - protein, 383 aa, Arabidopsis thaliana
  peptide (1)..(383): Ceres Seq. ID no. 12733945
  misc_feature (1)..(383): Homolog of NCBI NO: 18423177 NR Description: St12p protein; protein id: At5g50550.1 thaliana] >gi|22327692|ref|NP_680414.1| St12p protein; protein At5g50650.1 [Arabidopsis thaliana] >gi|9758764|dbj|BAB09140.1|
  misc_feature (1)..(359): Homolog of NCBI NO: 8777388 NR Description: protein transport protein SEC12p-like
  misc_feature (3)..(382): Homolog of NCBI NO: 11358859 NR Description: St12p protein [imported] - Arabidopsis thaliana
  misc_feature (3)..(382): Homolog of NCBI NO: 15226281 NR Description: putative protein transport protein SEC12p; id: At2g01470.1, supported by cDNA: gi_166877, supported by cDNA: [Arabidopsis thaliana] >gi|25410908|pir||B84425 probable protein
  misc_feature (3)..(353): Homolog of NCBI NO: 322598 NR Description: St12p protein - Arabidopsis thaliana
  misc_feature (3)..(261): Homolog of NCBI NO: 17473926 NR Description: putative protein transport protein SEC12p
  misc_feature (60)..(375): Homolog of NCBI NO: 34394605 NR Description: transducin / WD-40 repeat protein-like [Oryza
  misc_feature (72)..(373): Homolog of NCBI NO: 34897162 NR Description: putative membrane protein [Oryza sativa (japonica group)] >gi|28209528|gb|AAO37546.1| putative membrane protein
  misc_feature (65)..(367): Homolog of NCBI NO: 18409509 NR Description: expressed protein; protein id: At3g52190.1, by cDNA: 124263. [Arabidopsis thaliana] >gi|11357774|pir||T49098
  misc_feature (148)..(367): Homolog of NCBI NO: 26450470 NR Description: unknown protein [Arabidopsis thaliana]
MASNQQPPSNLQTYGVPIYAVDWILEEAVRSKITKDQDDDDDDGSSSSSYIVLSGGGGEGRSGIPNVILICRVDLHTNSLSEQPIGRRVIGTDLPYRMAIHPRQGGLICALPNSCRLFDWENIIEDDNEEESEKVVKELKDVGQQLSLSFNQDGTVLATGAEDGTLRVFEWPSMKTLLNESKTHASVKSLTFSESGKFLVSLGAPLCRVWDVNASAAIASLSKEKDEMFASCRFSVDNSGSEVLYVAANTQRGGSIITWDTTSWRRRSSKLIKRNNSISAFNVSADGKLLAVGTLEGDVLIIDSTKMQTNQIVKKAHLGLVTALTFSPDSRCLVSVSFDSRARLTVIKQKGEKRRVYLWVAALLFVLVYVVLYYLMVAMGIIH

SEQ ID NO: 96603 - protein, 286 aa, Arabidopsis thaliana
  peptide (1)..(286): Ceres Seq. ID no. 12733946
  misc_feature (1)..(286): Homolog of NCBI NO: 18423177 NR Description: St12p protein; protein id: At5g50550.1 thaliana] >gi|22327692|ref|NP_680414.1| St12p protein; protein At5g50650.1 [Arabidopsis thaliana] >gi|9758764|dbj|BAB09140.1|
  misc_feature (1)..(262): Homolog of NCBI NO: 8777388 NR Description: protein transport protein SEC12p-like
  misc_feature (1)..(285): Homolog of NCBI NO: 11358859 NR Description: St12p protein [imported] - Arabidopsis thaliana
  misc_feature (1)..(285): Homolog of NCBI NO: 15226281 NR Description: putative protein transport protein SEC12p; id: At2g01470.1, supported by cDNA: gi_166877, supported by cDNA: [Arabidopsis thaliana] >gi|25410908|pir||B84425 probable protein
  misc_feature (1)..(256): Homolog of NCBI NO: 322598 NR Description: St12p protein - Arabidopsis thaliana
  misc_feature (1)..(164): Homolog of NCBI NO: 17473926 NR Description: putative protein transport protein SEC12p
  misc_feature (1)..(278): Homolog of NCBI NO: 34394605 NR Description: transducin / WD-40 repeat protein-like [Oryza
  misc_feature (1)..(276): Homolog of NCBI NO: 34897162 NR Description: putative membrane protein [Oryza sativa (japonica group)] >gi|28209528|gb|AAO37546.1| putative membrane protein
  misc_feature (1)..(270): Homolog of NCBI NO: 18409509 NR Description: expressed protein; protein id: At3g52190.1, by cDNA: 124263. [Arabidopsis thaliana] >gi|11357774|pir||T49098
  misc_feature (51)..(270): Homolog of NCBI NO: 26450470 NR Description: unknown protein [Arabidopsis thaliana]
MAIHPRQGGLICALPNSCRLFDWENIIEDDNEEESEKVVKELKDVGQQLSLSFNQDGTVLATGAEDGTLRVFEWPSMKTLLNESKTHASVKSLTFSESGKFLVSLGAPLCRVWDVNASAAIASLSKEKDEMFASCRFSVDNSGSEVLYVAANTQRGGSIITWDTTSWRRRSSKLIKRNNSISAFNVSADGKLLAVGTLEGDVLIIDSTKMQTNQIVKKAHLGLVTALTFSPDSRCLVSVSFDSRARLTVIKQKGEKRRVYLWVAALLFVLVYVVLYYLMVAMGIIH

SEQ ID NO: 96604 - protein, 210 aa, Arabidopsis thaliana
  peptide (1)..(210): Ceres Seq. ID no. 12733947
  misc_feature (1)..(210): Homolog of NCBI NO: 18423177 NR Description: St12p protein; protein id: At5g50550.1 thaliana] >gi|22327692|ref|NP_680414.1| St12p protein; protein At5g50650.1 [Arabidopsis thaliana] >gi|9758764|dbj|BAB09140.1|
  misc_feature (1)..(186): Homolog of NCBI NO: 8777388 NR Description: protein transport protein SEC12p-like
  misc_feature (1)..(209): Homolog of NCBI NO: 11358859 NR Description: St12p protein [imported] - Arabidopsis thaliana
  misc_feature (1)..(209): Homolog of NCBI NO: 15226281 NR Description: putative protein transport protein SEC12p; id: At2g01470.1, supported by cDNA: gi_166877, supported by cDNA: [Arabidopsis thaliana] >gi|25410908|pir||B84425 probable protein
  misc_feature (1)..(180): Homolog of NCBI NO: 322598 NR Description: St12p protein - Arabidopsis thaliana
  misc_feature (1)..(88): Homolog of NCBI NO: 17473926 NR Description: putative protein transport protein SEC12p
  misc_feature (1)..(202): Homolog of NCBI NO: 34394605 NR Description: transducin / WD-40 repeat protein-like [Oryza
  misc_feature (1)..(200): Homolog of NCBI NO: 34897162 NR Description: putative membrane protein [Oryza sativa (japonica group)] >gi|28209528|gb|AAO37546.1| putative membrane protein
  misc_feature (1)..(194): Homolog of NCBI NO: 18409509 NR Description: expressed protein; protein id: At3g52190.1, by cDNA: 124263. [Arabidopsis thaliana] >gi|11357774|pir||T49098
  misc_feature (1)..(194): Homolog of NCBI NO: 26450470 NR Description: unknown protein [Arabidopsis thaliana]
MKTLLNESKTHASVKSLTFSESGKFLVSLGAPLCRVWDVNASAAIASLSKEKDEMFASCRFSVDNSGSEVLYVAANTQRGGSIITWDTTSWRRRSSKLIKRNNSISAFNVSADGKLLAVGTLEGDVLIIDSTKMQTNQIVKKAHLGLVTALTFSPDSRCLVSVSFDSRARLTVIKQKGEKRRVYLWVAALLFVLVYVVLYYLMVAMGIIH

SEQ ID NO: 96605 - DNA, 900 bp, Arabidopsis thaliana
  misc_feature (1)..(900): Ceres Seq. ID no. 12733957
  misc_feature: MA Experiment ID: 20001451 Result: Up-regulated in Transcription
  misc_feature: MA Experiment 20001451 PARAMETER Experiment Name: At_Far-red-induction_P Parameter: Age (day) Value: 7
  misc_feature: MA Experiment 20001451 PARAMETER Experiment Name: At_Far-red-induction_P Parameter: Light Value: Far-red vs. White
  misc_feature: MA Experiment 20001451 PARAMETER Experiment Name: At_Far-red-induction_P Parameter: Organism Value: A. thaliana
  misc_feature: MA Experiment 20001451 PARAMETER Experiment Name: At_Far-red-induction_P Parameter: Plant Line Value: Columbia
  misc_feature: MA Experiment 20001451 PARAMETER Experiment Name: At_Far-red-induction_P Parameter: Timepoint (hr) Value: 24
  misc_feature: MA Experiment 20001451 PARAMETER Experiment Name: At_Far-red-induction_P Parameter: Tissue Value: Whole Plant
atggatttaaacaacaagatctttaacatccttcttcctattgtcacggtttcgtttcttttagtgttcatgccattttcaatattcttcaagctcctccagttcataaggggatgcaaagagtccgagaaagtcaacggaaaagtcgtcatcatcaccggatcttcctcaggaattggcgagcacctagcgtatgagtatgctcgtagaggagcatacttgactctagtagctcggagagaggatcgtctccaggtggtggctgaccggtgcaggaagcttggttcaccagacgttgctgtggtacgcggtgatgtctcagtcatcaaagactgtaaacgttttgttcaagaaaccatctctcggtttggaagattggatcacttggtgaacaatgctggaattgcggaggccaaatttttcgaggactattctgaaatttcggatgttcttcccattgtgaacactaacttttggggaccggtttacgcgacacatttcgctataccgcatctcaagaaaacaaaaggaaagatcatagcggttgcatcacctgctggatggtctggagtaccaaggatgagcatatatgctgcaagcaaagcagctatgataaacttctacgagactcttaggatcgagcttcatccagaagttggtgtgacaatcgtgtttcctggtctaatcgaaaacggaaatactaatccggaccttttagctgagaaacaagactggtcgcaagttgtgaccatcgagtcagcagcggaatgcgccaaagcggtagttaacggaatctgcagaggcaaaacctttgtggcagagccgtcgtgggttcgtgtcctgttctggcttagtgctatatgccctgagcttctgatctctaagcctaaaaggaattaa

SEQ ID NO: 96606 - protein, 299 aa, Arabidopsis thaliana
  peptide (1)..(299): Ceres Seq. ID no. 12733958
  misc_feature (1)..(299): Homolog of NCBI NO: 15241203 NR Description: 11-beta-hydroxysteroid dehydrogenase-like;
  misc_feature (1)..(299): Homolog of NCBI NO: 8777392 NR Description: 11-beta-hydroxysteroid dehydrogenase-like
  misc_feature (1)..(292): Homolog of NCBI NO: 15232779 NR Description: putative protein; protein id: At3g47360.1
  misc_feature (1)..(292): Homolog of NCBI NO: 15232777 NR Description: putative protein; protein id: At3g47350.1
  misc_feature (1)..(292): Homolog of NCBI NO: 18423187 NR Description: 11-beta-hydroxysteroid dehydrogenase-like; id: At5g50600.1, supported by cDNA: gi_15450584, supported by gi_17065383, supported by cDNA: gi_17386149, supported by cDNA:
  misc_feature (1)..(292): Homolog of NCBI NO: 15824408 NR Description: steroleosin [Sesamum indicum]
  misc_feature (1)..(290): Homolog of NCBI NO: 15241261 NR Description: putative protein; protein id: At5g50770.1 thaliana] >gi|8777400|dbj|BAA96990.1| contains similarity to
  misc_feature (1)..(292): Homolog of NCBI NO: 21311775 NR Description: steroleosin-B [Sesamum indicum]
  misc_feature (1)..(292): Homolog of NCBI NO: 15234888 NR Description: putative oxidoreductase; protein id: At4g10020.1
  misc_feature (45)..(292): Homolog of NCBI NO: 24372033 NR Description: oxidoreductase, short chain
MDLNNKIFNILLPIVTVSFLLVFMPFSIFFKLLQFIRGCKESEKVNGKVVIITGSSSGIGEHLAYEYARRGAYLTLVARREDRLQVVADRCRKLGSPDVAVVRGDVSVIKDCKRFVQETISRFGRLDHLVNNAGIAEAKFFEDYSEISDVLPIVNTNFWGPVYATHFAIPHLKKTKGKIIAVASPAGWSGVPRMSIYAASKAAMINFYETLRIELHPEVGVTIVFPGLIENGNTNPDLLAEKQDWSQVVTIESAAECAKAVVNGICRGKTFVAEPSWVRVLFWLSAICPELLISKPKRN

SEQ ID NO: 96607 - protein, 276 aa, Arabidopsis thaliana
  peptide (1)..(276): Ceres Seq. ID no. 12733959
  misc_feature (1)..(276): Homolog of NCBI NO: 15241203 NR Description: 11-beta-hydroxysteroid dehydrogenase-like;
  misc_feature (1)..(276): Homolog of NCBI NO: 8777392 NR Description: 11-beta-hydroxysteroid dehydrogenase-like
  misc_feature (1)..(269): Homolog of NCBI NO: 15232779 NR Description: putative protein; protein id: At3g47360.1
  misc_feature (1)..(269): Homolog of NCBI NO: 15232777 NR Description: putative protein; protein id: At3g47350.1
  misc_feature (1)..(269): Homolog of NCBI NO: 18423187 NR Description: 11-beta-hydroxysteroid dehydrogenase-like; id: At5g50600.1, supported by cDNA: gi_15450584, supported by gi_17065383, supported by cDNA: gi_17386149, supported by cDNA:
  misc_feature (1)..(269): Homolog of NCBI NO: 15824408 NR Description: steroleosin [Sesamum indicum]
  misc_feature (1)..(267): Homolog of NCBI NO: 15241261 NR Description: putative protein; protein id: At5g50770.1 thaliana] >gi|8777400|dbj|BAA96990.1| contains similarity to
  misc_feature (1)..(269): Homolog of NCBI NO: 21311775 NR Description: steroleosin-B [Sesamum indicum]
  misc_feature (1)..(269): Homolog of NCBI NO: 15234888 NR Description: putative oxidoreductase; protein id: At4g10020.1
  misc_feature (22)..(269): Homolog of NCBI NO: 24372033 NR Description: oxidoreductase, short chain
MPFSIFFKLLQFIRGCKESEKVNGKVVIITGSSSGIGEHLAYEYARRGAYLTLVARREDRLQVVADRCRKLGSPDVAVVRGDVSVIKDCKRFVQETISRFGRLDHLVNNAGIAEAKFFEDYSEISDVLPIVNTNFWGPVYATHFAIPHLKKTKGKIIAVASPAGWSGVPRMSIYAASKAAMINFYETLRIELHPEVGVTIVFPGLIENGNTNPDLLAEKQDWSQVVTIESAAECAKAVVNGICRGKTFVAEPSWVRVLFWLSAICPELLISKPKRN

SEQ ID NO: 96608 - DNA, 1209 bp, Arabidopsis thaliana
  misc_feature (1)..(1209): Ceres Seq. ID no. 12733960
  misc_feature: MA Experiment ID: 20000179 Result: Down-regulated in Transcription
  misc_feature: MA Experiment 20000179 PARAMETER Experiment Name: At_Germinating_Seeds_P Parameter: Age (hr) Value: 6 vs. 0
  misc_feature: MA Experiment 20000179 PARAMETER Experiment Name: At_Germinating_Seeds_P Parameter: Tissue Value: Germinating Seeds
  misc_feature: MA Experiment ID: 20000180 Result: Down-regulated in Transcription
  misc_feature: MA Experiment 20000180 PARAMETER Experiment Name: At_Germinating_Seeds_P Parameter: Age (hr) Value: 24 vs. 0
  misc_feature: MA Experiment 20000180 PARAMETER Experiment Name: At_Germinating_Seeds_P Parameter: Tissue Value: Germinating Seeds
  misc_feature: MA Experiment ID: 20000288 Result: Down-regulated in Transcription
  misc_feature: MA Experiment 20000288 PARAMETER Experiment Name: At_Drought_P Parameter: Age (day) Value: 7
  misc_feature: MA Experiment 20000288 PARAMETER Experiment Name: At_Drought_P Parameter: Organism Value: A. thaliana
  misc_feature: MA Experiment 20000288 PARAMETER Experiment Name: At_Drought_P Parameter: Plant Line Value: WS
  misc_feature: MA Experiment 20000288 PARAMETER Experiment Name: At_Drought_P Parameter: Timepoint (hr) Value: 1
  misc_feature: MA Experiment 20000288 PARAMETER Experiment Name: At_Drought_P Parameter: Tissue Value: Whole Plant
  misc_feature: MA Experiment 20000288 PARAMETER Experiment Name: At_Drought_P Parameter: Treatment Value: Drought vs. No Drought
  misc_feature: MA Experiment ID: 20000437 Result: Up-regulated in Transcription
  misc_feature: MA Experiment 20000437 PARAMETER Experiment Name: At_Drought_P Parameter: Age (day) Value: 8
  misc_feature: MA Experiment 20000437 PARAMETER Experiment Name: At_Drought_P Parameter: Organism Value: A. thaliana
  misc_feature: MA Experiment 20000437 PARAMETER Experiment Name: At_Drought_P Parameter: Plant Line Value: WS
  misc_feature: MA Experiment 20000437 PARAMETER Experiment Name: At_Drought_P Parameter: Timepoint (hr) Value: 24
  misc_feature: MA Experiment 20000437 PARAMETER Experiment Name: At_Drought_P Parameter: Tissue Value: Whole Plant
  misc_feature: MA Experiment 20000437 PARAMETER Experiment Name: At_Drought_P Parameter: Treatment Value: Drought vs. No Drought
  misc_feature: MA Experiment ID: 20001459 Result: Down-regulated in Transcription
  misc_feature: MA Experiment 20001459 PARAMETER Experiment Name: At_50mM_NH4NO3_L-to-H_P Parameter: Age (day) Value: Undefined
  misc_feature: MA Experiment 20001459 PARAMETER Experiment Name: At_50mM_NH4NO3_L-to-H_P Parameter: Organism Value: Undefined
  misc_feature: MA Experiment 20001459 PARAMETER Experiment Name: At_50mM_NH4NO3_L-to-H_P Parameter: Plant Line Value: Undefined
  misc_feature: MA Experiment 20001459 PARAMETER Experiment Name: At_50mM_NH4NO3_L-to-H_P Parameter: Timepoint (hr) Value: 4
  misc_feature: MA Experiment 20001459 PARAMETER Experiment Name: At_50mM_NH4NO3_L-to-H_P Parameter: Tissue Value: Siliques
  misc_feature: MA Experiment 20001459 PARAMETER Experiment Name: At_50mM_NH4NO3_L-to-H_P Parameter: Treatment Value: 50mM NH4NO3 vs. 100mM Manitol
  misc_feature: MA Experiment ID: 20001908 Result: Up-regulated in Transcription
  misc_feature: MA Experiment 20001908 PARAMETER Experiment Name: At_Drought_Reproduction_P Parameter: Age (day) Value: 40
  misc_feature: MA Experiment 20001908 PARAMETER Experiment Name: At_Drought_Reproduction_P Parameter: Organism Value: A. thaliana
  misc_feature: MA Experiment 20001908 PARAMETER Experiment Name: At_Drought_Reproduction_P Parameter: Plant Line Value: WS
  misc_feature: MA Experiment 20001908 PARAMETER Experiment Name: At_Drought_Reproduction_P Parameter: Timepoint (day) Value: 10
  misc_feature: MA Experiment 20001908 PARAMETER Experiment Name: At_Drought_Reproduction_P Parameter: Tissue Value: Siliques
  misc_feature: MA Experiment 20001908 PARAMETER Experiment Name: At_Drought_Reproduction_P Parameter: Treatment Value: Drought vs. No Drought
gagagctaaatcatttacgttttgatcgacaaaaatggagttgataaacgactttctcaacctaactgctcctttcttcaccttctttggtctctgcttcttcttgcctcctttttacttcttcaagttcttgcagtctattttctcgacaattttctctgaaaatctttacgggaaagttgttctcatcactggtgcttcctccggtataggcgagcaattggcatatgagtacgcatgtagaggtgcatgtttagccctgaccgcccgaaggaagaaccgtctagaggaagtggcagagattgctcgtgaactcggatctcccaatgttgttaccgttcatgctgatgtctccaaacctgatgactgtagacgaatcgttgatgacaccatcacccattttggcagattggatcatcttgtaaataatgctgggatgacgcagatttcaatgtttgagaacattgaagatataacgaggacaaaagcagttttggatactaacttctggggatcggtttataccactcgtgctgcgcttccataccttagacaaagtaatggtaagattgtggctatgtcgtcttccgcagcgtggctaaccgctccaaggatgagtttttacaatgcaagcaaagcagctttgttgagcttctttgagacgatgagaattgagcttggtggcgatgtacacattacaatcgtcacacctggttatatcgagtcggagctcacacaaggcaagtacttctctggtgaaggcgagttaatagtcaaccaagacatgagagatgttcaagtaggaccatttccggtagcgtcagcatcaggatgtgccaagtcgatagtgaacggtgtgtgccggaaacaaagatacgtgacagagccatcatggtttaaggtgacgtacctttggaaagtgctatgtccggagttgattgagtggggttgtcggttactgtacatgactggaactggtatgtccgaggatactgcactcaacaagaggatcatggacattcctggtgtacgtagtactctgtacccggaatctatcagaactccagaaatcaagtcggattagagaggggtcaatacataataaatggatgagatgtatcatgagtatgtgcaatgagtaataattatcaaagaaatgggtgaaaatgtaggtttgtttttgttaatggtacttttgactatgtatat

SEQ ID NO: 96609 - protein, 349 aa, Arabidopsis thaliana
  peptide (1)..(349): Ceres Seq. ID no. 12733961
  misc_feature (1)..(349): Homolog of NCBI NO: 18423187 NR Description: 11-beta-hydroxysteroid dehydrogenase-like; id: At5g50600.1, supported by cDNA: gi_15450584, supported by gi_17065383, supported by cDNA: gi_17386149, supported by cDNA:
  misc_feature (1)..(349): Homolog of NCBI NO: 15824408 NR Description: steroleosin [Sesamum indicum]
  misc_feature (1)..(329): Homolog of NCBI NO: 15241261 NR Description: putative protein; protein id: At5g50770.1 thaliana] >gi|8777400|dbj|BAA96990.1| contains similarity to
  misc_feature (1)..(302): Homolog of NCBI NO: 8777392 NR Description: 11-beta-hydroxysteroid dehydrogenase-like
  misc_feature (1)..(313): Homolog of NCBI NO: 21311775 NR Description: steroleosin-B [Sesamum indicum]
  misc_feature (1)..(302): Homolog of NCBI NO: 15241203 NR Description: 11-beta-hydroxysteroid dehydrogenase-like;
  misc_feature (1)..(317): Homolog of NCBI NO: 15234888 NR Description: putative oxidoreductase; protein id: At4g10020.1
  misc_feature (1)..(312): Homolog of NCBI NO: 15232779 NR Description: putative protein; protein id: At3g47360.1
  misc_feature (1)..(304): Homolog of NCBI NO: 15232777 NR Description: putative protein; protein id: At3g47350.1
  misc_feature (43)..(303): Homolog of NCBI NO: 24372033 NR Description: oxidoreductase, short chain
MELINDFLNLTAPFFTFFGLCFFLPPFYFFKFLQSIFSTIFSENLYGKVVLITGASSGIGEQLAYEYACRGACLALTARRKNRLEEVAEIARELGSPNVVTVHADVSKPDDCRRIVDDTITHFGRLDHLVNNAGMTQISMFENIEDITRTKAVLDTNFWGSVYTTRAALPYLRQSNGKIVAMSSSAAWLTAPRMSFYNASKAALLSFFETMRIELGGDVHITIVTPGYIESELTQGKYFSGEGELIVNQDMRDVQVGPFPVASASGCAKSIVNGVCRKQRYVTEPSWFKVTYLWKVLCPELIEWGCRLLYMTGTGMSEDTALNKRIMDIPGVRSTLYPESIRTPEIKSD

SEQ ID NO: 96610 - protein, 215 aa, Arabidopsis thaliana
  peptide (1)..(215): Ceres Seq. ID no. 12733962
  misc_feature (1)..(215): Homolog of NCBI NO: 18423187 NR Description: 11-beta-hydroxysteroid dehydrogenase-like; id: At5g50600.1, supported by cDNA: gi_15450584, supported by gi_17065383, supported by cDNA: gi_17386149, supported by cDNA:
  misc_feature (1)..(215): Homolog of NCBI NO: 15824408 NR Description: steroleosin [Sesamum indicum]
  misc_feature (1)..(195): Homolog of NCBI NO: 15241261 NR Description: putative protein; protein id: At5g50770.1 thaliana] >gi|8777400|dbj|BAA96990.1| contains similarity to
  misc_feature (1)..(168): Homolog of NCBI NO: 8777392 NR Description: 11-beta-hydroxysteroid dehydrogenase-like
  misc_feature (1)..(179): Homolog of NCBI NO: 21311775 NR Description: steroleosin-B [Sesamum indicum]
  misc_feature (1)..(168): Homolog of NCBI NO: 15241203 NR Description: 11-beta-hydroxysteroid dehydrogenase-like;
  misc_feature (1)..(183): Homolog of NCBI NO: 15234888 NR Description: putative oxidoreductase; protein id: At4g10020.1
  misc_feature (1)..(178): Homolog of NCBI NO: 15232779 NR Description: putative protein; protein id: At3g47360.1
  misc_feature (1)..(170): Homolog of NCBI NO: 15232777 NR Description: putative protein; protein id: At3g47350.1
  misc_feature (1)..(169): Homolog of NCBI NO: 24372033 NR Description: oxidoreductase, short chain
MTQISMFENIEDITRTKAVLDTNFWGSVYTTRAALPYLRQSNGKIVAMSSSAAWLTAPRMSFYNASKAALLSFFETMRIELGGDVHITIVTPGYIESELTQGKYFSGEGELIVNQDMRDVQVGPFPVASASGCAKSIVNGVCRKQRYVTEPSWFKVTYLWKVLCPELIEWGCRLLYMTGTGMSEDTALNKRIMDIPGVRSTLYPESIRTPEIKSD

SEQ ID NO: 96611 - protein, 210 aa, Arabidopsis thaliana
  peptide (1)..(210): Ceres Seq. ID no. 12733963
  misc_feature (1)..(210): Homolog of NCBI NO: 18423187 NR Description: 11-beta-hydroxysteroid dehydrogenase-like; id: At5g50600.1, supported by cDNA: gi_15450584, supported by gi_17065383, supported by cDNA: gi_17386149, supported by cDNA:
  misc_feature (1)..(210): Homolog of NCBI NO: 15824408 NR Description: steroleosin [Sesamum indicum]
  misc_feature (1)..(190): Homolog of NCBI NO: 15241261 NR Description: putative protein; protein id: At5g50770.1 thaliana] >gi|8777400|dbj|BAA96990.1| contains similarity to
  misc_feature (1)..(163): Homolog of NCBI NO: 8777392 NR Description: 11-beta-hydroxysteroid dehydrogenase-like
  misc_feature (1)..(174): Homolog of NCBI NO: 21311775 NR Description: steroleosin-B [Sesamum indicum]
  misc_feature (1)..(163): Homolog of NCBI NO: 15241203 NR Description: 11-beta-hydroxysteroid dehydrogenase-like;
  misc_feature (1)..(178): Homolog of NCBI NO: 15234888 NR Description: putative oxidoreductase; protein id: At4g10020.1
  misc_feature (1)..(173): Homolog of NCBI NO: 15232779 NR Description: putative protein; protein id: At3g47360.1
  misc_feature (1)..(165): Homolog of NCBI NO: 15232777 NR Description: putative protein; protein id: At3g47350.1
  misc_feature (1)..(164): Homolog of NCBI NO: 24372033 NR Description: oxidoreductase, short chain
MFENIEDITRTKAVLDTNFWGSVYTTRAALPYLRQSNGKIVAMSSSAAWLTAPRMSFYNASKAALLSFFETMRIELGGDVHITIVTPGYIESELTQGKYFSGEGELIVNQDMRDVQVGPFPVASASGCAKSIVNGVCRKQRYVTEPSWFKVTYLWKVLCPELIEWGCRLLYMTGTGMSEDTALNKRIMDIPGVRSTLYPESIRTPEIKSD

SEQ ID NO: 96612 - DNA, 1227 bp, Arabidopsis thaliana
  misc_feature (1)..(1227): Ceres Seq. ID no. 12733986
  misc_feature: MA Experiment ID: 20001557 Result: Up-regulated in Transcription
  misc_feature: MA Experiment 20001557 PARAMETER Experiment Name: At_Drought_Soil_Dry_P Parameter: Age (day) Value: 27
  misc_feature: MA Experiment 20001557 PARAMETER Experiment Name: At_Drought_Soil_Dry_P Parameter: Organism Value: A. thaliana
  misc_feature: MA Experiment 20001557 PARAMETER Experiment Name: At_Drought_Soil_Dry_P Parameter: Plant Line Value: WS
  misc_feature: MA Experiment 20001557 PARAMETER Experiment Name: At_Drought_Soil_Dry_P Parameter: Post Timepoint (hr) Value: 3
  misc_feature: MA Experiment 20001557 PARAMETER Experiment Name: At_Drought_Soil_Dry_P Parameter: Post-Treatment Value: Re-Water vs. No Drought
  misc_feature: MA Experiment 20001557 PARAMETER Experiment Name: At_Drought_Soil_Dry_P Parameter: Timepoint (day) Value: 13
  misc_feature: MA Experiment 20001557 PARAMETER Experiment Name: At_Drought_Soil_Dry_P Parameter: Treatment Value: Drought vs. No Drought
  misc_feature: MA Experiment ID: 20001911 Result: Down-regulated in Transcription
  misc_feature: MA Experiment 20001911 PARAMETER Experiment Name: At_Drought_Reproduction_P Parameter: Age (day) Value: 40
  misc_feature: MA Experiment 20001911 PARAMETER Experiment Name: At_Drought_Reproduction_P Parameter: Organism Value: A. thaliana
  misc_feature: MA Experiment 20001911 PARAMETER Experiment Name: At_Drought_Reproduction_P Parameter: Plant Line Value: WS
  misc_feature: MA Experiment 20001911 PARAMETER Experiment Name: At_Drought_Reproduction_P Parameter: Timepoint (day) Value: 10
  misc_feature: MA Experiment 20001911 PARAMETER Experiment Name: At_Drought_Reproduction_P Parameter: Tissue Value: Flowers
  misc_feature: MA Experiment 20001911 PARAMETER Experiment Name: At_Drought_Reproduction_P Parameter: Treatment Value: Drought vs. No Drought
atggcggcgaatcgtgtggcgatggaagaagatattactgaatctgtgactttaatggtggattccgtttcttcttctccgatgactccgaagactgtgacggttaaggaagatgaaactcatcatccttatgcgtttcatgtttccggtccgagaaatgttgcttctcctaattggagagatctcatcaactccagttggaaggatcctaactacaagagaacagtaatggcctgttttattcaagcagcttacttgcttgaactcgacagacaagagaatcgaaacgagcaaaacgctctcgcaccaaaatggtggattccattcaagtacaagttatcacaaacgctcattgacgagagagatggatcaatatttggtgctgttcttgaatgggacagagcagctgcaatggcagatttggttgtcatcagaccaagtggggcaccaaaagcagtacttgcgctgcgaggaacgatactaaagagtcttacaatgagacgtgacatagaagatgatctccgatttttagcttgggagagccttaaaggttctgtgaggtttaatgttgctctagaggcgttgcaatcagtagcaacgagatatgggagcagtaatgtctgtgtagtggggcattcgttaggagctggttttgctttacaagttggtaaatccttggctaaagaagggttatttgtagatgctcatttgttcaatccaccttctatatctgtcgctatgagcttgagaaacatcagtgagaaagctggtgttgcttggaaaagactcatgtcaatgcttcctcccaaacacgagcctctgatacagaatagtaacgaaggtcaggtttctcctagcaatgtttcatcagggttcaggaactgggtaccgagtttctacgggtcgaatcagaaacctactgtggatttaagaaaatgggtgcctcatctatatgtgaacgatagcgactatatttgttgccactacactgaccaggatggagtagcagagaagagggaaatgaacaacaaagagaacaatagccctgttgtaaacactaattttcaagcagcagcaaagcttttcgtgatgtcgaaagggaaacagaagtttcacgaggcgcacgggttagaacaatggtggtctgataacctagagcttcaatcagctattcacagcagcaggttgatcagtcagcaactcaagtcattatacagtatcaagtaa

SEQ ID NO: 96613 - protein, 408 aa, Arabidopsis thaliana
  peptide (1)..(408): Ceres Seq. ID no. 12733987
  misc_feature (1)..(408): Homolog of NCBI NO: 15241306 NR Description: putative protein; protein id: At5g50890.1 thaliana] >gi|9758236|dbj|BAB08735.1|
  misc_feature (42)..(406): Homolog of NCBI NO: 34909578 NR Description: P0046E05.21 [Oryza sativa (japonica
  misc_feature (43)..(406): Homolog of NCBI NO: 34910916 NR Description: OSJNBb0063G05.3 [Oryza sativa (japonica
  misc_feature (153)..(336): Homolog of NCBI NO: 34904536 NR Description: B1066G12.13 [Oryza sativa (japonica
  misc_feature (44)..(113): Homolog of NCBI NO: 34904536 NR Description: B1066G12.13 [Oryza sativa (japonica
  misc_feature (304)..(405): Homolog of NCBI NO: 34904536 NR Description: B1066G12.13 [Oryza sativa (japonica
  misc_feature (65)..(256): Homolog of NCBI NO: 34901136 NR Description: contains EST AU161031(C53313)~similar to Oryza
  misc_feature (53)..(329): Homolog of NCBI NO: 18396010 NR Description: expressed protein; protein id: At2g05260.1, by cDNA: 33377. [Arabidopsis thaliana] >gi|25411153|pir||E84466
  misc_feature (358)..(392): Homolog of NCBI NO: 18396010 NR Description: expressed protein; protein id: At2g05260.1, by cDNA: 33377. [Arabidopsis thaliana] >gi|25411153|pir||E84466
  misc_feature (46)..(255): Homolog of NCBI NO: 10177082 NR Description: gene_id:MOP9.4~pir||T04290~similar to unknown
MAANRVAMEEDITESVTLMVDSVSSSPMTPKTVTVKEDETHHPYAFHVSGPRNVASPNWRDLINSSWKDPNYKRTVMACFIQAAYLLELDRQENRNEQNALAPKWWIPFKYKLSQTLIDERDGSIFGAVLEWDRAAAMADLVVIRPSGAPKAVLALRGTILKSLTMRRDIEDDLRFLAWESLKGSVRFNVALEALQSVATRYGSSNVCVVGHSLGAGFALQVGKSLAKEGLFVDAHLFNPPSISVAMSLRNISEKAGVAWKRLMSMLPPKHEPLIQNSNEGQVSPSNVSSGFRNWVPSFYGSNQKPTVDLRKWVPHLYVNDSDYICCHYTDQDGVAEKREMNNKENNSPVVNTNFQAAAKLFVMSKGKQKFHEAHGLEQWWSDNLELQSAIHSSRLISQQLKSLYSIK

SEQ ID NO: 96614 - protein, 401 aa, Arabidopsis thaliana
  peptide (1)..(401): Ceres Seq. ID no. 12733988
  misc_feature (1)..(401): Homolog of NCBI NO: 15241306 NR Description: putative protein; protein id: At5g50890.1 thaliana] >gi|9758236|dbj|BAB08735.1|
  misc_feature (35)..(399): Homolog of NCBI NO: 34909578 NR Description: P0046E05.21 [Oryza sativa (japonica
  misc_feature (36)..(399): Homolog of NCBI NO: 34910916 NR Description: OSJNBb0063G05.3 [Oryza sativa (japonica
  misc_feature (146)..(329): Homolog of NCBI NO: 34904536 NR Description: B1066G12.13 [Oryza sativa (japonica
  misc_feature (37)..(106): Homolog of NCBI NO: 34904536 NR Description: B1066G12.13 [Oryza sativa (japonica
  misc_feature (297)..(398): Homolog of NCBI NO: 34904536 NR Description: B1066G12.13 [Oryza sativa (japonica
  misc_feature (58)..(249): Homolog of NCBI NO: 34901136 NR Description: contains EST AU161031(C53313)~similar to Oryza
  misc_feature (46)..(322): Homolog of NCBI NO: 18396010 NR Description: expressed protein; protein id: At2g05260.1, by cDNA: 33377. [Arabidopsis thaliana] >gi|25411153|pir||E84466
  misc_feature (351)..(385): Homolog of NCBI NO: 18396010 NR Description: expressed protein; protein id: At2g05260.1, by cDNA: 33377. [Arabidopsis thaliana] >gi|25411153|pir||E84466
  misc_feature (39)..(248): Homolog of NCBI NO: 10177082 NR Description: gene_id:MOP9.4~pir||T04290~similar to unknown
MEEDITESVTLMVDSVSSSPMTPKTVTVKEDETHHPYAFHVSGPRNVASPNWRDLINSSWKDPNYKRTVMACFIQAAYLLELDRQENRNEQNALAPKWWIPFKYKLSQTLIDERDGSIFGAVLEWDRAAAMADLVVIRPSGAPKAVLALRGTILKSLTMRRDIEDDLRFLAWESLKGSVRFNVALEALQSVATRYGSSNVCVVGHSLGAGFALQVGKSLAKEGLFVDAHLFNPPSISVAMSLRNISEKAGVAWKRLMSMLPPKHEPLIQNSNEGQVSPSNVSSGFRNWVPSFYGSNQKPTVDLRKWVPHLYVNDSDYICCHYTDQDGVAEKREMNNKENNSPVVNTNFQAAAKLFVMSKGKQKFHEAHGLEQWWSDNLELQSAIHSSRLISQQLKSLYSIK

SEQ ID NO: 96615 - protein, 390 aa, Arabidopsis thaliana
  peptide (1)..(390): Ceres Seq. ID no. 12733989
  misc_feature (1)..(390): Homolog of NCBI NO: 15241306 NR Description: putative protein; protein id: At5g50890.1 thaliana] >gi|9758236|dbj|BAB08735.1|
  misc_feature (24)..(388): Homolog of NCBI NO: 34909578 NR Description: P0046E05.21 [Oryza sativa (japonica
  misc_feature (25)..(388): Homolog of NCBI NO: 34910916 NR Description: OSJNBb0063G05.3 [Oryza sativa (japonica
  misc_feature (135)..(318): Homolog of NCBI NO: 34904536 NR Description: B1066G12.13 [Oryza sativa (japonica
  misc_feature (26)..(95): Homolog of NCBI NO: 34904536 NR Description: B1066G12.13 [Oryza sativa (japonica
  misc_feature (286)..(387): Homolog of NCBI NO: 34904536 NR Description: B1066G12.13 [Oryza sativa (japonica
  misc_feature (47)..(238): Homolog of NCBI NO: 34901136 NR Description: contains EST AU161031(C53313)~similar to Oryza
  misc_feature (35)..(311): Homolog of NCBI NO: 18396010 NR Description: expressed protein; protein id: At2g05260.1, by cDNA: 33377. [Arabidopsis thaliana] >gi|25411153|pir||E84466
  misc_feature (340)..(374): Homolog of NCBI NO: 18396010 NR Description: expressed protein; protein id: At2g05260.1, by cDNA: 33377. [Arabidopsis thaliana] >gi|25411153|pir||E84466
  misc_feature (28)..(237): Homolog of NCBI NO: 10177082 NR Description: gene_id:MOP9.4~pir||T04290~similar to unknown
MVDSVSSSPMTPKTVTVKEDETHHPYAFHVSGPRNVASPNWRDLINSSWKDPNYKRTVMACFIQAAYLLELDRQENRNEQNALAPKWWIPFKYKLSQTLIDERDGSIFGAVLEWDRAAAMADLVVIRPSGAPKAVLALRGTILKSLTMRRDIEDDLRFLAWESLKGSVRFNVALEALQSVATRYGSSNVCVVGHSLGAGFALQVGKSLAKEGLFVDAHLFNPPSISVAMSLRNISEKAGVAWKRLMSMLPPKHEPLIQNSNEGQVSPSNVSSGFRNWVPSFYGSNQKPTVDLRKWVPHLYVNDSDYICCHYTDQDGVAEKREMNNKENNSPVVNTNFQAAAKLFVMSKGKQKFHEAHGLEQWWSDNLELQSAIHSSRLISQQLKSLYSIK

SEQ ID NO: 96616 - DNA, 1536 bp, Arabidopsis thaliana
  misc_feature (1)..(1536): Ceres Seq. ID no. 12734000
  misc_feature: MA Experiment ID: 20000227 Result: Up-regulated in Transcription
  misc_feature: MA Experiment 20000227 PARAMETER Experiment Name: At_Root-Tips-vs-Tops_P Parameter: Tissue Value: Root Tips vs. Root Tops
  misc_feature: MA Experiment ID: 20001905 Result: Up-regulated in Transcription
  misc_feature: MA Experiment 20001905 PARAMETER Experiment Name: At_Drought_Reproduction_P Parameter: Age (day) Value: 40
  misc_feature: MA Experiment 20001905 PARAMETER Experiment Name: At_Drought_Reproduction_P Parameter: Organism Value: A. thaliana
  misc_feature: MA Experiment 20001905 PARAMETER Experiment Name: At_Drought_Reproduction_P Parameter: Plant Line Value: WS
  misc_feature: MA Experiment 20001905 PARAMETER Experiment Name: At_Drought_Reproduction_P Parameter: Timepoint (day) Value: 10
  misc_feature: MA Experiment 20001905 PARAMETER Experiment Name: At_Drought_Reproduction_P Parameter: Tissue Value: Rosettes
  misc_feature: MA Experiment 20001905 PARAMETER Experiment Name: At_Drought_Reproduction_P Parameter: Treatment Value: Drought vs. No Drought
atgctttcttatgtagatcatgggatgttgaaacaagttcttgaatcatgcaaagctccttcaaattctaaatgtgttcttcaagcacatgctcagatctttaaacttgggtacggaacatatccatctcttcttgtctccacagttgcagcttacagacgctgcaaccgttcatatcttgctcgacggcttcttctttggttcctctctttgtctcctggtgtctgtaacataaacctaatcattgagagtcttatgaaaattggagagtctggtttggccaagaaggtacttcgtaatgcgagtgatcagaatgtgatcacctggaacttgatgattggtggttatgttagaaatgtccagtatgaagaagctctgaaagctcttaagaatatgcttagttttactgatattaaaccgaataagttcagttttgcttcctctttagctgcttgtgcccgtcttggagatctgcaccatgcgaagtgggtgcactctctgatgattgatagtgggattgagcttaatgcaatattgtcttctgcacttgttgatgtgtatgcaaagtgtggagatataggaacttcgagggaggttttctatagtgttaaacggaacgatgtgtcgatttggaacgcgatgatcacgggttttgctactcatgggctagccacagaagcaatcagagtgttttcagagatggaagcggaacatgtttcaccagattctataacattcctcgggcttttaacaacgtgtagccattgcggtttgcttgaagaagggaaagagtactttggtctaatgagtcgccgcttttctatacagccaaagttagagcactatggtgctatggttgatctgctaggccgagcaggaagagtaaaagaagcgtacgagttgatcgaatcaatgccgatagagccagatgtagtgatatggaggtctcttcttagttcctctagaacttataagaatcctgagctaggagaaatcgcgatacagaatctttcaaaagcaaagagcggagactatgtgttgctttcgaacatatatagctccacgaagaaatgggagagcgctcaaaaggtcagagagttgatgagtaaggaaggaatccgtaaagcgaaaggaaagagttggttggaatttggagggatgatacatcggtttaaggcaggagatacatctcatatagaaacaaaagctatatacaaagtattagaaggtttgatacagaaaactaagtctcaaggatttgtgtctgacacggatttggtgttgatggatgtttctgaagaagagaaagaagagaacttaaattatcacagcgaaaagctcgcgttggcgtatgtgatattgaagagtagtccaggaacagaaattagaattcagaagaatatacggatgtgtagtgattgccacaactggataaaagcagtgtcgaagttgttgaatagagtgattataatgcgggatcggatacggtttcataggtttgaagatgggttgtgttcttgcagagattattggtaa

SEQ ID NO: 96617 - protein, 511 aa, Arabidopsis thaliana
  peptide (1)..(511): Ceres Seq. ID no. 12734001
  misc_feature (244)..(278): Pfam Name: PPR repeat Pfam Description: PPR repeat
  misc_feature (1)..(511): Homolog of NCBI NO: 15241337 NR Description: putative protein; protein id: At5g50990.1
  misc_feature (13)..(511): Homolog of NCBI NO: 15239979 NR Description: selenium-binding protein-like; protein id:
  misc_feature (22)..(511): Homolog of NCBI NO: 15223099 NR Description: unknown protein; protein id: At1g08070.1 thaliana] >gi|8778839|gb|AAF79838.1|AC026875_18 T6D22.15
  misc_feature (6)..(511): Homolog of NCBI NO: 15227144 NR Description: hypothetical protein; protein id: At2g22070.1
  misc_feature (30)..(511): Homolog of NCBI NO: 34915288 NR Description: similar to selenium-binding protein [Oryza sativa
  misc_feature (13)..(511): Homolog of NCBI NO: 15235537 NR Description: putative protein; protein id: At4g37380.1
  misc_feature (40)..(511): Homolog of NCBI NO: 29124127 NR Description: hypothetical protein [Oryza sativa (japonica
  misc_feature (13)..(511): Homolog of NCBI NO: 34910298 NR Description: P0013F10.8 [Oryza sativa (japonica
  misc_feature (10)..(511): Homolog of NCBI NO: 34393394 NR Description: putative pentatricopeptide (PPR)
  misc_feature (78)..(511): Homolog of NCBI NO: 34394298 NR Description: putative pentatricopeptide (PPR)
MLSYVDHGMLKQVLESCKAPSNSKCVLQAHAQIFKLGYGTYPSLLVSTVAAYRRCNRSYLARRLLLWFLSLSPGVCNINLIIESLMKIGESGLAKKVLRNASDQNVITWNLMIGGYVRNVQYEEALKALKNMLSFTDIKPNKFSFASSLAACARLGDLHHAKWVHSLMIDSGIELNAILSSALVDVYAKCGDIGTSREVFYSVKRNDVSIWNAMITGFATHGLATEAIRVFSEMEAEHVSPDSITFLGLLTTCSHCGLLEEGKEYFGLMSRRFSIQPKLEHYGAMVDLLGRAGRVKEAYELIESMPIEPDVVIWRSLLSSSRTYKNPELGEIAIQNLSKAKSGDYVLLSNIYSSTKKWESAQKVRELMSKEGIRKAKGKSWLEFGGMIHRFKAGDTSHIETKAIYKVLEGLIQKTKSQGFVSDTDLVLMDVSEEEKEENLNYHSEKLALAYVILKSSPGTEIRIQKNIRMCSDCHNWIKAVSKLLNRVIIMRDRIRFHRFEDGLCSCRDYW

SEQ ID NO: 96618 - protein, 503 aa, Arabidopsis thaliana
  peptide (1)..(503): Ceres Seq. ID no. 12734002
  misc_feature (236)..(270): Pfam Name: PPR repeat Pfam Description: PPR repeat
  misc_feature (1)..(503): Homolog of NCBI NO: 15241337 NR Description: putative protein; protein id: At5g50990.1
  misc_feature (5)..(503): Homolog of NCBI NO: 15239979 NR Description: selenium-binding protein-like; protein id:
  misc_feature (14)..(503): Homolog of NCBI NO: 15223099 NR Description: unknown protein; protein id: At1g08070.1 thaliana] >gi|8778839|gb|AAF79838.1|AC026875_18 T6D22.15
  misc_feature (1)..(503): Homolog of NCBI NO: 15227144 NR Description: hypothetical protein; protein id: At2g22070.1
  misc_feature (22)..(503): Homolog of NCBI NO: 34915288 NR Description: similar to selenium-binding protein [Oryza sativa
  misc_feature (5)..(503): Homolog of NCBI NO: 15235537 NR Description: putative protein; protein id: At4g37380.1
  misc_feature (32)..(503): Homolog of NCBI NO: 29124127 NR Description: hypothetical protein [Oryza sativa (japonica
  misc_feature (5)..(503): Homolog of NCBI NO: 34910298 NR Description: P0013F10.8 [Oryza sativa (japonica
  misc_feature (2)..(503): Homolog of NCBI NO: 34393394 NR Description: putative pentatricopeptide (PPR)
  misc_feature (70)..(503): Homolog of NCBI NO: 34394298 NR Description: putative pentatricopeptide (PPR)
MLKQVLESCKAPSNSKCVLQAHAQIFKLGYGTYPSLLVSTVAAYRRCNRSYLARRLLLWFLSLSPGVCNINLIIESLMKIGESGLAKKVLRNASDQNVITWNLMIGGYVRNVQYEEALKALKNMLSFTDIKPNKFSFASSLAACARLGDLHHAKWVHSLMIDSGIELNAILSSALVDVYAKCGDIGTSREVFYSVKRNDVSIWNAMITGFATHGLATEAIRVFSEMEAEHVSPDSITFLGLLTTCSHCGLLEEGKEYFGLMSRRFSIQPKLEHYGAMVDLLGRAGRVKEAYELIESMPIEPDVVIWRSLLSSSRTYKNPELGEIAIQNLSKAKSGDYVLLSNIYSSTKKWESAQKVRELMSKEGIRKAKGKSWLEFGGMIHRFKAGDTSHIETKAIYKVLEGLIQKTKSQGFVSDTDLVLMDVSEEEKEENLNYHSEKLALAYVILKSSPGTEIRIQKNIRMCSDCHNWIKAVSKLLNRVIIMRDRIRFHRFEDGLCSCRDYW

SEQ ID NO: 96619 - protein, 426 aa, Arabidopsis thaliana
  peptide (1)..(426): Ceres Seq. ID no. 12734003
  misc_feature (159)..(193): Pfam Name: PPR repeat Pfam Description: PPR repeat
  misc_feature (1)..(426): Homolog of NCBI NO: 15241337 NR Description: putative protein; protein id: At5g50990.1
  misc_feature (1)..(426): Homolog of NCBI NO: 15239979 NR Description: selenium-binding protein-like; protein id:
  misc_feature (1)..(426): Homolog of NCBI NO: 15223099 NR Description: unknown protein; protein id: At1g08070.1 thaliana] >gi|8778839|gb|AAF79838.1|AC026875_18 T6D22.15
  misc_feature (1)..(426): Homolog of NCBI NO: 15227144 NR Description: hypothetical protein; protein id: At2g22070.1
  misc_feature (1)..(426): Homolog of NCBI NO: 34915288 NR Description: similar to selenium-binding protein [Oryza sativa
  misc_feature (1)..(426): Homolog of NCBI NO: 15235537 NR Description: putative protein; protein id: At4g37380.1
  misc_feature (1)..(426): Homolog of NCBI NO: 29124127 NR Description: hypothetical protein [Oryza sativa (japonica
  misc_feature (1)..(426): Homolog of NCBI NO: 34910298 NR Description: P0013F10.8 [Oryza sativa (japonica
  misc_feature (1)..(426): Homolog of NCBI NO: 34393394 NR Description: putative pentatricopeptide (PPR)
  misc_feature (1)..(426): Homolog of NCBI NO: 34394298 NR Description: putative pentatricopeptide (PPR)
MKIGESGLAKKVLRNASDQNVITWNLMIGGYVRNVQYEEALKALKNMLSFTDIKPNKFSFASSLAACARLGDLHHAKWVHSLMIDSGIELNAILSSALVDVYAKCGDIGTSREVFYSVKRNDVSIWNAMITGFATHGLATEAIRVFSEMEAEHVSPDSITFLGLLTTCSHCGLLEEGKEYFGLMSRRFSIQPKLEHYGAMVDLLGRAGRVKEAYELIESMPIEPDVVIWRSLLSSSRTYKNPELGEIAIQNLSKAKSGDYVLLSNIYSSTKKWESAQKVRELMSKEGIRKAKGKSWLEFGGMIHRFKAGDTSHIETKAIYKVLEGLIQKTKSQGFVSDTDLVLMDVSEEEKEENLNYHSEKLALAYVILKSSPGTEIRIQKNIRMCSDCHNWIKAVSKLLNRVIIMRDRIRFHRFEDGLCSCRDYW

SEQ ID NO: 96620 - DNA, 945 bp, Arabidopsis thaliana
  misc_feature (1)..(945): Ceres Seq. ID no. 12734008
  misc_feature: MA Experiment ID: 20000264 Result: Up-regulated in Transcription
  misc_feature: MA Experiment 20000264 PARAMETER Experiment Name: At_Open_Flower_P Parameter: Age (day) Value: 21
  misc_feature: MA Experiment 20000264 PARAMETER Experiment Name: At_Open_Flower_P Parameter: Plant Line Value: WS
  misc_feature: MA Experiment 20000264 PARAMETER Experiment Name: At_Open_Flower_P Parameter: Tissue Value: Open Flower vs. Whole Plant
  misc_feature: MA Experiment ID: 20000265 Result: Up-regulated in Transcription
  misc_feature: MA Experiment 20000265 PARAMETER Experiment Name: At_Open_Flower_P Parameter: Age (day) Value: 21
  misc_feature: MA Experiment 20000265 PARAMETER Experiment Name: At_Open_Flower_P Parameter: Plant Line Value: WS
  misc_feature: MA Experiment 20000265 PARAMETER Experiment Name: At_Open_Flower_P Parameter: Tissue Value: Closed Flower vs. Whole Plant
  misc_feature: MA Experiment ID: 20000286 Result: Up-regulated in Transcription
  misc_feature: MA Experiment 20000286 PARAMETER Experiment Name: At_Open_Flower_P Parameter: Age (day) Value: 21
  misc_feature: MA Experiment 20000286 PARAMETER Experiment Name: At_Open_Flower_P Parameter: Plant Line Value: WS
  misc_feature: MA Experiment 20000286 PARAMETER Experiment Name: At_Open_Flower_P Parameter: Tissue Value: Half Open vs. Whole Plant
  misc_feature: MA Experiment ID: 20000794 Result: Up-regulated in Transcription
  misc_feature: MA Experiment 20000794 PARAMETER Experiment Name: At_Petals_P Parameter: Age (day) Value: 23-25 days
  misc_feature: MA Experiment 20000794 PARAMETER Experiment Name: At_Petals_P Parameter: Plant Line Value: WS
  misc_feature: MA Experiment 20000794 PARAMETER Experiment Name: At_Petals_P Parameter: Tissue Value: Petals vs. Whole plant
  misc_feature: MA Experiment ID: 20001248 Result: Down-regulated in Transcription
  misc_feature: MA Experiment 20001248 PARAMETER Experiment Name: At_Far-red-induction_P Parameter: Age (day) Value: 7
  misc_feature: MA Experiment 20001248 PARAMETER Experiment Name: At_Far-red-induction_P Parameter: Light Value: Far-red vs. White
  misc_feature: MA Experiment 20001248 PARAMETER Experiment Name: At_Far-red-induction_P Parameter: Organism Value: A. thaliana
  misc_feature: MA Experiment 20001248 PARAMETER Experiment Name: At_Far-red-induction_P Parameter: Plant Line Value: Columbia
  misc_feature: MA Experiment 20001248 PARAMETER Experiment Name: At_Far-red-induction_P Parameter: Timepoint (hr) Value: 4
  misc_feature: MA Experiment 20001248 PARAMETER Experiment Name: At_Far-red-induction_P Parameter: Tissue Value: Whole Plant
  misc_feature: MA Experiment ID: 20001910 Result: Up-regulated in Transcription
  misc_feature: MA Experiment 20001910 PARAMETER Experiment Name: At_Drought_Reproduction_P Parameter: Age (day) Value: 37
  misc_feature: MA Experiment 20001910 PARAMETER Experiment Name: At_Drought_Reproduction_P Parameter: Organism Value: A. thaliana
  misc_feature: MA Experiment 20001910 PARAMETER Experiment Name: At_Drought_Reproduction_P Parameter: Plant Line Value: WS
  misc_feature: MA Experiment 20001910 PARAMETER Experiment Name: At_Drought_Reproduction_P Parameter: Timepoint (day) Value: 7
  misc_feature: MA Experiment 20001910 PARAMETER Experiment Name: At_Drought_Reproduction_P Parameter: Tissue Value: Flowers
  misc_feature: MA Experiment 20001910 PARAMETER Experiment Name: At_Drought_Reproduction_P Parameter: Treatment Value: Drought vs. No Drought
atggtaggaagcaaagaaaaatcgaaagagaaacgagataagagactccaagagatctccctccttcgtactattccctattctgatcaccagaggtggtggacctctgaaaccgtggcggtggtaacaggtgcgaatagaggaataggatttgagatggtgagacaattggctggacatggactaacagttattctaacatcaagagacgagaatgtaggcgtcgaagccgccaagatccttcaagaaggtggattcaatgttgatttccaccgcctcgatatcttggactcttcctcaatccaagagttttgcgaatggattaaagaaaaatatggatttattgatgttttaattaataatgcaggagtaaactacaatgttggatcagataactctgttgaattctcgcatatggttatatctaccaactactatggcaccaagaacataatcaacgccatgattccactaatgagacatgcttgtcaaggagctcgtattgtcaatgtcacttcaaggctcggtagattaaaaggccgacacagtaaacttgagaatgaagacgtgagagccaagcttatggatgtggactctctaactgaagaaatcgttgacaaaacagtatcagagtttttgaaacaagtggaagaaggaacatgggaatctggaggttggccacattccttcacagactactctgtctccaaaatggcggtgaacgcatacacaagagtactagctaaagaactatccgagagaccagagggagagaagatatatgcaaactgtttttgtcccggttgggtgaaaaccgcaatgacaggctatgcagggaacgtttcagcagaagatggagctgacactggagtctggcttgcattgcttcctgatcaagctatcaccggaaagttcttcgccgagagacgtgagatcagtttctaa

SEQ ID NO: 96621 - protein, 314 aa, Arabidopsis thaliana
  peptide (1)..(314): Ceres Seq. ID no. 12734009
  misc_feature (1)..(314): Homolog of NCBI NO: 15241346 NR Description: carbonyl reductase-like protein; protein id:
  misc_feature (4)..(314): Homolog of NCBI NO: 15240361 NR Description: carbonyl reductase - like protein; protein id:
  misc_feature (16)..(314): Homolog of NCBI NO: 10176876 NR Description: carbonyl reductase-like protein [Arabidopsis
  misc_feature (5)..(314): Homolog of NCBI NO: 34907100 NR Description: putative carbonyl reductase-like protein [Oryza
  misc_feature (28)..(306): Homolog of NCBI NO: 21740778 NR Description: OSJNBa0067K08.19 [Oryza sativa (japonica
  misc_feature (30)..(306): Homolog of NCBI NO: 15231739 NR Description: putative protein; protein id: At3g59710.1
  misc_feature (141)..(313): Homolog of NCBI NO: 34559416 NR Description: (-)-isopiperitenone reductase [Mentha x piperita]
  misc_feature (40)..(125): Homolog of NCBI NO: 34559416 NR Description: (-)-isopiperitenone reductase [Mentha x piperita]
  misc_feature (141)..(306): Homolog of NCBI NO: 33146492 NR Description: carbonyl reductase -like protein [Oryza sativa
  misc_feature (16)..(124): Homolog of NCBI NO: 33146492 NR Description: carbonyl reductase -like protein [Oryza sativa
MVGSKEKSKEKRDKRLQEISLLRTIPYSDHQRWWTSETVAVVTGANRGIGFEMVRQLAGHGLTVILTSRDENVGVEAAKILQEGGFNVDFHRLDILDSSSIQEFCEWIKEKYGFIDVLINNAGVNYNVGSDNSVEFSHMVISTNYYGTKNIINAMIPLMRHACQGARIVNVTSRLGRLKGRHSKLENEDVRAKLMDVDSLTEEIVDKTVSEFLKQVEEGTWESGGWPHSFTDYSVSKMAVNAYTRVLAKELSERPEGEKIYANCFCPGWVKTAMTGYAGNVSAEDGADTGVWLALLPDQAITGKFFAERREISF

SEQ ID NO: 96622 - protein, 262 aa, Arabidopsis thaliana
  peptide (1)..(262): Ceres Seq. ID no. 12734010
  misc_feature (1)..(262): Homolog of NCBI NO: 15241346 NR Description: carbonyl reductase-like protein; protein id:
  misc_feature (1)..(262): Homolog of NCBI NO: 15240361 NR Description: carbonyl reductase - like protein; protein id:
  misc_feature (1)..(262): Homolog of NCBI NO: 10176876 NR Description: carbonyl reductase-like protein [Arabidopsis
  misc_feature (1)..(262): Homolog of NCBI NO: 34907100 NR Description: putative carbonyl reductase-like protein [Oryza
  misc_feature (1)..(254): Homolog of NCBI NO: 21740778 NR Description: OSJNBa0067K08.19 [Oryza sativa (japonica
  misc_feature (1)..(254): Homolog of NCBI NO: 15231739 NR Description: putative protein; protein id: At3g59710.1
  misc_feature (89)..(261): Homolog of NCBI NO: 34559416 NR Description: (-)-isopiperitenone reductase [Mentha x piperita]
  misc_feature (1)..(73): Homolog of NCBI NO: 34559416 NR Description: (-)-isopiperitenone reductase [Mentha x piperita]
  misc_feature (89)..(254): Homolog of NCBI NO: 33146492 NR Description: carbonyl reductase -like protein [Oryza sativa
  misc_feature (1)..(72): Homolog of NCBI NO: 33146492 NR Description: carbonyl reductase -like protein [Oryza sativa
MVRQLAGHGLTVILTSRDENVGVEAAKILQEGGFNVDFHRLDILDSSSIQEFCEWIKEKYGFIDVLINNAGVNYNVGSDNSVEFSHMVISTNYYGTKNIINAMIPLMRHACQGARIVNVTSRLGRLKGRHSKLENEDVRAKLMDVDSLTEEIVDKTVSEFLKQVEEGTWESGGWPHSFTDYSVSKMAVNAYTRVLAKELSERPEGEKIYANCFCPGWVKTAMTGYAGNVSAEDGADTGVWLALLPDQAITGKFFAERREISF

SEQ ID NO: 96623 - protein, 176 aa, Arabidopsis thaliana
  peptide (1)..(176): Ceres Seq. ID no. 12734011
  misc_feature (1)..(176): Homolog of NCBI NO: 15241346 NR Description: carbonyl reductase-like protein; protein id:
  misc_feature (1)..(176): Homolog of NCBI NO: 15240361 NR Description: carbonyl reductase - like protein; protein id:
  misc_feature (1)..(176): Homolog of NCBI NO: 10176876 NR Description: carbonyl reductase-like protein [Arabidopsis
  misc_feature (1)..(176): Homolog of NCBI NO: 34907100 NR Description: putative carbonyl reductase-like protein [Oryza
  misc_feature (1)..(168): Homolog of NCBI NO: 21740778 NR Description: OSJNBa0067K08.19 [Oryza sativa (japonica
  misc_feature (1)..(168): Homolog of NCBI NO: 15231739 NR Description: putative protein; protein id: At3g59710.1
  misc_feature (3)..(175): Homolog of NCBI NO: 34559416 NR Description: (-)-isopiperitenone reductase [Mentha x piperita]
  misc_feature (3)..(168): Homolog of NCBI NO: 33146492 NR Description: carbonyl reductase -like protein [Oryza sativa
  misc_feature (1)..(40): Homolog of NCBI NO: 37519862 NR Description: probable carbonyl reductase [Gloeobacter
  misc_feature (78)..(174): Homolog of NCBI NO: 37519862 NR Description: probable carbonyl reductase [Gloeobacter
MVISTNYYGTKNIINAMIPLMRHACQGARIVNVTSRLGRLKGRHSKLENEDVRAKLMDVDSLTEEIVDKTVSEFLKQVEEGTWESGGWPHSFTDYSVSKMAVNAYTRVLAKELSERPEGEKIYANCFCPGWVKTAMTGYAGNVSAEDGADTGVWLALLPDQAITGKFFAERREISF

SEQ ID NO: 96624 - DNA, 2805 bp, Arabidopsis thaliana
  misc_feature (1)..(2805): Ceres Seq. ID no. 12734026
  misc_feature: MA Experiment ID: 20000307 Result: Down-regulated in Transcription
  misc_feature: MA Experiment 20000307 PARAMETER Experiment Name: At_Germinating_Seeds_Sub_P Parameter: Age (hr) Value: 24 vs. 0
  misc_feature: MA Experiment 20000307 PARAMETER Experiment Name: At_Germinating_Seeds_Sub_P Parameter: Organism Value: A. thaliana
  misc_feature: MA Experiment 20000307 PARAMETER Experiment Name: At_Germinating_Seeds_Sub_P Parameter: Plant Line Value: WS
  misc_feature: MA Experiment 20000307 PARAMETER Experiment Name: At_Germinating_Seeds_Sub_P Parameter: Tissue Value: Germinating Seeds
  misc_feature: MA Experiment ID: 20000355 Result: Down-regulated in Transcription
  misc_feature: MA Experiment 20000355 PARAMETER Experiment Name: At_Siliques_Sub_P Parameter: Age (day) Value: 21
  misc_feature: MA Experiment 20000355 PARAMETER Experiment Name: At_Siliques_Sub_P Parameter: Organism Value: A. thaliana
  misc_feature: MA Experiment 20000355 PARAMETER Experiment Name: At_Siliques_Sub_P Parameter: Plant Line Value: WS
  misc_feature: MA Experiment 20000355 PARAMETER Experiment Name: At_Siliques_Sub_P Parameter: Tissue Value: Less Than 5mm Siliques vs. Whole Plant
atgagcgtagatgttcagagaatcactgacttcatttggtatgtaaacagcatatggatgttacctatacagattttctcagcgatttatatcttgcaaaaacatctgggacttggagctttagctgcattggtcacaactttaatggtgatggcttgcaactacccattgacaaggcttcagagaaactaccaatcagatatcatgaatgccaaagatgatagaatgaaagcaacttcagagattcttaaaaacatgaagattctgaagcttcaagcatgggataaccagtttctcaacaaggttaaaacattaagaaagaaagagtatgattgtttatggaagtctttgaggttacaagatttcacaactttcatactttggggagctccttcattgatctctgtggtgacttttgttacttgtatgttaatgggagtgaagctaacagctggagcagtcttatctgctcttgcaacgtttcaaatgttacaaagtccgattttcggtttacctgatctcctctcagcgcttgttcagagcaaggtttctgcagatagaatagcttcttacttgcaacaaagcgagactcagaaagatgcagttgagtattgctcaaatgatcatacagaatttagtgttgaaatagaaaatggagcatttagttgggaacctgagtcaagcagaccaactcttgatgacatcgaactgaaagtaaaaagcggaatgaaagtggcgatctgcggagctgtaggatcaggaaaatcaagcttaccctcttcaatcttaggggagattcagaagctgaagggaacagtcagagtcagtggtaaacaagcttatgttccacaatcaccatggatactaagcgggactataagagataacattttgtttggaagcatttatgaaagcgaaaagtatgagagaactgttaaagcatgtgctttgataaaggactttgagcttttctcgaatggagacttgacagagattggagagagagggataaacatgagtggaggtcagaagcaaaggatacagattgctcgagcggtatatcagaacgctgatatatatctacttgatgatccttttagcgccgttgatgctcatacaggaagagaactctttgaagattgcttaatggggatactgaaagacaaaactgtactttacgttacccatcaagtcgagtttcttccagcagcagatctaatcctggtgatgcaaaacggaagagtgatgcaagcaggaaagtttgaagagcttctaaagcaaaacataggaagttcactttgtgttttagcacggactattctagtcgcgataggtggactttcaacagcagagacgttcttctcaaggatgctctgcagcattttcagagctccaatgtcatatttcgattcaactccaacaggaagaatcttgaacagggcatccacagatcaaagtgtcctggatttggaaatggcagtcaaactaggttggtgtgctttctcgatcattcagattgttggaaccatcttcgtcatgtcgcaagttgcttggcaaagatattacacaccaacagagagagaactgtcacgcatgtcaggagtagaaagagctccaatcctccaccatttcgctgaatcgcttgctggtgcaacaacaatacgtgcttttgatcaacgagatcgcttcattagctcaaaccttgttctaatagatagccactcaaggccatggttccatgttgcatcagcaatggagtggctttccttcaggttgaatttgctgtctcattttgtctttgctttttccttggtgttacttgtgactctccctgaaggtgtcatcaatccaagtattgctggtcttggggtcacatatggcttaagtctgaatgttctacaagccacagtgatatggaatatatgcaatgcagaaaacaagatgatttctgtagaaagaattcttcagcactctaagatccccagtgaagcacctctagtaattgatgatcagagacctcttgataactggccaaatgtaggatcaatcgtcttcagagacctacaggtccgttatgcagaacatttcccagctgtcttgaagaacatcacttgtgcgtttccaggaggaaaaaagattggagtagtaggaagaacaggaagcggcaaatcaactttaattcaggcattgtttaggattgtagagccaagtcatggaaccatagttattgataatgtggatataaccaagataggtctacatgacctgagatcaaggcttgggattattcctcaagataatgcactatttgatggaacaatcagattgaatctagatcctctagctcagtatactgatcgcgaaatatgggaggctcttgataaatgtcaactgggagatgttattcgtgcaaaggatgagaagctggatgctacagtggttgaaaatggagaaaattggagcgtaggacaaagacagttagtctgtcttgggagggtgttgttgaagaaaagcaacattctggtgcttgatgaagccactgcttcagttgattctgcaactgatggtgtaatacaaaagatcatcaatcaagagtttaaagatcggacagtggtgactattgcacacagaatccacacagtgatagagagtgatcttgttctggttctgagtgatggacgaatcgcagagtttgattcacctgcaaaactgctacagagagaagattctttcttctccaaactcataaaagagtattcgctgagatctaatcactttgccggctcgaatgatcttctcagctaa

SEQ ID NO: 96625 - protein, 934 aa, Arabidopsis thaliana
  peptide (1)..(934): Ceres Seq. ID no. 12734027
  misc_feature (402)..(638): Pfam Name: ABC transporter transmembrane region Pfam Description: ABC transporter transmembrane region
  misc_feature (430)..(924): Homolog of NCBI NO: 15230686 NR Description: ABC transporter family protein; protein id:
  misc_feature (1)..(436): Homolog of NCBI NO: 15230686 NR Description: ABC transporter family protein; protein id:
  misc_feature (430)..(923): Homolog of NCBI NO: 7485868 NR Description: hypothetical protein F20D22.11 - Arabidopsis
  misc_feature (430)..(923): Homolog of NCBI NO: 15219648 NR Description: ABC transporter family protein; protein id: supported by cDNA: gi_10197657 [Arabidopsis thaliana]
  misc_feature (1)..(426): Homolog of NCBI NO: 7485868 NR Description: hypothetical protein F20D22.11 - Arabidopsis
  misc_feature (1)..(426): Homolog of NCBI NO: 15219648 NR Description: ABC transporter family protein; protein id: supported by cDNA: gi_10197657 [Arabidopsis thaliana]
  misc_feature (1)..(436): Homolog of NCBI NO: 30682473 NR Description: ABC transporter family protein [Arabidopsis
  misc_feature (430)..(760): Homolog of NCBI NO: 30682473 NR Description: ABC transporter family protein [Arabidopsis
  misc_feature (771)..(924): Homolog of NCBI NO: 30682473 NR Description: ABC transporter family protein [Arabidopsis
  misc_feature (431)..(925): Homolog of NCBI NO: 27368883 NR Description: MRP-like ABC transporter [Oryza sativa (japonica
MSVDVQRITDFIWYVNSIWMLPIQIFSAIYILQKHLGLGALAALVTTLMVMACNYPLTRLQRNYQSDIMNAKDDRMKATSEILKNMKILKLQAWDNQFLNKVKTLRKKEYDCLWKSLRLQDFTTFILWGAPSLISVVTFVTCMLMGVKLTAGAVLSALATFQMLQSPIFGLPDLLSALVQSKVSADRIASYLQQSETQKDAVEYCSNDHTEFSVEIENGAFSWEPESSRPTLDDIELKVKSGMKVAICGAVGSGKSSLPSSILGEIQKLKGTVRVSGKQAYVPQSPWILSGTIRDNILFGSIYESEKYERTVKACALIKDFELFSNGDLTEIGERGINMSGGQKQRIQIARAVYQNADIYLLDDPFSAVDAHTGRELFEDCLMGILKDKTVLYVTHQVEFLPAADLILVMQNGRVMQAGKFEELLKQNIGSSLCVLARTILVAIGGLSTAETFFSRMLCSIFRAPMSYFDSTPTGRILNRASTDQSVLDLEMAVKLGWCAFSIIQIVGTIFVMSQVAWQRYYTPTERELSRMSGVERAPILHHFAESLAGATTIRAFDQRDRFISSNLVLIDSHSRPWFHVASAMEWLSFRLNLLSHFVFAFSLVLLVTLPEGVINPSIAGLGVTYGLSLNVLQATVIWNICNAENKMISVERILQHSKIPSEAPLVIDDQRPLDNWPNVGSIVFRDLQVRYAEHFPAVLKNITCAFPGGKKIGVVGRTGSGKSTLIQALFRIVEPSHGTIVIDNVDITKIGLHDLRSRLGIIPQDNALFDGTIRLNLDPLAQYTDREIWEALDKCQLGDVIRAKDEKLDATVVENGENWSVGQRQLVCLGRVLLKKSNILVLDEATASVDSATDGVIQKIINQEFKDRTVVTIAHRIHTVIESDLVLVLSDGRIAEFDSPAKLLQREDSFFSKLIKEYSLRSNHFAGSNDLLS

SEQ ID NO: 96626 - protein, 915 aa, Arabidopsis thaliana
  peptide (1)..(915): Ceres Seq. ID no. 12734028
  misc_feature (383)..(619): Pfam Name: ABC transporter transmembrane region Pfam Description: ABC transporter transmembrane region
  misc_feature (411)..(905): Homolog of NCBI NO: 15230686 NR Description: ABC transporter family protein; protein id:
  misc_feature (1)..(417): Homolog of NCBI NO: 15230686 NR Description: ABC transporter family protein; protein id:
  misc_feature (411)..(904): Homolog of NCBI NO: 7485868 NR Description: hypothetical protein F20D22.11 - Arabidopsis
  misc_feature (411)..(904): Homolog of NCBI NO: 15219648 NR Description: ABC transporter family protein; protein id: supported by cDNA: gi_10197657 [Arabidopsis thaliana]
  misc_feature (1)..(407): Homolog of NCBI NO: 7485868 NR Description: hypothetical protein F20D22.11 - Arabidopsis
  misc_feature (1)..(407): Homolog of NCBI NO: 15219648 NR Description: ABC transporter family protein; protein id: supported by cDNA: gi_10197657 [Arabidopsis thaliana]
  misc_feature (1)..(417): Homolog of NCBI NO: 30682473 NR Description: ABC transporter family protein [Arabidopsis
  misc_feature (411)..(741): Homolog of NCBI NO: 30682473 NR Description: ABC transporter family protein [Arabidopsis
  misc_feature (752)..(905): Homolog of NCBI NO: 30682473 NR Description: ABC transporter family protein [Arabidopsis
  misc_feature (412)..(906): Homolog of NCBI NO: 27368883 NR Description: MRP-like ABC transporter [Oryza sativa (japonica
MLPIQIFSAIYILQKHLGLGALAALVTTLMVMACNYPLTRLQRNYQSDIMNAKDDRMKATSEILKNMKILKLQAWDNQFLNKVKTLRKKEYDCLWKSLRLQDFTTFILWGAPSLISVVTFVTCMLMGVKLTAGAVLSALATFQMLQSPIFGLPDLLSALVQSKVSADRIASYLQQSETQKDAVEYCSNDHTEFSVEIENGAFSWEPESSRPTLDDIELKVKSGMKVAICGAVGSGKSSLPSSILGEIQKLKGTVRVSGKQAYVPQSPWILSGTIRDNILFGSIYESEKYERTVKACALIKDFELFSNGDLTEIGERGINMSGGQKQRIQIARAVYQNADIYLLDDPFSAVDAHTGRELFEDCLMGILKDKTVLYVTHQVEFLPAADLILVMQNGRVMQAGKFEELLKQNIGSSLCVLARTILVAIGGLSTAETFFSRMLCSIFRAPMSYFDSTPTGRILNRASTDQSVLDLEMAVKLGWCAFSIIQIVGTIFVMSQVAWQRYYTPTERELSRMSGVERAPILHHFAESLAGATTIRAFDQRDRFISSNLVLIDSHSRPWFHVASAMEWLSFRLNLLSHFVFAFSLVLLVTLPEGVINPSIAGLGVTYGLSLNVLQATVIWNICNAENKMISVERILQHSKIPSEAPLVIDDQRPLDNWPNVGSIVFRDLQVRYAEHFPAVLKNITCAFPGGKKIGVVGRTGSGKSTLIQALFRIVEPSHGTIVIDNVDITKIGLHDLRSRLGIIPQDNALFDGTIRLNLDPLAQYTDREIWEALDKCQLGDVIRAKDEKLDATVVENGENWSVGQRQLVCLGRVLLKKSNILVLDEATASVDSATDGVIQKIINQEFKDRTVVTIAHRIHTVIESDLVLVLSDGRIAEFDSPAKLLQREDSFFSKLIKEYSLRSNHFAGSNDLLS

SEQ ID NO: 96627 - protein, 886 aa, Arabidopsis thaliana
  peptide (1)..(886): Ceres Seq. ID no. 12734029
  misc_feature (354)..(590): Pfam Name: ABC transporter transmembrane region Pfam Description: ABC transporter transmembrane region
  misc_feature (382)..(876): Homolog of NCBI NO: 15230686 NR Description: ABC transporter family protein; protein id:
  misc_feature (1)..(388): Homolog of NCBI NO: 15230686 NR Description: ABC transporter family protein; protein id:
  misc_feature (382)..(875): Homolog of NCBI NO: 7485868 NR Description: hypothetical protein F20D22.11 - Arabidopsis
  misc_feature (382)..(875): Homolog of NCBI NO: 15219648 NR Description: ABC transporter family protein; protein id: supported by cDNA: gi_10197657 [Arabidopsis thaliana]
  misc_feature (1)..(378): Homolog of NCBI NO: 7485868 NR Description: hypothetical protein F20D22.11 - Arabidopsis
  misc_feature (1)..(378): Homolog of NCBI NO: 15219648 NR Description: ABC transporter family protein; protein id: supported by cDNA: gi_10197657 [Arabidopsis thaliana]
  misc_feature (1)..(388): Homolog of NCBI NO: 30682473 NR Description: ABC transporter family protein [Arabidopsis
  misc_feature (382)..(712): Homolog of NCBI NO: 30682473 NR Description: ABC transporter family protein [Arabidopsis
  misc_feature (723)..(876): Homolog of NCBI NO: 30682473 NR Description: ABC transporter family protein [Arabidopsis
  misc_feature (383)..(877): Homolog of NCBI NO: 27368883 NR Description: MRP-like ABC transporter [Oryza sativa (japonica
MVMACNYPLTRLQRNYQSDIMNAKDDRMKATSEILKNMKILKLQAWDNQFLNKVKTLRKKEYDCLWKSLRLQDFTTFILWGAPSLISVVTFVTCMLMGVKLTAGAVLSALATFQMLQSPIFGLPDLLSALVQSKVSADRIASYLQQSETQKDAVEYCSNDHTEFSVEIENGAFSWEPESSRPTLDDIELKVKSGMKVAICGAVGSGKSSLPSSILGEIQKLKGTVRVSGKQAYVPQSPWILSGTIRDNILFGSIYESEKYERTVKACALIKDFELFSNGDLTEIGERGINMSGGQKQRIQIARAVYQNADIYLLDDPFSAVDAHTGRELFEDCLMGILKDKTVLYVTHQVEFLPAADLILVMQNGRVMQAGKFEELLKQNIGSSLCVLARTILVAIGGLSTAETFFSRMLCSIFRAPMSYFDSTPTGRILNRASTDQSVLDLEMAVKLGWCAFSIIQIVGTIFVMSQVAWQRYYTPTERELSRMSGVERAPILHHFAESLAGATTIRAFDQRDRFISSNLVLIDSHSRPWFHVASAMEWLSFRLNLLSHFVFAFSLVLLVTLPEGVINPSIAGLGVTYGLSLNVLQATVIWNICNAENKMISVERILQHSKIPSEAPLVIDDQRPLDNWPNVGSIVFRDLQVRYAEHFPAVLKNITCAFPGGKKIGVVGRTGSGKSTLIQALFRIVEPSHGTIVIDNVDITKIGLHDLRSRLGIIPQDNALFDGTIRLNLDPLAQYTDREIWEALDKCQLGDVIRAKDEKLDATVVENGENWSVGQRQLVCLGRVLLKKSNILVLDEATASVDSATDGVIQKIINQEFKDRTVVTIAHRIHTVIESDLVLVLSDGRIAEFDSPAKLLQREDSFFSKLIKEYSLRSNHFAGSNDLLS

SEQ ID NO: 96628 - DNA, 2349 bp, Arabidopsis thaliana
  misc_feature (1)..(2349): Ceres Seq. ID no. 12734071
  misc_feature: MA Experiment ID: 20000307 Result: Down-regulated in Transcription
  misc_feature: MA Experiment 20000307 PARAMETER Experiment Name: At_Germinating_Seeds_Sub_P Parameter: Age (hr) Value: 24 vs. 0
  misc_feature: MA Experiment 20000307 PARAMETER Experiment Name: At_Germinating_Seeds_Sub_P Parameter: Organism Value: A. thaliana
  misc_feature: MA Experiment 20000307 PARAMETER Experiment Name: At_Germinating_Seeds_Sub_P Parameter: Plant Line Value: WS
  misc_feature: MA Experiment 20000307 PARAMETER Experiment Name: At_Germinating_Seeds_Sub_P Parameter: Tissue Value: Germinating Seeds
atgcacagattgaactacagaaaatggcgccttcctttgaaaccgtttggtagttgtattcacagctatgctgatagaacgaagcttcactcgaatctgcttttgggagatttgtctaaatctggtcgggtcgatgaagcccgccaaatgttcgataaaatgcctgagagggatgagtttacatggaacacgatgatcgttgcttactcgaattcaaggcgactttctgatgcagaaaagctttttcgtagcaacccagtgaagaatacaatctcctggaatgctcttatctctgggtattgcaagtctggaagtaaagttgaagcttttaatttgttttgggaaatgcagtctgatggaataaaacctaacgagtacactttgggtagtgttcttaggatgtgtacttcgcttgttttgcttctgagaggtgaacagattcatgggcatacaataaaaaccgggtttgatttggatgttaatgtggtgaatggccttcttgctatgtatgcacaatgcaagcgtatctctgaagctgaatacctctttgagacaatggaaggtgagaaaaataatgttacatggacttcaatgctcactggttactctcaaaatggatttgctttcaaggcaatagagtgttttagggatttgagaagagaaggaaatcaatcgaatcaatatacatttcctagtgttttaactgcttgtgcctcggtttctgcttgcagggtaggagtccaggtacattgctgcatagttaagagtggtttcaagaccaatatctatgttcagagcgcattgattgatatgtatgctaaatgcagagaaatggaatccgcaagagctttgttagaaggtatggaggttgatgatgtggtatcttggaactcgatgattgtagggtgtgttagacaaggtcttattggagaagctctgtctatgtttggaagaatgcatgagcgagatatgaaaatagatgatttcacgatcccatccatcttaaattgttttgctttgtctaggacagaaatgaagatagcttcttctgcacattgtctgattgtgaaaaccgggtatgcgacttacaaacttgtgaataacgcccttgtggatatgtatgctaaaagagggatcatggattcagcgttgaaagtgtttgaagggatgattgagaaagatgtgatatcttggacagctcttgtgacaggaaatacacataacggatcttatgatgaagcactgaagttgttctgtaacatgagagttggaggcattactcctgataagattgttacagcgagtgtattaagcgcctcggcggagttaactcttttggagtttgggcaacaggtacatgggaattatattaaatctggttttccttcatctttgtcagtaaacaattctcttgtgacaatgtacacaaagtgtggaagcttagaagacgcgaatgttatattcaactctatggaaatcagggatttaataacatggacttgtcttattgtgggttacgcaaaaaacgattacattacctttatcgggttactatttgcttgcagtcatgcaggtctcttagaagatgctcaacgctactttgattcgatgagaacagtttatggaatcacaccaggaccggaacactatgcctgtatgattgatctctttggtagatctggtgatttcgtaaaagtagagcaattgctgcatcaaatggaggttgaaccagatgctactgtatggaaagcgattttggctgcaagtaggaagcatgggaatatagaaaacggggaaagagcagcgaaaactcttatggaattggaaccaaacaatgctgttccttatgttcagttatcaaacatgtattctgcagcgggaagacaagacgaagctgcaaatgttcgtagattgatgaaatctcgtaatataagcaaagaacctggttgcagttgggttgaagagaaaggtaaagttcatagctttatgtctgaagatagaagacatccgagaatggttgagatatattccaaggttgatgaaatgatgcttttgatcaaagaggctggttatttcgcggatatgagttttgctctccatgacttagataaggaagggaaggagctaggtttggcttaccatagtgagaaattagctgttgcgtttggtctacttgttgtaccatctggagctccaatccggatcatcaagaaccttcgcgtctgtggggattgccacagtgcaatgaagtatatatcaagagtatatcttcggcatatcatcttaagagattctaactgctttcatcactttagagatggaaagtgttcttgcggagactattggtaa

SEQ ID NO: 96629 - protein, 782 aa, Arabidopsis thaliana
  peptide (1)..(782): Ceres Seq. ID no. 12734072
  misc_feature (91)..(125): Pfam Name: PPR repeat Pfam Description: PPR repeat
  misc_feature (510)..(782): Homolog of NCBI NO: 5050911 NR Description: PCMP-H2 [Arabidopsis thaliana]
  misc_feature (84)..(509): Homolog of NCBI NO: 15234095 NR Description: putative protein; protein id: At4g33170.1
  misc_feature (508)..(782): Homolog of NCBI NO: 15234095 NR Description: putative protein; protein id: At4g33170.1
  misc_feature (32)..(72): Homolog of NCBI NO: 15234095 NR Description: putative protein; protein id: At4g33170.1
  misc_feature (21)..(110): Homolog of NCBI NO: 15234095 NR Description: putative protein; protein id: At4g33170.1
  misc_feature (58)..(511): Homolog of NCBI NO: 34915012 NR Description: P0458A05.10 [Oryza sativa (japonica
  misc_feature (510)..(782): Homolog of NCBI NO: 34915012 NR Description: P0458A05.10 [Oryza sativa (japonica
  misc_feature (58)..(771): Homolog of NCBI NO: 15226200 NR Description: putative selenium-binding protein; protein id:
  misc_feature (9)..(82): Homolog of NCBI NO: 15226200 NR Description: putative selenium-binding protein; protein id:
  misc_feature (63)..(493): Homolog of NCBI NO: 15234095 NR Description: putative protein; protein id: At4g33170.1
MHRLNYRKWRLPLKPFGSCIHSYADRTKLHSNLLLGDLSKSGRVDEARQMFDKMPERDEFTWNTMIVAYSNSRRLSDAEKLFRSNPVKNTISWNALISGYCKSGSKVEAFNLFWEMQSDGIKPNEYTLGSVLRMCTSLVLLLRGEQIHGHTIKTGFDLDVNVVNGLLAMYAQCKRISEAEYLFETMEGEKNNVTWTSMLTGYSQNGFAFKAIECFRDLRREGNQSNQYTFPSVLTACASVSACRVGVQVHCCIVKSGFKTNIYVQSALIDMYAKCREMESARALLEGMEVDDVVSWNSMIVGCVRQGLIGEALSMFGRMHERDMKIDDFTIPSILNCFALSRTEMKIASSAHCLIVKTGYATYKLVNNALVDMYAKRGIMDSALKVFEGMIEKDVISWTALVTGNTHNGSYDEALKLFCNMRVGGITPDKIVTASVLSASAELTLLEFGQQVHGNYIKSGFPSSLSVNNSLVTMYTKCGSLEDANVIFNSMEIRDLITWTCLIVGYAKNDYITFIGLLFACSHAGLLEDAQRYFDSMRTVYGITPGPEHYACMIDLFGRSGDFVKVEQLLHQMEVEPDATVWKAILAASRKHGNIENGERAAKTLMELEPNNAVPYVQLSNMYSAAGRQDEAANVRRLMKSRNISKEPGCSWVEEKGKVHSFMSEDRRHPRMVEIYSKVDEMMLLIKEAGYFADMSFALHDLDKEGKELGLAYHSEKLAVAFGLLVVPSGAPIRIIKNLRVCGDCHSAMKYISRVYLRHIILRDSNCFHHFRDGKCSCGDYW

SEQ ID NO: 96630 - protein, 733 aa, Arabidopsis thaliana
  peptide (1)..(733): Ceres Seq. ID no. 12734073
  misc_feature (42)..(76): Pfam Name: PPR repeat Pfam Description: PPR repeat
  misc_feature (461)..(733): Homolog of NCBI NO: 5050911 NR Description: PCMP-H2 [Arabidopsis thaliana]
  misc_feature (35)..(460): Homolog of NCBI NO: 15234095 NR Description: putative protein; protein id: At4g33170.1
  misc_feature (459)..(733): Homolog of NCBI NO: 15234095 NR Description: putative protein; protein id: At4g33170.1
  misc_feature (1)..(23): Homolog of NCBI NO: 15234095 NR Description: putative protein; protein id: At4g33170.1
  misc_feature (1)..(61): Homolog of NCBI NO: 15234095 NR Description: putative protein; protein id: At4g33170.1
  misc_feature (9)..(462): Homolog of NCBI NO: 34915012 NR Description: P0458A05.10 [Oryza sativa (japonica
  misc_feature (461)..(733): Homolog of NCBI NO: 34915012 NR Description: P0458A05.10 [Oryza sativa (japonica
  misc_feature (9)..(722): Homolog of NCBI NO: 15226200 NR Description: putative selenium-binding protein; protein id:
  misc_feature (1)..(33): Homolog of NCBI NO: 15226200 NR Description: putative selenium-binding protein; protein id:
  misc_feature (14)..(444): Homolog of NCBI NO: 15234095 NR Description: putative protein; protein id: At4g33170.1
MFDKMPERDEFTWNTMIVAYSNSRRLSDAEKLFRSNPVKNTISWNALISGYCKSGSKVEAFNLFWEMQSDGIKPNEYTLGSVLRMCTSLVLLLRGEQIHGHTIKTGFDLDVNVVNGLLAMYAQCKRISEAEYLFETMEGEKNNVTWTSMLTGYSQNGFAFKAIECFRDLRREGNQSNQYTFPSVLTACASVSACRVGVQVHCCIVKSGFKTNIYVQSALIDMYAKCREMESARALLEGMEVDDVVSWNSMIVGCVRQGLIGEALSMFGRMHERDMKIDDFTIPSILNCFALSRTEMKIASSAHCLIVKTGYATYKLVNNALVDMYAKRGIMDSALKVFEGMIEKDVISWTALVTGNTHNGSYDEALKLFCNMRVGGITPDKIVTASVLSASAELTLLEFGQQVHGNYIKSGFPSSLSVNNSLVTMYTKCGSLEDANVIFNSMEIRDLITWTCLIVGYAKNDYITFIGLLFACSHAGLLEDAQRYFDSMRTVYGITPGPEHYACMIDLFGRSGDFVKVEQLLHQMEVEPDATVWKAILAASRKHGNIENGERAAKTLMELEPNNAVPYVQLSNMYSAAGRQDEAANVRRLMKSRNISKEPGCSWVEEKGKVHSFMSEDRRHPRMVEIYSKVDEMMLLIKEAGYFADMSFALHDLDKEGKELGLAYHSEKLAVAFGLLVVPSGAPIRIIKNLRVCGDCHSAMKYISRVYLRHIILRDSNCFHHFRDGKCSCGDYW

SEQ ID NO: 96631 - protein, 729 aa, Arabidopsis thaliana
  peptide (1)..(729): Ceres Seq. ID no. 12734074
  misc_feature (38)..(72): Pfam Name: PPR repeat Pfam Description: PPR repeat
  misc_feature (457)..(729): Homolog of NCBI NO: 5050911 NR Description: PCMP-H2 [Arabidopsis thaliana]
  misc_feature (31)..(456): Homolog of NCBI NO: 15234095 NR Description: putative protein; protein id: At4g33170.1
  misc_feature (455)..(729): Homolog of NCBI NO: 15234095 NR Description: putative protein; protein id: At4g33170.1
  misc_feature (1)..(19): Homolog of NCBI NO: 15234095 NR Description: putative protein; protein id: At4g33170.1
  misc_feature (1)..(57): Homolog of NCBI NO: 15234095 NR Description: putative protein; protein id: At4g33170.1
  misc_feature (5)..(458): Homolog of NCBI NO: 34915012 NR Description: P0458A05.10 [Oryza sativa (japonica
  misc_feature (457)..(729): Homolog of NCBI NO: 34915012 NR Description: P0458A05.10 [Oryza sativa (japonica
  misc_feature (5)..(718): Homolog of NCBI NO: 15226200 NR Description: putative selenium-binding protein; protein id:
  misc_feature (1)..(29): Homolog of NCBI NO: 15226200 NR Description: putative selenium-binding protein; protein id:
  misc_feature (10)..(440): Homolog of NCBI NO: 15234095 NR Description: putative protein; protein id: At4g33170.1
MPERDEFTWNTMIVAYSNSRRLSDAEKLFRSNPVKNTISWNALISGYCKSGSKVEAFNLFWEMQSDGIKPNEYTLGSVLRMCTSLVLLLRGEQIHGHTIKTGFDLDVNVVNGLLAMYAQCKRISEAEYLFETMEGEKNNVTWTSMLTGYSQNGFAFKAIECFRDLRREGNQSNQYTFPSVLTACASVSACRVGVQVHCCIVKSGFKTNIYVQSALIDMYAKCREMESARALLEGMEVDDVVSWNSMIVGCVRQGLIGEALSMFGRMHERDMKIDDFTIPSILNCFALSRTEMKIASSAHCLIVKTGYATYKLVNNALVDMYAKRGIMDSALKVFEGMIEKDVISWTALVTGNTHNGSYDEALKLFCNMRVGGITPDKIVTASVLSASAELTLLEFGQQVHGNYIKSGFPSSLSVNNSLVTMYTKCGSLEDANVIFNSMEIRDLITWTCLIVGYAKNDYITFIGLLFACSHAGLLEDAQRYFDSMRTVYGITPGPEHYACMIDLFGRSGDFVKVEQLLHQMEVEPDATVWKAILAASRKHGNIENGERAAKTLMELEPNNAVPYVQLSNMYSAAGRQDEAANVRRLMKSRNISKEPGCSWVEEKGKVHSFMSEDRRHPRMVEIYSKVDEMMLLIKEAGYFADMSFALHDLDKEGKELGLAYHSEKLAVAFGLLVVPSGAPIRIIKNLRVCGDCHSAMKYISRVYLRHIILRDSNCFHHFRDGKCSCGDYW

SEQ ID NO: 96632 - DNA, 2925 bp, Arabidopsis thaliana
  misc_feature (1)..(2925): Ceres Seq. ID no. 12734189
  misc_feature: MA Experiment ID: 20000173 Result: Down-regulated in Transcription
  misc_feature: MA Experiment 20000173 PARAMETER Experiment Name: At_42deg_Heat_P Parameter: Age (day) Value: 14
  misc_feature: MA Experiment 20000173 PARAMETER Experiment Name: At_42deg_Heat_P Parameter: Organism Value: A. thaliana
  misc_feature: MA Experiment 20000173 PARAMETER Experiment Name: At_42deg_Heat_P Parameter: Plant Line Value: WS
  misc_feature: MA Experiment 20000173 PARAMETER Experiment Name: At_42deg_Heat_P Parameter: Temperature (deg C) Value: 42 vs. 22
  misc_feature: MA Experiment 20000173 PARAMETER Experiment Name: At_42deg_Heat_P Parameter: Timepoint (hr) Value: 6
  misc_feature: MA Experiment 20000173 PARAMETER Experiment Name: At_42deg_Heat_P Parameter: Tissue Value: Aerial
  misc_feature: MA Experiment ID: 20000180 Result: Up-regulated in Transcription
  misc_feature: MA Experiment 20000180 PARAMETER Experiment Name: At_Germinating_Seeds_P Parameter: Age (hr) Value: 24 vs. 0
  misc_feature: MA Experiment 20000180 PARAMETER Experiment Name: At_Germinating_Seeds_P Parameter: Tissue Value: Germinating Seeds
  misc_feature: MA Experiment ID: 20000235 Result: Up-regulated in Transcription
  misc_feature: MA Experiment 20000235 PARAMETER Experiment Name: At_Siliques_P Parameter: Age (day) Value: 21
  misc_feature: MA Experiment 20000235 PARAMETER Experiment Name: At_Siliques_P Parameter: Organism Value: A. thaliana
  misc_feature: MA Experiment 20000235 PARAMETER Experiment Name: At_Siliques_P Parameter: Plant Line Value: WS
  misc_feature: MA Experiment 20000235 PARAMETER Experiment Name: At_Siliques_P Parameter: Tissue Value: 5-10mm Siliques vs. Whole Plant
  misc_feature: MA Experiment ID: 20000286 Result: Up-regulated in Transcription
  misc_feature: MA Experiment 20000286 PARAMETER Experiment Name: At_Open_Flower_P Parameter: Age (day) Value: 21
  misc_feature: MA Experiment 20000286 PARAMETER Experiment Name: At_Open_Flower_P Parameter: Plant Line Value: WS
  misc_feature: MA Experiment 20000286 PARAMETER Experiment Name: At_Open_Flower_P Parameter: Tissue Value: Half Open vs. Whole Plant
  misc_feature: MA Experiment ID: 20000439 Result: Up-regulated in Transcription
  misc_feature: MA Experiment 20000439 PARAMETER Experiment Name: At_Roots__P Parameter: Age (day) Value: 14 vs. 21
  misc_feature: MA Experiment 20000439 PARAMETER Experiment Name: At_Roots__P Parameter: Organism Value: A. thaliana
  misc_feature: MA Experiment 20000439 PARAMETER Experiment Name: At_Roots__P Parameter: Tissue Value: Roots vs. Whole Plant
  misc_feature: MA Experiment ID: 20001451 Result: Down-regulated in Transcription
  misc_feature: MA Experiment 20001451 PARAMETER Experiment Name: At_Far-red-induction_P Parameter: Age (day) Value: 7
  misc_feature: MA Experiment 20001451 PARAMETER Experiment Name: At_Far-red-induction_P Parameter: Light Value: Far-red vs. White
  misc_feature: MA Experiment 20001451 PARAMETER Experiment Name: At_Far-red-induction_P Parameter: Organism Value: A. thaliana
  misc_feature: MA Experiment 20001451 PARAMETER Experiment Name: At_Far-red-induction_P Parameter: Plant Line Value: Columbia
  misc_feature: MA Experiment 20001451 PARAMETER Experiment Name: At_Far-red-induction_P Parameter: Timepoint (hr) Value: 24
  misc_feature: MA Experiment 20001451 PARAMETER Experiment Name: At_Far-red-induction_P Parameter: Tissue Value: Whole Plant
  misc_feature: MA Experiment ID: 20001556 Result: Down-regulated in Transcription
  misc_feature: MA Experiment 20001556 PARAMETER Experiment Name: At_Drought_Soil_Dry_P Parameter: Age (day) Value: 26
  misc_feature: MA Experiment 20001556 PARAMETER Experiment Name: At_Drought_Soil_Dry_P Parameter: Organism Value: A. thaliana
  misc_feature: MA Experiment 20001556 PARAMETER Experiment Name: At_Drought_Soil_Dry_P Parameter: Plant Line Value: WS
  misc_feature: MA Experiment 20001556 PARAMETER Experiment Name: At_Drought_Soil_Dry_P Parameter: Post Timepoint (hr) Value: None
  misc_feature: MA Experiment 20001556 PARAMETER Experiment Name: At_Drought_Soil_Dry_P Parameter: Post-Treatment Value: None
  misc_feature: MA Experiment 20001556 PARAMETER Experiment Name: At_Drought_Soil_Dry_P Parameter: Timepoint (day) Value: 12
  misc_feature: MA Experiment 20001556 PARAMETER Experiment Name: At_Drought_Soil_Dry_P Parameter: Treatment Value: Drought vs. No Drought
  misc_feature: MA Experiment ID: 20001558 Result: Down-regulated in Transcription
  misc_feature: MA Experiment 20001558 PARAMETER Experiment Name: At_Drought_Soil_Dry_P Parameter: Age (day) Value: 27
  misc_feature: MA Experiment 20001558 PARAMETER Experiment Name: At_Drought_Soil_Dry_P Parameter: Organism Value: A. thaliana
  misc_feature: MA Experiment 20001558 PARAMETER Experiment Name: At_Drought_Soil_Dry_P Parameter: Plant Line Value: WS
  misc_feature: MA Experiment 20001558 PARAMETER Experiment Name: At_Drought_Soil_Dry_P Parameter: Post Timepoint (hr) Value: 6
  misc_feature: MA Experiment 20001558 PARAMETER Experiment Name: At_Drought_Soil_Dry_P Parameter: Post-Treatment Value: Re-Water vs. No Drought
  misc_feature: MA Experiment 20001558 PARAMETER Experiment Name: At_Drought_Soil_Dry_P Parameter: Timepoint (day) Value: 13
  misc_feature: MA Experiment 20001558 PARAMETER Experiment Name: At_Drought_Soil_Dry_P Parameter: Treatment Value: Drought vs. No Drought
  misc_feature: MA Experiment ID: 20001906 Result: Down-regulated in Transcription
  misc_feature: MA Experiment 20001906 PARAMETER Experiment Name: At_Drought_Reproduction_P Parameter: Age (day) Value: 35
  misc_feature: MA Experiment 20001906 PARAMETER Experiment Name: At_Drought_Reproduction_P Parameter: Organism Value: A. thaliana
  misc_feature: MA Experiment 20001906 PARAMETER Experiment Name: At_Drought_Reproduction_P Parameter: Plant Line Value: WS
  misc_feature: MA Experiment 20001906 PARAMETER Experiment Name: At_Drought_Reproduction_P Parameter: Timepoint (day) Value: 5
  misc_feature: MA Experiment 20001906 PARAMETER Experiment Name: At_Drought_Reproduction_P Parameter: Tissue Value: Siliques
  misc_feature: MA Experiment 20001906 PARAMETER Experiment Name: At_Drought_Reproduction_P Parameter: Treatment Value: Drought vs. No Drought
  misc_feature: MA Experiment ID: 20001911 Result: Down-regulated in Transcription
  misc_feature: MA Experiment 20001911 PARAMETER Experiment Name: At_Drought_Reproduction_P Parameter: Age (day) Value: 40
  misc_feature: MA Experiment 20001911 PARAMETER Experiment Name: At_Drought_Reproduction_P Parameter: Organism Value: A. thaliana
  misc_feature: MA Experiment 20001911 PARAMETER Experiment Name: At_Drought_Reproduction_P Parameter: Plant Line Value: WS
  misc_feature: MA Experiment 20001911 PARAMETER Experiment Name: At_Drought_Reproduction_P Parameter: Timepoint (day) Value: 10
  misc_feature: MA Experiment 20001911 PARAMETER Experiment Name: At_Drought_Reproduction_P Parameter: Tissue Value: Flowers
  misc_feature: MA Experiment 20001911 PARAMETER Experiment Name: At_Drought_Reproduction_P Parameter: Treatment Value: Drought vs. No Drought
atggcggctactgcgacggaggatggaggattaagcttcactgtggcttcagtaatggaggatgtgttgcagcaacatggaaatgggcttagagatcatgatttagtgtctcgtcgagctgaagaagctgcatcgaggagatatgaggcggctaattggctgagaaggatggttggagttgttggagctaaggatttgcctgcagagccaacagaagaagggcttaggcttggtttaagaagtggaattatcctttgtaaagtcctcaataaggttcaacctggagctgtctcaaaggttgtggaaagtccttgtgatgccattcttgttgcggatggagctccgttatcagcatttcagtattttgagaatgttaggaactttcttgttgctatacaggaaatggggtttccaacatttgaggcatctgatctcgagcaaggaggaaatgcttctcgagttgtgaattgtgttttggctatcaaatcatatgatgaatggaaacaaagtggtggaattggagtttggaaatttggtggcaacattaagcctcctgcacttgggaagtcatcttttgtcagaaaaaactcagagccattcatgaactctttatcgagaacctcctcgatcaacaatgagaaagctccctctgagaatgattctaacaagctgtccagtcccagttccttgagcacacttgttcgcgctgttctatcagataaaaagcctgaggatgtgcccaaactgattgaatctctgctgagtaaagtagtcgaagagtttgaaaatcgagttacaaatcagtatgagttggagttctgtcatgcgaaggttagagcagctccaagagaatcaacttcgtcacagaacaacagatcatttcttaaacctcttggtgaaagagagagggaagagaagagtttcaaagcaataaagaaagatgatcacaatagtcagattcttgacgaaaagatgaaaactcgccaatttaaacaactgacaatcttcaaccaacaacaagaagatatagaaggactaagacagacgctctacacaacaagggctggtatgcaatttatgcagaagaaatttcaagaagagttctcttctcttggtatgcacgttcatggccttgctcatgctgcttctggctatcaccgagttcttgaagaaaaccgaaaactttataatcaagtgcaggatctcaagggtagcatccgtgtttattgtcgggtgcggccatttttgcctggacaatccagcttttctagtacaattgggaacatggaggatgataccatagggatcaatactgcatctagacatggaaaatcactcaaatccttcactttcaacaaagtctttggcccatctgcaactcaagaagaggtattttctgatatgcagccattgatccgttctgttcttgatggatacaatgtctgcatatttgcatatggtcaaactggatcaggaaaaacattcacaatgagtggaccaagagatctaacggagaagagccagggagttaattacagagcacttggtgatctgtttcttcttgctgaacaaagaaaagacacattccgctacgatattgcagttcagatgattgagatttacaatgagcaaatcaggaatagctctcaaaagggtctaagtgtaccggatgcaagtcttgttccagtctcttcaacatttgatgttattgatctaatgaaaactgggcacaagaatcgagccgttggatcaacagccttgaatgatcgaagcagtcgttctcatagctgcttgactgttcatgttcaaggaagagacttgacttcaggagctgtgcttcgaggatgcatgcatcttgtggatctagcaggcagtgagagggtagacaaatccgaggttactggagacagactaaaagaagcacagcacatcaatagatcgctctctgctttaggagatgtgattgcttcgctagctcacaagaacccacatgttccttacagaaacagcaaactcacacaactccttcaggactctcttggaggacaagcaaagacattgatgtttgtccacattagtcctgaggcagatgcagttggggaaacaataagcactttgaagtttgcagagagagtagctacggttgagcttggggctgcacgagtgaacaatgatacttcagatgttaaggaactcaaagaacagattgctactcttaaagcagcactcgcgagaaaagaagcagagtcacagcagaacaacatcttgaaaactcctggtggctctgagaaacacaaagccaaaactggtgaagtagagattcataacaataacatcatgacaaagaaatctgagagttgtgaagtggaggagattacagtgaactcaccaccttggccaccagtagcaagtccaggacaagcctacagagaggatgaccgaagtttcgggtccagcgagtgggttgacaaggtgatggtgaataacagacaagacgagatgagaagagtggagagtctttggggaggagccacaacagagaatggtattggtattctgccggaagatttttacaggagagatttggcttcagacacttcaagaatattctctgaacattcttacaacatcttcatgggaaacaacaacagcacagacgatctagatgcagccacaagtgactcatctgagccagatttgctctggcaattcaaccagtccaccaagatacctacaagaagcaatattgagtcaaaactcaagaaacccgtctcaaaacctataagaagtcctcaatccaggaacaactcaaacaacacggtttcacgtcctttggcttcacagaaggtagggaatggtcctcgtggcatgaaacagttcggtcctgctgatatgaagcggaaagctactaacgccagacattga

SEQ ID NO: 96633 - protein, 974 aa, Arabidopsis thaliana
  peptide (1)..(974): Ceres Seq. ID no. 12734190
  misc_feature (1)..(746): Homolog of NCBI NO: 18421069 NR Description: kinesin-related protein; protein id: At5g27000.1
  misc_feature (1)..(746): Homolog of NCBI NO: 11358474 NR Description: kinesin-like heavy chain [validated] -
  misc_feature (306)..(746): Homolog of NCBI NO: 7485241 NR Description: hypothetical protein A_IG002P16.12 - Arabidopsis >gi|2191180|gb|AAB61066.1| Similar to kinesin; coded for by A.
  misc_feature (1)..(271): Homolog of NCBI NO: 7485241 NR Description: hypothetical protein A_IG002P16.12 - Arabidopsis >gi|2191180|gb|AAB61066.1| Similar to kinesin; coded for by A.
  misc_feature (5)..(271): Homolog of NCBI NO: 25402519 NR Description: hypothetical protein [imported] - Arabidopsis >gi|3249113|gb|AAC24096.1| Strong similarity to kinesin homolog gb|2191180 from A. thaliana BAC gb|AF007270. [Arabidopsis
  misc_feature (544)..(759): Homolog of NCBI NO: 25402519 NR Description: hypothetical protein [imported] - Arabidopsis >gi|3249113|gb|AAC24096.1| Strong similarity to kinesin homolog gb|2191180 from A. thaliana BAC gb|AF007270. [Arabidopsis
  misc_feature (402)..(528): Homolog of NCBI NO: 25402519 NR Description: hypothetical protein [imported] - Arabidopsis >gi|3249113|gb|AAC24096.1| Strong similarity to kinesin homolog gb|2191180 from A. thaliana BAC gb|AF007270. [Arabidopsis
  misc_feature (29)..(432): Homolog of NCBI NO: 38606523 NR Description: OSJNBa0016O02.10 [Oryza sativa (japonica
  misc_feature (463)..(769): Homolog of NCBI NO: 38606523 NR Description: OSJNBa0016O02.10 [Oryza sativa (japonica
  misc_feature (202)..(528): Homolog of NCBI NO: 22329432 NR Description: kinesin-related protein; protein id: At1g09170.1
MAATATEDGGLSFTVASVMEDVLQQHGNGLRDHDLVSRRAEEAASRRYEAANWLRRMVGVVGAKDLPAEPTEEGLRLGLRSGIILCKVLNKVQPGAVSKVVESPCDAILVADGAPLSAFQYFENVRNFLVAIQEMGFPTFEASDLEQGGNASRVVNCVLAIKSYDEWKQSGGIGVWKFGGNIKPPALGKSSFVRKNSEPFMNSLSRTSSINNEKAPSENDSNKLSSPSSLSTLVRAVLSDKKPEDVPKLIESLLSKVVEEFENRVTNQYELEFCHAKVRAAPRESTSSQNNRSFLKPLGEREREEKSFKAIKKDDHNSQILDEKMKTRQFKQLTIFNQQQEDIEGLRQTLYTTRAGMQFMQKKFQEEFSSLGMHVHGLAHAASGYHRVLEENRKLYNQVQDLKGSIRVYCRVRPFLPGQSSFSSTIGNMEDDTIGINTASRHGKSLKSFTFNKVFGPSATQEEVFSDMQPLIRSVLDGYNVCIFAYGQTGSGKTFTMSGPRDLTEKSQGVNYRALGDLFLLAEQRKDTFRYDIAVQMIEIYNEQIRNSSQKGLSVPDASLVPVSSTFDVIDLMKTGHKNRAVGSTALNDRSSRSHSCLTVHVQGRDLTSGAVLRGCMHLVDLAGSERVDKSEVTGDRLKEAQHINRSLSALGDVIASLAHKNPHVPYRNSKLTQLLQDSLGGQAKTLMFVHISPEADAVGETISTLKFAERVATVELGAARVNNDTSDVKELKEQIATLKAALARKEAESQQNNILKTPGGSEKHKAKTGEVEIHNNNIMTKKSESCEVEEITVNSPPWPPVASPGQAYREDDRSFGSSEWVDKVMVNNRQDEMRRVESLWGGATTENGIGILPEDFYRRDLASDTSRIFSEHSYNIFMGNNNSTDDLDAATSDSSEPDLLWQFNQSTKIPTRSNIESKLKKPVSKPIRSPQSRNNSNNTVSRPLASQKVGNGPRGMKQFGPADMKRKATNARH

SEQ ID NO: 96634 - protein, 956 aa, Arabidopsis thaliana
  peptide (1)..(956): Ceres Seq. ID no. 12734191
  misc_feature (1)..(728): Homolog of NCBI NO: 18421069 NR Description: kinesin-related protein; protein id: At5g27000.1
  misc_feature (1)..(728): Homolog of NCBI NO: 11358474 NR Description: kinesin-like heavy chain [validated] -
  misc_feature (288)..(728): Homolog of NCBI NO: 7485241 NR Description: hypothetical protein A_IG002P16.12 - Arabidopsis >gi|2191180|gb|AAB61066.1| Similar to kinesin; coded for by A.
  misc_feature (1)..(253): Homolog of NCBI NO: 7485241 NR Description: hypothetical protein A_IG002P16.12 - Arabidopsis >gi|2191180|gb|AAB61066.1| Similar to kinesin; coded for by A.
  misc_feature (1)..(253): Homolog of NCBI NO: 25402519 NR Description: hypothetical protein [imported] - Arabidopsis >gi|3249113|gb|AAC24096.1| Strong similarity to kinesin homolog gb|2191180 from A. thaliana BAC gb|AF007270. [Arabidopsis
  misc_feature (526)..(741): Homolog of NCBI NO: 25402519 NR Description: hypothetical protein [imported] - Arabidopsis >gi|3249113|gb|AAC24096.1| Strong similarity to kinesin homolog gb|2191180 from A. thaliana BAC gb|AF007270. [Arabidopsis
  misc_feature (384)..(510): Homolog of NCBI NO: 25402519 NR Description: hypothetical protein [imported] - Arabidopsis >gi|3249113|gb|AAC24096.1| Strong similarity to kinesin homolog gb|2191180 from A. thaliana BAC gb|AF007270. [Arabidopsis
  misc_feature (11)..(414): Homolog of NCBI NO: 38606523 NR Description: OSJNBa0016O02.10 [Oryza sativa (japonica
  misc_feature (445)..(751): Homolog of NCBI NO: 38606523 NR Description: OSJNBa0016O02.10 [Oryza sativa (japonica
  misc_feature (184)..(510): Homolog of NCBI NO: 22329432 NR Description: kinesin-related protein; protein id: At1g09170.1
MEDVLQQHGNGLRDHDLVSRRAEEAASRRYEAANWLRRMVGVVGAKDLPAEPTEEGLRLGLRSGIILCKVLNKVQPGAVSKVVESPCDAILVADGAPLSAFQYFENVRNFLVAIQEMGFPTFEASDLEQGGNASRVVNCVLAIKSYDEWKQSGGIGVWKFGGNIKPPALGKSSFVRKNSEPFMNSLSRTSSINNEKAPSENDSNKLSSPSSLSTLVRAVLSDKKPEDVPKLIESLLSKVVEEFENRVTNQYELEFCHAKVRAAPRESTSSQNNRSFLKPLGEREREEKSFKAIKKDDHNSQILDEKMKTRQFKQLTIFNQQQEDIEGLRQTLYTTRAGMQFMQKKFQEEFSSLGMHVHGLAHAASGYHRVLEENRKLYNQVQDLKGSIRVYCRVRPFLPGQSSFSSTIGNMEDDTIGINTASRHGKSLKSFTFNKVFGPSATQEEVFSDMQPLIRSVLDGYNVCIFAYGQTGSGKTFTMSGPRDLTEKSQGVNYRALGDLFLLAEQRKDTFRYDIAVQMIEIYNEQIRNSSQKGLSVPDASLVPVSSTFDVIDLMKTGHKNRAVGSTALNDRSSRSHSCLTVHVQGRDLTSGAVLRGCMHLVDLAGSERVDKSEVTGDRLKEAQHINRSLSALGDVIASLAHKNPHVPYRNSKLTQLLQDSLGGQAKTLMFVHISPEADAVGETISTLKFAERVATVELGAARVNNDTSDVKELKEQIATLKAALARKEAESQQNNILKTPGGSEKHKAKTGEVEIHNNNIMTKKSESCEVEEITVNSPPWPPVASPGQAYREDDRSFGSSEWVDKVMVNNRQDEMRRVESLWGGATTENGIGILPEDFYRRDLASDTSRIFSEHSYNIFMGNNNSTDDLDAATSDSSEPDLLWQFNQSTKIPTRSNIESKLKKPVSKPIRSPQSRNNSNNTVSRPLASQKVGNGPRGMKQFGPADMKRKATNARH

SEQ ID NO: 96635 - protein, 918 aa, Arabidopsis thaliana
  peptide (1)..(918): Ceres Seq. ID no. 12734192
  misc_feature (1)..(690): Homolog of NCBI NO: 18421069 NR Description: kinesin-related protein; protein id: At5g27000.1
  misc_feature (1)..(690): Homolog of NCBI NO: 11358474 NR Description: kinesin-like heavy chain [validated] -
  misc_feature (250)..(690): Homolog of NCBI NO: 7485241 NR Description: hypothetical protein A_IG002P16.12 - Arabidopsis >gi|2191180|gb|AAB61066.1| Similar to kinesin; coded for by A.
  misc_feature (1)..(215): Homolog of NCBI NO: 7485241 NR Description: hypothetical protein A_IG002P16.12 - Arabidopsis >gi|2191180|gb|AAB61066.1| Similar to kinesin; coded for by A.
  misc_feature (1)..(215): Homolog of NCBI NO: 25402519 NR Description: hypothetical protein [imported] - Arabidopsis >gi|3249113|gb|AAC24096.1| Strong similarity to kinesin homolog gb|2191180 from A. thaliana BAC gb|AF007270. [Arabidopsis
  misc_feature (488)..(703): Homolog of NCBI NO: 25402519 NR Description: hypothetical protein [imported] - Arabidopsis >gi|3249113|gb|AAC24096.1| Strong similarity to kinesin homolog gb|2191180 from A. thaliana BAC gb|AF007270. [Arabidopsis
  misc_feature (346)..(472): Homolog of NCBI NO: 25402519 NR Description: hypothetical protein [imported] - Arabidopsis >gi|3249113|gb|AAC24096.1| Strong similarity to kinesin homolog gb|2191180 from A. thaliana BAC gb|AF007270. [Arabidopsis
  misc_feature (1)..(376): Homolog of NCBI NO: 38606523 NR Description: OSJNBa0016O02.10 [Oryza sativa (japonica
  misc_feature (407)..(713): Homolog of NCBI NO: 38606523 NR Description: OSJNBa0016O02.10 [Oryza sativa (japonica
  misc_feature (146)..(472): Homolog of NCBI NO: 22329432 NR Description: kinesin-related protein; protein id: At1g09170.1
MVGVVGAKDLPAEPTEEGLRLGLRSGIILCKVLNKVQPGAVSKVVESPCDAILVADGAPLSAFQYFENVRNFLVAIQEMGFPTFEASDLEQGGNASRVVNCVLAIKSYDEWKQSGGIGVWKFGGNIKPPALGKSSFVRKNSEPFMNSLSRTSSINNEKAPSENDSNKLSSPSSLSTLVRAVLSDKKPEDVPKLIESLLSKVVEEFENRVTNQYELEFCHAKVRAAPRESTSSQNNRSFLKPLGEREREEKSFKAIKKDDHNSQILDEKMKTRQFKQLTIFNQQQEDIEGLRQTLYTTRAGMQFMQKKFQEEFSSLGMHVHGLAHAASGYHRVLEENRKLYNQVQDLKGSIRVYCRVRPFLPGQSSFSSTIGNMEDDTIGINTASRHGKSLKSFTFNKVFGPSATQEEVFSDMQPLIRSVLDGYNVCIFAYGQTGSGKTFTMSGPRDLTEKSQGVNYRALGDLFLLAEQRKDTFRYDIAVQMIEIYNEQIRNSSQKGLSVPDASLVPVSSTFDVIDLMKTGHKNRAVGSTALNDRSSRSHSCLTVHVQGRDLTSGAVLRGCMHLVDLAGSERVDKSEVTGDRLKEAQHINRSLSALGDVIASLAHKNPHVPYRNSKLTQLLQDSLGGQAKTLMFVHISPEADAVGETISTLKFAERVATVELGAARVNNDTSDVKELKEQIATLKAALARKEAESQQNNILKTPGGSEKHKAKTGEVEIHNNNIMTKKSESCEVEEITVNSPPWPPVASPGQAYREDDRSFGSSEWVDKVMVNNRQDEMRRVESLWGGATTENGIGILPEDFYRRDLASDTSRIFSEHSYNIFMGNNNSTDDLDAATSDSSEPDLLWQFNQSTKIPTRSNIESKLKKPVSKPIRSPQSRNNSNNTVSRPLASQKVGNGPRGMKQFGPADMKRKATNARH

SEQ ID NO: 96636 - DNA, 1877 bp, Arabidopsis thaliana
  misc_feature (1)..(1877): Ceres Seq. ID no. 12734214
  misc_feature: MA Experiment ID: 20000179 Result: Down-regulated in Transcription
  misc_feature: MA Experiment 20000179 PARAMETER Experiment Name: At_Germinating_Seeds_P Parameter: Age (hr) Value: 6 vs. 0
  misc_feature: MA Experiment 20000179 PARAMETER Experiment Name: At_Germinating_Seeds_P Parameter: Tissue Value: Germinating Seeds
  misc_feature: MA Experiment ID: 20000180 Result: Down-regulated in Transcription
  misc_feature: MA Experiment 20000180 PARAMETER Experiment Name: At_Germinating_Seeds_P Parameter: Age (hr) Value: 24 vs. 0
  misc_feature: MA Experiment 20000180 PARAMETER Experiment Name: At_Germinating_Seeds_P Parameter: Tissue Value: Germinating Seeds
  misc_feature: MA Experiment ID: 20000184 Result: Up-regulated in Transcription
  misc_feature: MA Experiment 20000184 PARAMETER Experiment Name: At_Shoots__P Parameter: Age (day) Value: 7
  misc_feature: MA Experiment 20000184 PARAMETER Experiment Name: At_Shoots__P Parameter: Tissue Value: Shoots vs. Whole Plant
  misc_feature: MA Experiment ID: 20000185 Result: Up-regulated in Transcription
  misc_feature: MA Experiment 20000185 PARAMETER Experiment Name: At_Roots__P Parameter: Age (day) Value: 7 vs. 21
  misc_feature: MA Experiment 20000185 PARAMETER Experiment Name: At_Roots__P Parameter: Organism Value: A. thaliana
  misc_feature: MA Experiment 20000185 PARAMETER Experiment Name: At_Roots__P Parameter: Tissue Value: Roots vs. Whole Plant
  misc_feature: MA Experiment ID: 20000437 Result: Down-regulated in Transcription
  misc_feature: MA Experiment 20000437 PARAMETER Experiment Name: At_Drought_P Parameter: Age (day) Value: 8
  misc_feature: MA Experiment 20000437 PARAMETER Experiment Name: At_Drought_P Parameter: Organism Value: A. thaliana
  misc_feature: MA Experiment 20000437 PARAMETER Experiment Name: At_Drought_P Parameter: Plant Line Value: WS
  misc_feature: MA Experiment 20000437 PARAMETER Experiment Name: At_Drought_P Parameter: Timepoint (hr) Value: 24
  misc_feature: MA Experiment 20000437 PARAMETER Experiment Name: At_Drought_P Parameter: Tissue Value: Whole Plant
  misc_feature: MA Experiment 20000437 PARAMETER Experiment Name: At_Drought_P Parameter: Treatment Value: Drought vs. No Drought
  misc_feature: MA Experiment ID: 20000439 Result: Up-regulated in Transcription
  misc_feature: MA Experiment 20000439 PARAMETER Experiment Name: At_Roots__P Parameter: Age (day) Value: 14 vs. 21
  misc_feature: MA Experiment 20000439 PARAMETER Experiment Name: At_Roots__P Parameter: Organism Value: A. thaliana
  misc_feature: MA Experiment 20000439 PARAMETER Experiment Name: At_Roots__P Parameter: Tissue Value: Roots vs. Whole Plant
  misc_feature: MA Experiment ID: 20000527 Result: Down-regulated in Transcription
  misc_feature: MA Experiment 20000527 PARAMETER Experiment Name: At_10percent_PEG_P Parameter: Age (day) Value: 20
  misc_feature: MA Experiment 20000527 PARAMETER Experiment Name: At_10percent_PEG_P Parameter: Organism Value: A. thaliana
  misc_feature: MA Experiment 20000527 PARAMETER Experiment Name: At_10percent_PEG_P Parameter: Plant Line Value: WS
  misc_feature: MA Experiment 20000527 PARAMETER Experiment Name: At_10percent_PEG_P Parameter: Timepoint (day) Value: 20
  misc_feature: MA Experiment 20000527 PARAMETER Experiment Name: At_10percent_PEG_P Parameter: Tissue Value: Whole Plant
  misc_feature: MA Experiment 20000527 PARAMETER Experiment Name: At_10percent_PEG_P Parameter: Treatment Value: 10percent PEG vs. No Treatment
cgatcattccacttccttcttcctctctctcaacattttcccctgaaaataaggaaactaaagattcttcctctctctttctacactcttctgacaatactaaaacactttatcagatcagatcccacataaactttctaggagaagaagaatggcaagggaacaattacaagtgttgaatgcacttgacgtggccaagacgcaatggtaccatttcacggcgatcataatcgccggaatgggattcttcactgatgcttacgatctcttttgcatctctctcgtaacgaagctcctcggtcgtatttattaccacgtggaaggcgcacaaaagcctgggactctccctcccaacgtcgcagccgccgtcaatggcgttgccttctgtgggactctcgccggtcagctctttttcgggtggcttggtgataagctcgggaggaagaaagtttacggtatgacgttgatggtcatggtcctttgttcaatagcctctggtctctctttcggacatgagccaaaagctgtgatggccacgctctgtttttttcggttttggcttggatttggcatcggtggtgactaccctttatccgcaaccatcatgtctgaatatgcgaacaagaagactcgcggagcctttgtctctgcggtttttgctatgcaagggttcggaatcatggctggtggtattttcgctattataatttcctctgcttttgaagctaagtttccatccccggcctatgcggatgatgccttgggatccacgattcctcaagctgatttggtatggcggataatcctgatggctggtgctatccctgcggctatgacgtattactcaaggtcgaagatgcctgagaccgcaaggtacacggctttggttgctaaggacgcaaagcaggcagcttcggacatgtctaaggttctgcaagtggagatagagccagaacaacagaaattggaagagatctcaaaggagaagtccaaggcctttggattgttctcaaaggaattcatgagtcgccatgggcttcatttgctaggcactacatcgacatggttccttctcgacattgctttctacagtcaaaaccttttccaaaaggatattttcagcgcgatcggatggattcctcccgcgcaaagcatgaacgcaattcaagaggttttcaagattgcccgtgcgcaaacgctaatcgccttgtgtagcacggtacctggttactggttcacagttgcgttcatcgacgtcattggaagatttgcgattcagatgatgggtttctttttcatgacggtctttatgtttgctctggctattccttacaaccactggactcacaaggagaaccgaatcggatttgttatcatgtactcgttaacattctttttcgccaactttggacccaatgctacaaccttcgttgtgccggccgaaatcttcccagccaggttcagatcaacctgccacggtatctctgcagcatcaggaaaattaggagcaatggttggtgcgttcgggttcttgtacttggctcagaacccagacaaggacaagaccgacgcaggataccctccagggattggggtcaggaactcgcttattgtgttgggtgtagttaacttcttaggtatcctcttcactttcttggtacctgaatctaaaggtaagtcactcgaggaaatgtccggtgaaaatgaagacaatgagaatagcaacaatgatagtagaacggtcccaatagtttaggtgatataatacgccttttgtaataattttcgttttttctttctccttgtctctagcaactcaagttgttctttgtgtaatccattgatacctaattaatgctagagaaatcaaaattttc

SEQ ID NO: 96637 - protein, 534 aa, Arabidopsis thaliana
  peptide (1)..(534): Ceres Seq. ID no. 12734215
  misc_feature (24)..(518): Pfam Name: Sugar (and other) transporter Pfam Description: Sugar (and other) transporter
  misc_feature (1)..(534): Homolog of NCBI NO: 15224985 NR Description: phosphate transporter (AtPT2); protein id: [Arabidopsis thaliana] >gi|25309090|pir||C84811 phosphate
  misc_feature (1)..(528): Homolog of NCBI NO: 15232566 NR Description: phosphate transport protein; protein id:
  misc_feature (1)..(534): Homolog of NCBI NO: 7446756 NR Description: probable inorganic phosphate transport protein - periwinkle >gi|2208908|dbj|BAA20522.1| phosphate transporter
  misc_feature (1)..(534): Homolog of NCBI NO: 13506627 NR Description: phosphate transporter 1 [Lupinus albus]
  misc_feature (1)..(533): Homolog of NCBI NO: 8248034 NR Description: inorganic phosphate transporter [Nicotiana
  misc_feature (1)..(533): Homolog of NCBI NO: 12641853 NR Description: phosphate transporter [Nicotiana tabacum]
  misc_feature (1)..(534): Homolog of NCBI NO: 13676622 NR Description: phosphate transporter 1 [Lupinus albus]
  misc_feature (1)..(533): Homolog of NCBI NO: 6177892 NR Description: Phospate transpoter [Nicotiana tabacum]
  misc_feature (1)..(533): Homolog of NCBI NO: 7446753 NR Description: probable inorganic phosphate transport protein - >gi|2570523|gb|AAB82146.1| inorganic phosphate transporter
  misc_feature (1)..(529): Homolog of NCBI NO: 5053118 NR Description: inorganic phosphate transporter [Solanum
MAREQLQVLNALDVAKTQWYHFTAIIIAGMGFFTDAYDLFCISLVTKLLGRIYYHVEGAQKPGTLPPNVAAAVNGVAFCGTLAGQLFFGWLGDKLGRKKVYGMTLMVMVLCSIASGLSFGHEPKAVMATLCFFRFWLGFGIGGDYPLSATIMSEYANKKTRGAFVSAVFAMQGFGIMAGGIFAIIISSAFEAKFPSPAYADDALGSTIPQADLVWRIILMAGAIPAAMTYYSRSKMPETARYTALVAKDAKQAASDMSKVLQVEIEPEQQKLEEISKEKSKAFGLFSKEFMSRHGLHLLGTTSTWFLLDIAFYSQNLFQKDIFSAIGWIPPAQSMNAIQEVFKIARAQTLIALCSTVPGYWFTVAFIDVIGRFAIQMMGFFFMTVFMFALAIPYNHWTHKENRIGFVIMYSLTFFFANFGPNATTFVVPAEIFPARFRSTCHGISAASGKLGAMVGAFGFLYLAQNPDKDKTDAGYPPGIGVRNSLIVLGVVNFLGILFTFLVPESKGKSLEEMSGENEDNENSNNDSRTVPIV

SEQ ID NO: 96638 - protein, 505 aa, Arabidopsis thaliana
  peptide (1)..(505): Ceres Seq. ID no. 12734216
  misc_feature (1)..(489): Pfam Name: Sugar (and other) transporter Pfam Description: Sugar (and other) transporter
  misc_feature (1)..(505): Homolog of NCBI NO: 15224985 NR Description: phosphate transporter (AtPT2); protein id: [Arabidopsis thaliana] >gi|25309090|pir||C84811 phosphate
  misc_feature (1)..(499): Homolog of NCBI NO: 15232566 NR Description: phosphate transport protein; protein id:
  misc_feature (1)..(505): Homolog of NCBI NO: 7446756 NR Description: probable inorganic phosphate transport protein - periwinkle >gi|2208908|dbj|BAA20522.1| phosphate transporter
  misc_feature (1)..(505): Homolog of NCBI NO: 13506627 NR Description: phosphate transporter 1 [Lupinus albus]
  misc_feature (1)..(504): Homolog of NCBI NO: 8248034 NR Description: inorganic phosphate transporter [Nicotiana
  misc_feature (1)..(504): Homolog of NCBI NO: 12641853 NR Description: phosphate transporter [Nicotiana tabacum]
  misc_feature (1)..(505): Homolog of NCBI NO: 13676622 NR Description: phosphate transporter 1 [Lupinus albus]
  misc_feature (1)..(504): Homolog of NCBI NO: 6177892 NR Description: Phospate transpoter [Nicotiana tabacum]
  misc_feature (1)..(504): Homolog of NCBI NO: 7446753 NR Description: probable inorganic phosphate transport protein - >gi|2570523|gb|AAB82146.1| inorganic phosphate transporter
  misc_feature (1)..(500): Homolog of NCBI NO: 5053118 NR Description: inorganic phosphate transporter [Solanum
MGFFTDAYDLFCISLVTKLLGRIYYHVEGAQKPGTLPPNVAAAVNGVAFCGTLAGQLFFGWLGDKLGRKKVYGMTLMVMVLCSIASGLSFGHEPKAVMATLCFFRFWLGFGIGGDYPLSATIMSEYANKKTRGAFVSAVFAMQGFGIMAGGIFAIIISSAFEAKFPSPAYADDALGSTIPQADLVWRIILMAGAIPAAMTYYSRSKMPETARYTALVAKDAKQAASDMSKVLQVEIEPEQQKLEEISKEKSKAFGLFSKEFMSRHGLHLLGTTSTWFLLDIAFYSQNLFQKDIFSAIGWIPPAQSMNAIQEVFKIARAQTLIALCSTVPGYWFTVAFIDVIGRFAIQMMGFFFMTVFMFALAIPYNHWTHKENRIGFVIMYSLTFFFANFGPNATTFVVPAEIFPARFRSTCHGISAASGKLGAMVGAFGFLYLAQNPDKDKTDAGYPPGIGVRNSLIVLGVVNFLGILFTFLVPESKGKSLEEMSGENEDNENSNNDSRTVPIV

SEQ ID NO: 96639 - protein, 432 aa, Arabidopsis thaliana
  peptide (1)..(432): Ceres Seq. ID no. 12734217
  misc_feature (1)..(416): Pfam Name: Sugar (and other) transporter Pfam Description: Sugar (and other) transporter
  misc_feature (1)..(432): Homolog of NCBI NO: 15224985 NR Description: phosphate transporter (AtPT2); protein id: [Arabidopsis thaliana] >gi|25309090|pir||C84811 phosphate
  misc_feature (1)..(426): Homolog of NCBI NO: 15232566 NR Description: phosphate transport protein; protein id:
  misc_feature (1)..(432): Homolog of NCBI NO: 7446756 NR Description: probable inorganic phosphate transport protein - periwinkle >gi|2208908|dbj|BAA20522.1| phosphate transporter
  misc_feature (1)..(432): Homolog of NCBI NO: 13506627 NR Description: phosphate transporter 1 [Lupinus albus]
  misc_feature (1)..(431): Homolog of NCBI NO: 8248034 NR Description: inorganic phosphate transporter [Nicotiana
  misc_feature (1)..(431): Homolog of NCBI NO: 12641853 NR Description: phosphate transporter [Nicotiana tabacum]
  misc_feature (1)..(432): Homolog of NCBI NO: 13676622 NR Description: phosphate transporter 1 [Lupinus albus]
  misc_feature (1)..(431): Homolog of NCBI NO: 6177892 NR Description: Phospate transpoter [Nicotiana tabacum]
  misc_feature (1)..(431): Homolog of NCBI NO: 7446753 NR Description: probable inorganic phosphate transport protein - >gi|2570523|gb|AAB82146.1| inorganic phosphate transporter
  misc_feature (1)..(427): Homolog of NCBI NO: 5053118 NR Description: inorganic phosphate transporter [Solanum
MTLMVMVLCSIASGLSFGHEPKAVMATLCFFRFWLGFGIGGDYPLSATIMSEYANKKTRGAFVSAVFAMQGFGIMAGGIFAIIISSAFEAKFPSPAYADDALGSTIPQADLVWRIILMAGAIPAAMTYYSRSKMPETARYTALVAKDAKQAASDMSKVLQVEIEPEQQKLEEISKEKSKAFGLFSKEFMSRHGLHLLGTTSTWFLLDIAFYSQNLFQKDIFSAIGWIPPAQSMNAIQEVFKIARAQTLIALCSTVPGYWFTVAFIDVIGRFAIQMMGFFFMTVFMFALAIPYNHWTHKENRIGFVIMYSLTFFFANFGPNATTFVVPAEIFPARFRSTCHGISAASGKLGAMVGAFGFLYLAQNPDKDKTDAGYPPGIGVRNSLIVLGVVNFLGILFTFLVPESKGKSLEEMSGENEDNENSNNDSRTVPIV

SEQ ID NO: 96640 - DNA, 1440 bp, Arabidopsis thaliana
  misc_feature (1)..(1440): Ceres Seq. ID no. 12734225
  misc_feature: MA Experiment ID: 20000315 Result: Down-regulated in Transcription
  misc_feature: MA Experiment 20000315 PARAMETER Experiment Name: At_14day_Shoots-Roots_Sub_P Parameter: Age (day) Value: 14
  misc_feature: MA Experiment 20000315 PARAMETER Experiment Name: At_14day_Shoots-Roots_Sub_P Parameter: Organism Value: A. thaliana
  misc_feature: MA Experiment 20000315 PARAMETER Experiment Name: At_14day_Shoots-Roots_Sub_P Parameter: Plant Line Value: WS
  misc_feature: MA Experiment 20000315 PARAMETER Experiment Name: At_14day_Shoots-Roots_Sub_P Parameter: Tissue Value: Shoots vs. Whole Plant
  misc_feature: MA Experiment ID: 20000327 Result: Down-regulated in Transcription
  misc_feature: MA Experiment 20000327 PARAMETER Experiment Name: At_42deg_Heat_Sub_P Parameter: Age (day) Value: 14
  misc_feature: MA Experiment 20000327 PARAMETER Experiment Name: At_42deg_Heat_Sub_P Parameter: Organism Value: A. thaliana
  misc_feature: MA Experiment 20000327 PARAMETER Experiment Name: At_42deg_Heat_Sub_P Parameter: Plant Line Value: WS
  misc_feature: MA Experiment 20000327 PARAMETER Experiment Name: At_42deg_Heat_Sub_P Parameter: Temperature (deg C) Value: 42 vs. 22
  misc_feature: MA Experiment 20000327 PARAMETER Experiment Name: At_42deg_Heat_Sub_P Parameter: Timepoint (hr) Value: 1
  misc_feature: MA Experiment 20000327 PARAMETER Experiment Name: At_42deg_Heat_Sub_P Parameter: Tissue Value: Aerial
  misc_feature: MA Experiment ID: 20000328 Result: Down-regulated in Transcription
  misc_feature: MA Experiment 20000328 PARAMETER Experiment Name: At_42deg_Heat_Sub_P Parameter: Age (day) Value: 14
  misc_feature: MA Experiment 20000328 PARAMETER Experiment Name: At_42deg_Heat_Sub_P Parameter: Organism Value: A. thaliana
  misc_feature: MA Experiment 20000328 PARAMETER Experiment Name: At_42deg_Heat_Sub_P Parameter: Plant Line Value: WS
  misc_feature: MA Experiment 20000328 PARAMETER Experiment Name: At_42deg_Heat_Sub_P Parameter: Temperature (deg C) Value: 42 vs. 22
  misc_feature: MA Experiment 20000328 PARAMETER Experiment Name: At_42deg_Heat_Sub_P Parameter: Timepoint (hr) Value: 6
  misc_feature: MA Experiment 20000328 PARAMETER Experiment Name: At_42deg_Heat_Sub_P Parameter: Tissue Value: Aerial
  misc_feature: MA Experiment ID: 20000355 Result: Up-regulated in Transcription
  misc_feature: MA Experiment 20000355 PARAMETER Experiment Name: At_Siliques_Sub_P Parameter: Age (day) Value: 21
  misc_feature: MA Experiment 20000355 PARAMETER Experiment Name: At_Siliques_Sub_P Parameter: Organism Value: A. thaliana
  misc_feature: MA Experiment 20000355 PARAMETER Experiment Name: At_Siliques_Sub_P Parameter: Plant Line Value: WS
  misc_feature: MA Experiment 20000355 PARAMETER Experiment Name: At_Siliques_Sub_P Parameter: Tissue Value: Less Than 5mm Siliques vs. Whole Plant
  misc_feature: MA Experiment ID: 20000440 Result: Up-regulated in Transcription
  misc_feature: MA Experiment 20000440 PARAMETER Experiment Name: At_Closed-Flower__Sub_P Parameter: Tissue Value: Closed Flower vs. Whole Plant
atggcgaaagaggagcaagaaacagcggcaatagagccacttagcccggtttcacagttgtttgtttcgccgagtctctactgcttcattattttcactttagggttccaaactagatgcaacccatccaccattgttgaaggtgtcaagaacacatggatcaagctccctcgcttctctagcaaagtggagataaagaaaaatggaaaagcgtcttgggttcctgttagtgttcgagtagaagatcatgttgttgttccagatcttgattattccaacattgaaaatcctgatcaatttatagaagactatacttcgaaattagctaatactccgatggacatgtcccgacctttatgggaacttcatttacttaatataaagacatcaaatgcagaatctttagctataggaaaatttcatcattctcttggcgatgggatgtctcttatatctcttctattagctagttcacggaaaacatcagatcctgacgctttgcctactaccgcggctacaagaaagcatgccagttccaataaaaagagttggtggttggttggaagattttggtttatgataagaatcattttcactactgttgttgaattgtttaagtatttgcttacactatgttttatgcgggacactaaaactcccctaatgggtaaaacgggtgatgcaatacgatctagaaaggttatacatcggatagtaagctttgatgatgtcaagttggtgaagaacaacatggatatgaaagtgaatgatgttcttcttggaatgacacaggcaggtctctcaagatatttgagcaggaaatatgtagatgaagatatggtggtcgagaagaaaaaaaacttggagaaaatccgtcttcgtggtacagtattcgtaaatttaagagcagacacaaaactcgaggatttggcgaatatgatggcaaaaggttcaaagtgtagatggggaaacttcgtaggtgttattatatttcctttatgggtgagatccgaagatgatccgttggaatacgttcgacgagccaaatctactatggatatcaaaaaactgtccatagaatcacttatttgctatggactcatcaaacttaccagaaaaatactcgggggaaaggtagtagaaactcttgttaggagactatttgatcatacgacattgacattttctaatgtgatgggtccagacgaagatataagtttttttgaccatccaatgtcttacgtagcagcaagcgcattaggtggaccacaagctcttattatccattacgtaacctatgtaaacaagattgtcatcaatctagcagtagacacatcagtgattcgagaccctcatctactatgtgatgatttggtagaatcgctcgatatcatcaaacttgctgccatggagaaaggagttcataaaatggaggtttga

SEQ ID NO: 96641 - protein, 479 aa, Arabidopsis thaliana
  peptide (1)..(479): Ceres Seq. ID no. 12734226
  misc_feature (12)..(294): Pfam Name: Condensation domain Pfam Description: Condensation domain
  misc_feature (1)..(479): Homolog of NCBI NO: 30687731 NR Description: hypothetical protein [Arabidopsis thaliana]
  misc_feature (3)..(479): Homolog of NCBI NO: 9758716 NR Description: emb|CAB66398.1~gene_id:MNJ8.9~strong similarity
  misc_feature (3)..(239): Homolog of NCBI NO: 18421632 NR Description: putative protein; protein id: At5g37300.1, by cDNA: gi_15810554 [Arabidopsis thaliana]
  misc_feature (3)..(479): Homolog of NCBI NO: 30696326 NR Description: expressed protein [Arabidopsis thaliana]
  misc_feature (3)..(479): Homolog of NCBI NO: 9759186 NR Description: emb|CAB66399.1~gene_id:K19E1.19~strong similarity
  misc_feature (64)..(262): Homolog of NCBI NO: 29649114 NR Description: hypothetical protein [Arabidopsis thaliana]
  misc_feature (12)..(475): Homolog of NCBI NO: 34909900 NR Description: P0665A11.10 [Oryza sativa (japonica
  misc_feature (12)..(252): Homolog of NCBI NO: 34909902 NR Description: P0665A11.11 [Oryza sativa (japonica
  misc_feature (289)..(475): Homolog of NCBI NO: 34909902 NR Description: P0665A11.11 [Oryza sativa (japonica
  misc_feature (73)..(478): Homolog of NCBI NO: 34911182 NR Description: P0019E03.6 [Oryza sativa (japonica
MAKEEQETAAIEPLSPVSQLFVSPSLYCFIIFTLGFQTRCNPSTIVEGVKNTWIKLPRFSSKVEIKKNGKASWVPVSVRVEDHVVVPDLDYSNIENPDQFIEDYTSKLANTPMDMSRPLWELHLLNIKTSNAESLAIGKFHHSLGDGMSLISLLLASSRKTSDPDALPTTAATRKHASSNKKSWWLVGRFWFMIRIIFTTVVELFKYLLTLCFMRDTKTPLMGKTGDAIRSRKVIHRIVSFDDVKLVKNNMDMKVNDVLLGMTQAGLSRYLSRKYVDEDMVVEKKKNLEKIRLRGTVFVNLRADTKLEDLANMMAKGSKCRWGNFVGVIIFPLWVRSEDDPLEYVRRAKSTMDIKKLSIESLICYGLIKLTRKILGGKVVETLVRRLFDHTTLTFSNVMGPDEDISFFDHPMSYVAASALGGPQALIIHYVTYVNKIVINLAVDTSVIRDPHLLCDDLVESLDIIKLAAMEKGVHKMEV

SEQ ID NO: 96642 - protein, 367 aa, Arabidopsis thaliana
  peptide (1)..(367): Ceres Seq. ID no. 12734227
  misc_feature (1)..(182): Pfam Name: Condensation domain Pfam Description: Condensation domain
  misc_feature (1)..(367): Homolog of NCBI NO: 30687731 NR Description: hypothetical protein [Arabidopsis thaliana]
  misc_feature (1)..(367): Homolog of NCBI NO: 9758716 NR Description: emb|CAB66398.1~gene_id:MNJ8.9~strong similarity
  misc_feature (1)..(127): Homolog of NCBI NO: 18421632 NR Description: putative protein; protein id: At5g37300.1, by cDNA: gi_15810554 [Arabidopsis thaliana]
  misc_feature (1)..(367): Homolog of NCBI NO: 30696326 NR Description: expressed protein [Arabidopsis thaliana]
  misc_feature (1)..(367): Homolog of NCBI NO: 9759186 NR Description: emb|CAB66399.1~gene_id:K19E1.19~strong similarity
  misc_feature (1)..(150): Homolog of NCBI NO: 29649114 NR Description: hypothetical protein [Arabidopsis thaliana]
  misc_feature (1)..(363): Homolog of NCBI NO: 34909900 NR Description: P0665A11.10 [Oryza sativa (japonica
  misc_feature (1)..(140): Homolog of NCBI NO: 34909902 NR Description: P0665A11.11 [Oryza sativa (japonica
  misc_feature (177)..(363): Homolog of NCBI NO: 34909902 NR Description: P0665A11.11 [Oryza sativa (japonica
  misc_feature (1)..(366): Homolog of NCBI NO: 34911182 NR Description: P0019E03.6 [Oryza sativa (japonica
MDMSRPLWELHLLNIKTSNAESLAIGKFHHSLGDGMSLISLLLASSRKTSDPDALPTTAATRKHASSNKKSWWLVGRFWFMIRIIFTTVVELFKYLLTLCFMRDTKTPLMGKTGDAIRSRKVIHRIVSFDDVKLVKNNMDMKVNDVLLGMTQAGLSRYLSRKYVDEDMVVEKKKNLEKIRLRGTVFVNLRADTKLEDLANMMAKGSKCRWGNFVGVIIFPLWVRSEDDPLEYVRRAKSTMDIKKLSIESLICYGLIKLTRKILGGKVVETLVRRLFDHTTLTFSNVMGPDEDISFFDHPMSYVAASALGGPQALIIHYVTYVNKIVINLAVDTSVIRDPHLLCDDLVESLDIIKLAAMEKGVHKMEV

SEQ ID NO: 96643 - protein, 365 aa, Arabidopsis thaliana
  peptide (1)..(365): Ceres Seq. ID no. 12734228
  misc_feature (1)..(180): Pfam Name: Condensation domain Pfam Description: Condensation domain
  misc_feature (1)..(365): Homolog of NCBI NO: 30687731 NR Description: hypothetical protein [Arabidopsis thaliana]
  misc_feature (1)..(365): Homolog of NCBI NO: 9758716 NR Description: emb|CAB66398.1~gene_id:MNJ8.9~strong similarity
  misc_feature (1)..(125): Homolog of NCBI NO: 18421632 NR Description: putative protein; protein id: At5g37300.1, by cDNA: gi_15810554 [Arabidopsis thaliana]
  misc_feature (1)..(365): Homolog of NCBI NO: 30696326 NR Description: expressed protein [Arabidopsis thaliana]
  misc_feature (1)..(365): Homolog of NCBI NO: 9759186 NR Description: emb|CAB66399.1~gene_id:K19E1.19~strong similarity
  misc_feature (1)..(148): Homolog of NCBI NO: 29649114 NR Description: hypothetical protein [Arabidopsis thaliana]
  misc_feature (1)..(361): Homolog of NCBI NO: 34909900 NR Description: P0665A11.10 [Oryza sativa (japonica
  misc_feature (1)..(138): Homolog of NCBI NO: 34909902 NR Description: P0665A11.11 [Oryza sativa (japonica
  misc_feature (175)..(361): Homolog of NCBI NO: 34909902 NR Description: P0665A11.11 [Oryza sativa (japonica
  misc_feature (1)..(364): Homolog of NCBI NO: 34911182 NR Description: P0019E03.6 [Oryza sativa (japonica
MSRPLWELHLLNIKTSNAESLAIGKFHHSLGDGMSLISLLLASSRKTSDPDALPTTAATRKHASSNKKSWWLVGRFWFMIRIIFTTVVELFKYLLTLCFMRDTKTPLMGKTGDAIRSRKVIHRIVSFDDVKLVKNNMDMKVNDVLLGMTQAGLSRYLSRKYVDEDMVVEKKKNLEKIRLRGTVFVNLRADTKLEDLANMMAKGSKCRWGNFVGVIIFPLWVRSEDDPLEYVRRAKSTMDIKKLSIESLICYGLIKLTRKILGGKVVETLVRRLFDHTTLTFSNVMGPDEDISFFDHPMSYVAASALGGPQALIIHYVTYVNKIVINLAVDTSVIRDPHLLCDDLVESLDIIKLAAMEKGVHKMEV

SEQ ID NO: 96644 - DNA, 894 bp, Arabidopsis thaliana
  misc_feature (1)..(894): Ceres Seq. ID no. 12734229
  misc_feature: MA Experiment ID: 20000166 Result: Up-regulated in Transcription
  misc_feature: MA Experiment 20000166 PARAMETER Experiment Name: At_100uM_ABA_P Parameter: Age (day) Value: 14
  misc_feature: MA Experiment 20000166 PARAMETER Experiment Name: At_100uM_ABA_P Parameter: Organism Value: A. thaliana
  misc_feature: MA Experiment 20000166 PARAMETER Experiment Name: At_100uM_ABA_P Parameter: Plant Line Value: WS
  misc_feature: MA Experiment 20000166 PARAMETER Experiment Name: At_100uM_ABA_P Parameter: Timepoint (hr) Value: 1
  misc_feature: MA Experiment 20000166 PARAMETER Experiment Name: At_100uM_ABA_P Parameter: Tissue Value: Aerial
  misc_feature: MA Experiment 20000166 PARAMETER Experiment Name: At_100uM_ABA_P Parameter: Treatment Value: 100uM ABA vs. No Treatment
  misc_feature: MA Experiment ID: 20000169 Result: Up-regulated in Transcription
  misc_feature: MA Experiment 20000169 PARAMETER Experiment Name: At_100uM_ABA_P Parameter: Age (day) Value: 14
  misc_feature: MA Experiment 20000169 PARAMETER Experiment Name: At_100uM_ABA_P Parameter: Organism Value: A. thaliana
  misc_feature: MA Experiment 20000169 PARAMETER Experiment Name: At_100uM_ABA_P Parameter: Plant Line Value: WS
  misc_feature: MA Experiment 20000169 PARAMETER Experiment Name: At_100uM_ABA_P Parameter: Timepoint (hr) Value: 6
  misc_feature: MA Experiment 20000169 PARAMETER Experiment Name: At_100uM_ABA_P Parameter: Tissue Value: Aerial
  misc_feature: MA Experiment 20000169 PARAMETER Experiment Name: At_100uM_ABA_P Parameter: Treatment Value: 100uM ABA vs. No Treatment
  misc_feature: MA Experiment ID: 20000171 Result: Down-regulated in Transcription
  misc_feature: MA Experiment 20000171 PARAMETER Experiment Name: At_42deg_Heat_P Parameter: Age (day) Value: 14
  misc_feature: MA Experiment 20000171 PARAMETER Experiment Name: At_42deg_Heat_P Parameter: Organism Value: A. thaliana
  misc_feature: MA Experiment 20000171 PARAMETER Experiment Name: At_42deg_Heat_P Parameter: Plant Line Value: WS
  misc_feature: MA Experiment 20000171 PARAMETER Experiment Name: At_42deg_Heat_P Parameter: Temperature (deg C) Value: 42 vs. 22
  misc_feature: MA Experiment 20000171 PARAMETER Experiment Name: At_42deg_Heat_P Parameter: Timepoint (hr) Value: 1
  misc_feature: MA Experiment 20000171 PARAMETER Experiment Name: At_42deg_Heat_P Parameter: Tissue Value: Aerial
  misc_feature: MA Experiment ID: 20000182 Result: Up-regulated in Transcription
  misc_feature: MA Experiment 20000182 PARAMETER Experiment Name: At_2mM_SA_P Parameter: Age (day) Value: 14
  misc_feature: MA Experiment 20000182 PARAMETER Experiment Name: At_2mM_SA_P Parameter: Organism Value: A. thaliana
  misc_feature: MA Experiment 20000182 PARAMETER Experiment Name: At_2mM_SA_P Parameter: Plant Line Value: WS
  misc_feature: MA Experiment 20000182 PARAMETER Experiment Name: At_2mM_SA_P Parameter: Timepoint (hr) Value: 6
  misc_feature: MA Experiment 20000182 PARAMETER Experiment Name: At_2mM_SA_P Parameter: Tissue Value: Aerial
  misc_feature: MA Experiment 20000182 PARAMETER Experiment Name: At_2mM_SA_P Parameter: Treatment Value: 2mM SA vs. No Treatment
  misc_feature: MA Experiment ID: 20000211 Result: Up-regulated in Transcription
  misc_feature: MA Experiment 20000211 PARAMETER Experiment Name: At_0.001percent_MeJA__P Parameter: Age (day) Value: 14
  misc_feature: MA Experiment 20000211 PARAMETER Experiment Name: At_0.001percent_MeJA__P Parameter: Organism Value: A. thaliana
  misc_feature: MA Experiment 20000211 PARAMETER Experiment Name: At_0.001percent_MeJA__P Parameter: Plant Line Value: WS
  misc_feature: MA Experiment 20000211 PARAMETER Experiment Name: At_0.001percent_MeJA__P Parameter: Timepoint (hr) Value: 1
  misc_feature: MA Experiment 20000211 PARAMETER Experiment Name: At_0.001percent_MeJA__P Parameter: Tissue Value: Aerial
  misc_feature: MA Experiment 20000211 PARAMETER Experiment Name: At_0.001percent_MeJA__P Parameter: Treatment Value: 0.001percent MeJA vs. No Treatment
  misc_feature: MA Experiment ID: 20000308 Result: Up-regulated in Transcription
  misc_feature: MA Experiment 20000308 PARAMETER Experiment Name: At_100mM_NaCl__P Parameter: Age (day) Value: 17
  misc_feature: MA Experiment 20000308 PARAMETER Experiment Name: At_100mM_NaCl__P Parameter: Organism Value: A. thaliana
  misc_feature: MA Experiment 20000308 PARAMETER Experiment Name: At_100mM_NaCl__P Parameter: Plant Line Value: WS
  misc_feature: MA Experiment 20000308 PARAMETER Experiment Name: At_100mM_NaCl__P Parameter: Timepoint (hr) Value: 72
  misc_feature: MA Experiment 20000308 PARAMETER Experiment Name: At_100mM_NaCl__P Parameter: Tissue Value: Whole Plant
  misc_feature: MA Experiment 20000308 PARAMETER Experiment Name: At_100mM_NaCl__P Parameter: Treatment Value: 100mM NaCl vs. No Treatment
  misc_feature: MA Experiment ID: 20000453 Result: Up-regulated in Transcription
  misc_feature: MA Experiment 20000453 PARAMETER Experiment Name: At_100uM_ABA_P Parameter: Age (day) Value: 15
  misc_feature: MA Experiment 20000453 PARAMETER Experiment Name: At_100uM_ABA_P Parameter: Organism Value: A. thaliana
  misc_feature: MA Experiment 20000453 PARAMETER Experiment Name: At_100uM_ABA_P Parameter: Plant Line Value: WS
  misc_feature: MA Experiment 20000453 PARAMETER Experiment Name: At_100uM_ABA_P Parameter: Timepoint (hr) Value: 24
  misc_feature: MA Experiment 20000453 PARAMETER Experiment Name: At_100uM_ABA_P Parameter: Tissue Value: Aerial
  misc_feature: MA Experiment 20000453 PARAMETER Experiment Name: At_100uM_ABA_P Parameter: Treatment Value: 100uM ABA vs. No Treatment
  misc_feature: MA Experiment ID: 20000527 Result: Down-regulated in Transcription
  misc_feature: MA Experiment 20000527 PARAMETER Experiment Name: At_10percent_PEG_P Parameter: Age (day) Value: 20
  misc_feature: MA Experiment 20000527 PARAMETER Experiment Name: At_10percent_PEG_P Parameter: Organism Value: A. thaliana
  misc_feature: MA Experiment 20000527 PARAMETER Experiment Name: At_10percent_PEG_P Parameter: Plant Line Value: WS
  misc_feature: MA Experiment 20000527 PARAMETER Experiment Name: At_10percent_PEG_P Parameter: Timepoint (day) Value: 20
  misc_feature: MA Experiment 20000527 PARAMETER Experiment Name: At_10percent_PEG_P Parameter: Tissue Value: Whole Plant
  misc_feature: MA Experiment 20000527 PARAMETER Experiment Name: At_10percent_PEG_P Parameter: Treatment Value: 10percent PEG vs. No Treatment
  misc_feature: MA Experiment ID: 20000573 Result: Up-regulated in Transcription
  misc_feature: MA Experiment 20000573 PARAMETER Experiment Name: At_100uM_ABA_Mutants__P Parameter: Organism Value: A. thaliana
  misc_feature: MA Experiment 20000573 PARAMETER Experiment Name: At_100uM_ABA_Mutants__P Parameter: Plant Line Value: CS22 vs. Ler wt
  misc_feature: MA Experiment 20000573 PARAMETER Experiment Name: At_100uM_ABA_Mutants__P Parameter: Timepoint (hr) Value: N/A
  misc_feature: MA Experiment 20000573 PARAMETER Experiment Name: At_100uM_ABA_Mutants__P Parameter: Tissue Value: Whole Plant
  misc_feature: MA Experiment 20000573 PARAMETER Experiment Name: At_100uM_ABA_Mutants__P Parameter: Treatment Value: None
  misc_feature: MA Experiment ID: 20000574 Result: Up-regulated in Transcription
  misc_feature: MA Experiment 20000574 PARAMETER Experiment Name: At_100uM_ABA_Mutants__P Parameter: Organism Value: A. thaliana
  misc_feature: MA Experiment 20000574 PARAMETER Experiment Name: At_100uM_ABA_Mutants__P Parameter: Plant Line Value: CS23 vs. Ler wt
  misc_feature: MA Experiment 20000574 PARAMETER Experiment Name: At_100uM_ABA_Mutants__P Parameter: Timepoint (hr) Value: N/A
  misc_feature: MA Experiment 20000574 PARAMETER Experiment Name: At_100uM_ABA_Mutants__P Parameter: Tissue Value: Whole Plant
  misc_feature: MA Experiment 20000574 PARAMETER Experiment Name: At_100uM_ABA_Mutants__P Parameter: Treatment Value: None
  misc_feature: MA Experiment ID: 20000576 Result: Down-regulated in Transcription
  misc_feature: MA Experiment 20000576 PARAMETER Experiment Name: At_100uM_ABA_Mutants__P Parameter: Organism Value: A. thaliana
  misc_feature: MA Experiment 20000576 PARAMETER Experiment Name: At_100uM_ABA_Mutants__P Parameter: Plant Line Value: CS23
  misc_feature: MA Experiment 20000576 PARAMETER Experiment Name: At_100uM_ABA_Mutants__P Parameter: Timepoint (hr) Value: 6
  misc_feature: MA Experiment 20000576 PARAMETER Experiment Name: At_100uM_ABA_Mutants__P Parameter: Tissue Value: Whole Plant
  misc_feature: MA Experiment 20000576 PARAMETER Experiment Name: At_100uM_ABA_Mutants__P Parameter: Treatment Value: 1uM ABA vs. No Treatment
  misc_feature: MA Experiment ID: 20000709 Result: Up-regulated in Transcription
  misc_feature: MA Experiment 20000709 PARAMETER Experiment Name: At_15mM_NH4NO3_L-to-H_P Parameter: Age (hr) Value: 14
  misc_feature: MA Experiment 20000709 PARAMETER Experiment Name: At_15mM_NH4NO3_L-to-H_P Parameter: Organism Value: A. thaliana
  misc_feature: MA Experiment 20000709 PARAMETER Experiment Name: At_15mM_NH4NO3_L-to-H_P Parameter: Plant Line Value: WS
  misc_feature: MA Experiment 20000709 PARAMETER Experiment Name: At_15mM_NH4NO3_L-to-H_P Parameter: Timepoint (hr) Value: 4
  misc_feature: MA Experiment 20000709 PARAMETER Experiment Name: At_15mM_NH4NO3_L-to-H_P Parameter: Tissue Value: Aerial
  misc_feature: MA Experiment 20000709 PARAMETER Experiment Name: At_15mM_NH4NO3_L-to-H_P Parameter: Treatment Value: 15mM NH4NO3 vs. 30mM Mannitol
  misc_feature: MA Experiment ID: 20001248 Result: Down-regulated in Transcription
  misc_feature: MA Experiment 20001248 PARAMETER Experiment Name: At_Far-red-induction_P Parameter: Age (day) Value: 7
  misc_feature: MA Experiment 20001248 PARAMETER Experiment Name: At_Far-red-induction_P Parameter: Light Value: Far-red vs. White
  misc_feature: MA Experiment 20001248 PARAMETER Experiment Name: At_Far-red-induction_P Parameter: Organism Value: A. thaliana
  misc_feature: MA Experiment 20001248 PARAMETER Experiment Name: At_Far-red-induction_P Parameter: Plant Line Value: Columbia
  misc_feature: MA Experiment 20001248 PARAMETER Experiment Name: At_Far-red-induction_P Parameter: Timepoint (hr) Value: 4
  misc_feature: MA Experiment 20001248 PARAMETER Experiment Name: At_Far-red-induction_P Parameter: Tissue Value: Whole Plant
  misc_feature: MA Experiment ID: 20001450 Result: Down-regulated in Transcription
  misc_feature: MA Experiment 20001450 PARAMETER Experiment Name: At_Far-red-induction_P Parameter: Age (day) Value: 7
  misc_feature: MA Experiment 20001450 PARAMETER Experiment Name: At_Far-red-induction_P Parameter: Light Value: Far-red vs. White
  misc_feature: MA Experiment 20001450 PARAMETER Experiment Name: At_Far-red-induction_P Parameter: Organism Value: A. thaliana
  misc_feature: MA Experiment 20001450 PARAMETER Experiment Name: At_Far-red-induction_P Parameter: Plant Line Value: Columbia
  misc_feature: MA Experiment 20001450 PARAMETER Experiment Name: At_Far-red-induction_P Parameter: Timepoint (hr) Value: 8
  misc_feature: MA Experiment 20001450 PARAMETER Experiment Name: At_Far-red-induction_P Parameter: Tissue Value: Whole Plant
  misc_feature: MA Experiment ID: 20001451 Result: Down-regulated in Transcription
  misc_feature: MA Experiment 20001451 PARAMETER Experiment Name: At_Far-red-induction_P Parameter: Age (day) Value: 7
  misc_feature: MA Experiment 20001451 PARAMETER Experiment Name: At_Far-red-induction_P Parameter: Light Value: Far-red vs. White
  misc_feature: MA Experiment 20001451 PARAMETER Experiment Name: At_Far-red-induction_P Parameter: Organism Value: A. thaliana
  misc_feature: MA Experiment 20001451 PARAMETER Experiment Name: At_Far-red-induction_P Parameter: Plant Line Value: Columbia
  misc_feature: MA Experiment 20001451 PARAMETER Experiment Name: At_Far-red-induction_P Parameter: Timepoint (hr) Value: 24
  misc_feature: MA Experiment 20001451 PARAMETER Experiment Name: At_Far-red-induction_P Parameter: Tissue Value: Whole Plant
  misc_feature: MA Experiment ID: 20001558 Result: Down-regulated in Transcription
  misc_feature: MA Experiment 20001558 PARAMETER Experiment Name: At_Drought_Soil_Dry_P Parameter: Age (day) Value: 27
  misc_feature: MA Experiment 20001558 PARAMETER Experiment Name: At_Drought_Soil_Dry_P Parameter: Organism Value: A. thaliana
  misc_feature: MA Experiment 20001558 PARAMETER Experiment Name: At_Drought_Soil_Dry_P Parameter: Plant Line Value: WS
  misc_feature: MA Experiment 20001558 PARAMETER Experiment Name: At_Drought_Soil_Dry_P Parameter: Post Timepoint (hr) Value: 6
  misc_feature: MA Experiment 20001558 PARAMETER Experiment Name: At_Drought_Soil_Dry_P Parameter: Post-Treatment Value: Re-Water vs. No Drought
  misc_feature: MA Experiment 20001558 PARAMETER Experiment Name: At_Drought_Soil_Dry_P Parameter: Timepoint (day) Value: 13
  misc_feature: MA Experiment 20001558 PARAMETER Experiment Name: At_Drought_Soil_Dry_P Parameter: Treatment Value: Drought vs. No Drought
  misc_feature: MA Experiment ID: 20001904 Result: Up-regulated in Transcription
  misc_feature: MA Experiment 20001904 PARAMETER Experiment Name: At_Drought_Reproduction_P Parameter: Age (day) Value: 37
  misc_feature: MA Experiment 20001904 PARAMETER Experiment Name: At_Drought_Reproduction_P Parameter: Organism Value: A. thaliana
  misc_feature: MA Experiment 20001904 PARAMETER Experiment Name: At_Drought_Reproduction_P Parameter: Plant Line Value: WS
  misc_feature: MA Experiment 20001904 PARAMETER Experiment Name: At_Drought_Reproduction_P Parameter: Timepoint (day) Value: 7
  misc_feature: MA Experiment 20001904 PARAMETER Experiment Name: At_Drought_Reproduction_P Parameter: Tissue Value: Rosettes
  misc_feature: MA Experiment 20001904 PARAMETER Experiment Name: At_Drought_Reproduction_P Parameter: Treatment Value: Drought vs. No Drought
acatcactatcttcaaaaacaagtaacagaaaaatggcgcctccaaccgcagcaccagagccaaacactgtgccagagacttcaccgaccggccaccgtatgttttcccggatccgcctcgctacgccgaccgatgtccctttcattcacaagctaatccaccagatggcggtttttgagcgcctcacgcatctctttgtcgccaccgagtctggtcttgcctccacgctcttcaactcccgtccgttccaagccgtcaccgtcttcctcttggaaatctccccttccccatttcccaccactcatgacgcttcgtcccctgatttcaccccctttcttgagacgcataaggttgatctccctatcgaggatccggacagagaaaagttcttgccggataagctcaacgacgtggtggtggctggattcgttctgttcttcccgaactacccaagttttctagcgaaacagggtttctacatcgaggatatcttcatgagagaaccttacagacgaaaaggcttcggaaaactgctactgaccgctgtggcaaagcaagcagtgaagttgggtgtcggaagagtggagtggattgtgatcgattggaatgtgaatgctatcaacttctatgagcagatgggtgcgcaggtttttaaggaatggagactttgtaggctcactggcgatgcacttcaagctattgacaagctaaacatctagcagcatgatgatttgcatgagacccatcgagcgatcggtcctttaaagtttgtttctcacttgtttttaatttgttgaataaaacatctcaagtttaagataaagatgtatttgtgattatggttacaaaagtatcttctgtgttttcggatttgaataaaatggagatttctt

SEQ ID NO: 96645 - protein, 239 aa, Arabidopsis thaliana
  peptide (1)..(239): Ceres Seq. ID no. 12734230
  misc_feature (131)..(216): Pfam Name: Acetyltransferase (GNAT) family Pfam Description: Acetyltransferase (GNAT) family
  misc_feature (12)..(239): Homolog of NCBI NO: 18404927 NR Description: expressed protein; protein id: At2g39030.1, by cDNA: gi_15451161 [Arabidopsis thaliana]
  misc_feature (34)..(239): Homolog of NCBI NO: 15451162 NR Description: Unknown protein [Arabidopsis thaliana]
  misc_feature (14)..(239): Homolog of NCBI NO: 15225009 NR Description: unknown protein; protein id: At2g39020.1
  misc_feature (12)..(232): Homolog of NCBI NO: 19908257 NR Description: N-hydroxycinnamoyl-CoA:tyramine N-hydroxycinnamoyl
  misc_feature (33)..(232): Homolog of NCBI NO: 5852154 NR Description: tyramine hydroxycinnamoyltransferase [Nicotiana
  misc_feature (33)..(232): Homolog of NCBI NO: 17369608 NR Description: Tyramine N-feruloyltransferase 4/11
  misc_feature (33)..(232): Homolog of NCBI NO: 17380562 NR Description: Tyramine N-feruloyltransferase 10/30
  misc_feature (17)..(232): Homolog of NCBI NO: 24745596 NR Description: tyramine hydroxycinnamoyl transferase [Solanum
  misc_feature (17)..(236): Homolog of NCBI NO: 19908261 NR Description: N-hydroxycinnamoyl-CoA:tyramine N-hydroxycinnamoyl
  misc_feature (12)..(232): Homolog of NCBI NO: 19908259 NR Description: N-hydroxycinnamoyl-CoA:tyramine N-hydroxycinnamoyl
TSLSSKTSNRKMAPPTAAPEPNTVPETSPTGHRMFSRIRLATPTDVPFIHKLIHQMAVFERLTHLFVATESGLASTLFNSRPFQAVTVFLLEISPSPFPTTHDASSPDFTPFLETHKVDLPIEDPDREKFLPDKLNDVVVAGFVLFFPNYPSFLAKQGFYIEDIFMREPYRRKGFGKLLLTAVAKQAVKLGVGRVEWIVIDWNVNAINFYEQMGAQVFKEWRLCRLTGDALQAIDKLNI

SEQ ID NO: 96646 - protein, 228 aa, Arabidopsis thaliana
  peptide (1)..(228): Ceres Seq. ID no. 12734231
  misc_feature (120)..(205): Pfam Name: Acetyltransferase (GNAT) family Pfam Description: Acetyltransferase (GNAT) family
  misc_feature (1)..(228): Homolog of NCBI NO: 18404927 NR Description: expressed protein; protein id: At2g39030.1, by cDNA: gi_15451161 [Arabidopsis thaliana]
  misc_feature (23)..(228): Homolog of NCBI NO: 15451162 NR Description: Unknown protein [Arabidopsis thaliana]
  misc_feature (3)..(228): Homolog of NCBI NO: 15225009 NR Description: unknown protein; protein id: At2g39020.1
  misc_feature (1)..(221): Homolog of NCBI NO: 19908257 NR Description: N-hydroxycinnamoyl-CoA:tyramine N-hydroxycinnamoyl
  misc_feature (22)..(221): Homolog of NCBI NO: 5852154 NR Description: tyramine hydroxycinnamoyltransferase [Nicotiana
  misc_feature (22)..(221): Homolog of NCBI NO: 17369608 NR Description: Tyramine N-feruloyltransferase 4/11
  misc_feature (22)..(221): Homolog of NCBI NO: 17380562 NR Description: Tyramine N-feruloyltransferase 10/30
  misc_feature (6)..(221): Homolog of NCBI NO: 24745596 NR Description: tyramine hydroxycinnamoyl transferase [Solanum
  misc_feature (6)..(225): Homolog of NCBI NO: 19908261 NR Description: N-hydroxycinnamoyl-CoA:tyramine N-hydroxycinnamoyl
  misc_feature (1)..(221): Homolog of NCBI NO: 19908259 NR Description: N-hydroxycinnamoyl-CoA:tyramine N-hydroxycinnamoyl
MAPPTAAPEPNTVPETSPTGHRMFSRIRLATPTDVPFIHKLIHQMAVFERLTHLFVATESGLASTLFNSRPFQAVTVFLLEISPSPFPTTHDASSPDFTPFLETHKVDLPIEDPDREKFLPDKLNDVVVAGFVLFFPNYPSFLAKQGFYIEDIFMREPYRRKGFGKLLLTAVAKQAVKLGVGRVEWIVIDWNVNAINFYEQMGAQVFKEWRLCRLTGDALQAIDKLNI

SEQ ID NO: 96647 - protein, 206 aa, Arabidopsis thaliana
  peptide (1)..(206): Ceres Seq. ID no. 12734232
  misc_feature (98)..(183): Pfam Name: Acetyltransferase (GNAT) family Pfam Description: Acetyltransferase (GNAT) family
  misc_feature (1)..(206): Homolog of NCBI NO: 18404927 NR Description: expressed protein; protein id: At2g39030.1, by cDNA: gi_15451161 [Arabidopsis thaliana]
  misc_feature (1)..(206): Homolog of NCBI NO: 15451162 NR Description: Unknown protein [Arabidopsis thaliana]
  misc_feature (1)..(206): Homolog of NCBI NO: 15225009 NR Description: unknown protein; protein id: At2g39020.1
  misc_feature (1)..(199): Homolog of NCBI NO: 19908257 NR Description: N-hydroxycinnamoyl-CoA:tyramine N-hydroxycinnamoyl
  misc_feature (1)..(199): Homolog of NCBI NO: 5852154 NR Description: tyramine hydroxycinnamoyltransferase [Nicotiana
  misc_feature (1)..(199): Homolog of NCBI NO: 17369608 NR Description: Tyramine N-feruloyltransferase 4/11
  misc_feature (1)..(199): Homolog of NCBI NO: 17380562 NR Description: Tyramine N-feruloyltransferase 10/30
  misc_feature (1)..(199): Homolog of NCBI NO: 24745596 NR Description: tyramine hydroxycinnamoyl transferase [Solanum
  misc_feature (1)..(203): Homolog of NCBI NO: 19908261 NR Description: N-hydroxycinnamoyl-CoA:tyramine N-hydroxycinnamoyl
  misc_feature (1)..(199): Homolog of NCBI NO: 19908259 NR Description: N-hydroxycinnamoyl-CoA:tyramine N-hydroxycinnamoyl
MFSRIRLATPTDVPFIHKLIHQMAVFERLTHLFVATESGLASTLFNSRPFQAVTVFLLEISPSPFPTTHDASSPDFTPFLETHKVDLPIEDPDREKFLPDKLNDVVVAGFVLFFPNYPSFLAKQGFYIEDIFMREPYRRKGFGKLLLTAVAKQAVKLGVGRVEWIVIDWNVNAINFYEQMGAQVFKEWRLCRLTGDALQAIDKLNI

SEQ ID NO: 96648 - DNA, 2011 bp, Arabidopsis thaliana
  misc_feature (1)..(2011): Ceres Seq. ID no. 12734244
  misc_feature: MA Experiment ID: 20000314 Result: Up-regulated in Transcription
  misc_feature: MA Experiment 20000314 PARAMETER Experiment Name: At_14day_Shoots-Roots_Sub_P Parameter: Age (day) Value: 14
  misc_feature: MA Experiment 20000314 PARAMETER Experiment Name: At_14day_Shoots-Roots_Sub_P Parameter: Organism Value: A. thaliana
  misc_feature: MA Experiment 20000314 PARAMETER Experiment Name: At_14day_Shoots-Roots_Sub_P Parameter: Plant Line Value: WS
  misc_feature: MA Experiment 20000314 PARAMETER Experiment Name: At_14day_Shoots-Roots_Sub_P Parameter: Tissue Value: Roots vs. Whole Plant
  misc_feature: MA Experiment ID: 20000327 Result: Down-regulated in Transcription
  misc_feature: MA Experiment 20000327 PARAMETER Experiment Name: At_42deg_Heat_Sub_P Parameter: Age (day) Value: 14
  misc_feature: MA Experiment 20000327 PARAMETER Experiment Name: At_42deg_Heat_Sub_P Parameter: Organism Value: A. thaliana
  misc_feature: MA Experiment 20000327 PARAMETER Experiment Name: At_42deg_Heat_Sub_P Parameter: Plant Line Value: WS
  misc_feature: MA Experiment 20000327 PARAMETER Experiment Name: At_42deg_Heat_Sub_P Parameter: Temperature (deg C) Value: 42 vs. 22
  misc_feature: MA Experiment 20000327 PARAMETER Experiment Name: At_42deg_Heat_Sub_P Parameter: Timepoint (hr) Value: 1
  misc_feature: MA Experiment 20000327 PARAMETER Experiment Name: At_42deg_Heat_Sub_P Parameter: Tissue Value: Aerial
  misc_feature: MA Experiment ID: 20000328 Result: Down-regulated in Transcription
  misc_feature: MA Experiment 20000328 PARAMETER Experiment Name: At_42deg_Heat_Sub_P Parameter: Age (day) Value: 14
  misc_feature: MA Experiment 20000328 PARAMETER Experiment Name: At_42deg_Heat_Sub_P Parameter: Organism Value: A. thaliana
  misc_feature: MA Experiment 20000328 PARAMETER Experiment Name: At_42deg_Heat_Sub_P Parameter: Plant Line Value: WS
  misc_feature: MA Experiment 20000328 PARAMETER Experiment Name: At_42deg_Heat_Sub_P Parameter: Temperature (deg C) Value: 42 vs. 22
  misc_feature: MA Experiment 20000328 PARAMETER Experiment Name: At_42deg_Heat_Sub_P Parameter: Timepoint (hr) Value: 6
  misc_feature: MA Experiment 20000328 PARAMETER Experiment Name: At_42deg_Heat_Sub_P Parameter: Tissue Value: Aerial
  misc_feature: MA Experiment ID: 20000440 Result: Up-regulated in Transcription
  misc_feature: MA Experiment 20000440 PARAMETER Experiment Name: At_Closed-Flower__Sub_P Parameter: Tissue Value: Closed Flower vs. Whole Plant
actctcatctccctctctctatatcctcctcctatcagaagagctctctcttctctccgcaccgattctgatccgaagattttcagcttagaatttttttacatttctccataatcctgttcttgagacagaacaagagactgtttgactttacagatttcataaagtgaaaaaatgaatcacgtaccgtctgatcaaagcttttacattgagagcgaggacgaagacgataggaaagattacgtagaagaagatggtggaagccattctgattcctctgatgatgtttatgatgaaaaccaagctcacattaagcctagctcatacaccactgcttggcctcagagttacaggcagtcgattgatctttatagtagtgtaccgtctcccggtatcggttttcttgggaataattcgatgacgagattcggaagctctttcttgtcttctggtttgataagaagacatactccggaatcattacctactgttacaaaacctttgttagaagaacaagcagatgaacaagcactaccaaaacatagacttagctctcagggcttactctctcctattccttcgaggaggggttcgatgcgaaaggatgagaaatcatccatggtgtctcatgagattccaatgtctcgtaatagctcatacggacaagctgtactaaatggattgaacgttctttgtggggttggaatactttcaacgccttatgctgccaaagaaggaggatggttaggacttatgatactatttgtatatggtcttctttctttctacaccggaatcctccttcgttattgcctcgacagtgagtctgacctcgaaacctatcccgacattggccaagctgcgtttggtactactggacgtatctttgtctcgattgtactctacttggagctatacgcatgctgtgtggaatatataatattggagagtgataatttgtcttcattatatccaaatgctgccttaagtattggaggatttcagttagatgcacgccatctatttgcattgctaaccactctcgccgttctccccaccgtttggctcagagatctcagcgtacttagttatatctctgctggaggggtgattgcatcagtgctagtggttttatgtttgttttggattggtttggtagatgaagttggaattcacagcaaaggaactacactaaacttgtcaacattacctgtggctataggactctatggttactgctactcaggacatgctgttttccccaatatttatacttctatggccaaaccatctcaataccctgctgttctcttgacatgttttggtatttgtactctgatgtatgccggcgtcgctgttatgggttatacgatgtttggagaatcaacacagtcacagtttactctcaacttgcctcaagatttaattgcaactaagattgctgtgtggactacggtggtcaatccatttaccaaatatgctttgaccatatctccagtagcaatgagtcttgaggagttgataccatcaaggcatatcaggtcacattggtacgccatcggcattagaaccctattggtcttctctactctgcttgttggtctcgctattcccttctttggtcttgtcatgtcattgattggatcgttgttgactatgctcgtcactctaatacttcctccagcttgtttcttgagcattgtaaggagaaaagttaccccgacccagatgatgttgtgtgtcttaatcatcatagtaggagcaatatcttcagtcattggctcatattcagctctttccaagatcgttgagaaattgaccaactgaaaatatttctctgtttttttcttacaaactcttatacccattttgtctttcaggggaatactttttttctttttttctttttctgttttgtcttttgttttcgtatagcaaaattcattcttgcattcaaagcttttgtaatatctgagtgatgatctgcatcttaaaactggtttgaaagttg

SEQ ID NO: 96649 - protein, 550 aa, Arabidopsis thaliana
  peptide (1)..(550): Ceres Seq. ID no. 12734245
  misc_feature (158)..(502): Pfam Name: Tryptophan/tyrosine permease family Pfam Description: Tryptophan/tyrosine permease family
  misc_feature (1)..(550): Homolog of NCBI NO: 30687791 NR Description: amino acid transporter family [Arabidopsis
  misc_feature (1)..(550): Homolog of NCBI NO: 15292735 NR Description: unknown protein [Arabidopsis thaliana]
  misc_feature (1)..(510): Homolog of NCBI NO: 25408639 NR Description: hypothetical protein At2g39130 [imported] -
  misc_feature (1)..(381): Homolog of NCBI NO: 7487060 NR Description: hypothetical protein T16B24.23 - Arabidopsis (fragment) >gi|20197256|gb|AAM14997.1| hypothetical protein
  misc_feature (1)..(536): Homolog of NCBI NO: 15233103 NR Description: putative protein; protein id: At3g54830.1
  misc_feature (249)..(482): Homolog of NCBI NO: 20197442 NR Description: unknown protein [Arabidopsis thaliana]
  misc_feature (14)..(550): Homolog of NCBI NO: 30679549 NR Description: amino acid transporter family [Arabidopsis >gi|26449931|dbj|BAC42086.1| unknown protein [Arabidopsis
  misc_feature (157)..(549): Homolog of NCBI NO: 22326569 NR Description: putative protein; protein id: At5g02170.1, by cDNA: gi_20856760 [Arabidopsis thaliana] AT5g02170/T7H20_220 [Arabidopsis thaliana]
  misc_feature (161)..(497): Homolog of NCBI NO: 15232639 NR Description: hypothetical protein; protein id: At3g09340.1 thaliana] >gi|6478926|gb|AAF14031.1|AC011436_15 hypothetical
  misc_feature (16)..(116): Homolog of NCBI NO: 15232639 NR Description: hypothetical protein; protein id: At3g09340.1 thaliana] >gi|6478926|gb|AAF14031.1|AC011436_15 hypothetical
MNHVPSDQSFYIESEDEDDRKDYVEEDGGSHSDSSDDVYDENQAHIKPSSYTTAWPQSYRQSIDLYSSVPSPGIGFLGNNSMTRFGSSFLSSGLIRRHTPESLPTVTKPLLEEQADEQALPKHRLSSQGLLSPIPSRRGSMRKDEKSSMVSHEIPMSRNSSYGQAVLNGLNVLCGVGILSTPYAAKEGGWLGLMILFVYGLLSFYTGILLRYCLDSESDLETYPDIGQAAFGTTGRIFVSIVLYLELYACCVEYIILESDNLSSLYPNAALSIGGFQLDARHLFALLTTLAVLPTVWLRDLSVLSYISAGGVIASVLVVLCLFWIGLVDEVGIHSKGTTLNLSTLPVAIGLYGYCYSGHAVFPNIYTSMAKPSQYPAVLLTCFGICTLMYAGVAVMGYTMFGESTQSQFTLNLPQDLIATKIAVWTTVVNPFTKYALTISPVAMSLEELIPSRHIRSHWYAIGIRTLLVFSTLLVGLAIPFFGLVMSLIGSLLTMLVTLILPPACFLSIVRRKVTPTQMMLCVLIIIVGAISSVIGSYSALSKIVEKLTN

SEQ ID NO: 96650 - protein, 469 aa, Arabidopsis thaliana
  peptide (1)..(469): Ceres Seq. ID no. 12734246
  misc_feature (77)..(421): Pfam Name: Tryptophan/tyrosine permease family Pfam Description: Tryptophan/tyrosine permease family
  misc_feature (1)..(469): Homolog of NCBI NO: 30687791 NR Description: amino acid transporter family [Arabidopsis
  misc_feature (1)..(469): Homolog of NCBI NO: 15292735 NR Description: unknown protein [Arabidopsis thaliana]
  misc_feature (1)..(429): Homolog of NCBI NO: 25408639 NR Description: hypothetical protein At2g39130 [imported] -
  misc_feature (1)..(300): Homolog of NCBI NO: 7487060 NR Description: hypothetical protein T16B24.23 - Arabidopsis (fragment) >gi|20197256|gb|AAM14997.1| hypothetical protein
  misc_feature (1)..(455): Homolog of NCBI NO: 15233103 NR Description: putative protein; protein id: At3g54830.1
  misc_feature (168)..(401): Homolog of NCBI NO: 20197442 NR Description: unknown protein [Arabidopsis thaliana]
  misc_feature (1)..(469): Homolog of NCBI NO: 30679549 NR Description: amino acid transporter family [Arabidopsis >gi|26449931|dbj|BAC42086.1| unknown protein [Arabidopsis
  misc_feature (76)..(468): Homolog of NCBI NO: 22326569 NR Description: putative protein; protein id: At5g02170.1, by cDNA: gi_20856760 [Arabidopsis thaliana] AT5g02170/T7H20_220 [Arabidopsis thaliana]
  misc_feature (80)..(416): Homolog of NCBI NO: 15232639 NR Description: hypothetical protein; protein id: At3g09340.1 thaliana] >gi|6478926|gb|AAF14031.1|AC011436_15 hypothetical
  misc_feature (1)..(35): Homolog of NCBI NO: 15232639 NR Description: hypothetical protein; protein id: At3g09340.1 thaliana] >gi|6478926|gb|AAF14031.1|AC011436_15 hypothetical
MTRFGSSFLSSGLIRRHTPESLPTVTKPLLEEQADEQALPKHRLSSQGLLSPIPSRRGSMRKDEKSSMVSHEIPMSRNSSYGQAVLNGLNVLCGVGILSTPYAAKEGGWLGLMILFVYGLLSFYTGILLRYCLDSESDLETYPDIGQAAFGTTGRIFVSIVLYLELYACCVEYIILESDNLSSLYPNAALSIGGFQLDARHLFALLTTLAVLPTVWLRDLSVLSYISAGGVIASVLVVLCLFWIGLVDEVGIHSKGTTLNLSTLPVAIGLYGYCYSGHAVFPNIYTSMAKPSQYPAVLLTCFGICTLMYAGVAVMGYTMFGESTQSQFTLNLPQDLIATKIAVWTTVVNPFTKYALTISPVAMSLEELIPSRHIRSHWYAIGIRTLLVFSTLLVGLAIPFFGLVMSLIGSLLTMLVTLILPPACFLSIVRRKVTPTQMMLCVLIIIVGAISSVIGSYSALSKIVEKLTN

SEQ ID NO: 96651 - protein, 410 aa, Arabidopsis thaliana
  peptide (1)..(410): Ceres Seq. ID no. 12734247
  misc_feature (18)..(362): Pfam Name: Tryptophan/tyrosine permease family Pfam Description: Tryptophan/tyrosine permease family
  misc_feature (1)..(410): Homolog of NCBI NO: 30687791 NR Description: amino acid transporter family [Arabidopsis
  misc_feature (1)..(410): Homolog of NCBI NO: 15292735 NR Description: unknown protein [Arabidopsis thaliana]
  misc_feature (1)..(370): Homolog of NCBI NO: 25408639 NR Description: hypothetical protein At2g39130 [imported] -
  misc_feature (1)..(241): Homolog of NCBI NO: 7487060 NR Description: hypothetical protein T16B24.23 - Arabidopsis (fragment) >gi|20197256|gb|AAM14997.1| hypothetical protein
  misc_feature (1)..(396): Homolog of NCBI NO: 15233103 NR Description: putative protein; protein id: At3g54830.1
  misc_feature (109)..(342): Homolog of NCBI NO: 20197442 NR Description: unknown protein [Arabidopsis thaliana]
  misc_feature (1)..(410): Homolog of NCBI NO: 30679549 NR Description: amino acid transporter family [Arabidopsis >gi|26449931|dbj|BAC42086.1| unknown protein [Arabidopsis
  misc_feature (17)..(409): Homolog of NCBI NO: 22326569 NR Description: putative protein; protein id: At5g02170.1, by cDNA: gi_20856760 [Arabidopsis thaliana] AT5g02170/T7H20_220 [Arabidopsis thaliana]
  misc_feature (21)..(357): Homolog of NCBI NO: 15232639 NR Description: hypothetical protein; protein id: At3g09340.1 thaliana] >gi|6478926|gb|AAF14031.1|AC011436_15 hypothetical
  misc_feature (1)..(410): Homolog of NCBI NO: 11358406 NR Description: hypothetical protein T7H20.230 - Arabidopsis >gi|7340692|emb|CAB82991.1| putative protein [Arabidopsis
MRKDEKSSMVSHEIPMSRNSSYGQAVLNGLNVLCGVGILSTPYAAKEGGWLGLMILFVYGLLSFYTGILLRYCLDSESDLETYPDIGQAAFGTTGRIFVSIVLYLELYACCVEYIILESDNLSSLYPNAALSIGGFQLDARHLFALLTTLAVLPTVWLRDLSVLSYISAGGVIASVLVVLCLFWIGLVDEVGIHSKGTTLNLSTLPVAIGLYGYCYSGHAVFPNIYTSMAKPSQYPAVLLTCFGICTLMYAGVAVMGYTMFGESTQSQFTLNLPQDLIATKIAVWTTVVNPFTKYALTISPVAMSLEELIPSRHIRSHWYAIGIRTLLVFSTLLVGLAIPFFGLVMSLIGSLLTMLVTLILPPACFLSIVRRKVTPTQMMLCVLIIIVGAISSVIGSYSALSKIVEKLTN

SEQ ID NO: 96652 - DNA, 1747 bp, Arabidopsis thaliana
  misc_feature (1)..(1747): Ceres Seq. ID no. 12734248
  misc_feature: MA Experiment ID: 20000179 Result: Down-regulated in Transcription
  misc_feature: MA Experiment 20000179 PARAMETER Experiment Name: At_Germinating_Seeds_P Parameter: Age (hr) Value: 6 vs. 0
  misc_feature: MA Experiment 20000179 PARAMETER Experiment Name: At_Germinating_Seeds_P Parameter: Tissue Value: Germinating Seeds
  misc_feature: MA Experiment ID: 20000182 Result: Up-regulated in Transcription
  misc_feature: MA Experiment 20000182 PARAMETER Experiment Name: At_2mM_SA_P Parameter: Age (day) Value: 14
  misc_feature: MA Experiment 20000182 PARAMETER Experiment Name: At_2mM_SA_P Parameter: Organism Value: A. thaliana
  misc_feature: MA Experiment 20000182 PARAMETER Experiment Name: At_2mM_SA_P Parameter: Plant Line Value: WS
  misc_feature: MA Experiment 20000182 PARAMETER Experiment Name: At_2mM_SA_P Parameter: Timepoint (hr) Value: 6
  misc_feature: MA Experiment 20000182 PARAMETER Experiment Name: At_2mM_SA_P Parameter: Tissue Value: Aerial
  misc_feature: MA Experiment 20000182 PARAMETER Experiment Name: At_2mM_SA_P Parameter: Treatment Value: 2mM SA vs. No Treatment
  misc_feature: MA Experiment ID: 20000185 Result: Up-regulated in Transcription
  misc_feature: MA Experiment 20000185 PARAMETER Experiment Name: At_Roots__P Parameter: Age (day) Value: 7 vs. 21
  misc_feature: MA Experiment 20000185 PARAMETER Experiment Name: At_Roots__P Parameter: Organism Value: A. thaliana
  misc_feature: MA Experiment 20000185 PARAMETER Experiment Name: At_Roots__P Parameter: Tissue Value: Roots vs. Whole Plant
  misc_feature: MA Experiment ID: 20000234 Result: Down-regulated in Transcription
  misc_feature: MA Experiment 20000234 PARAMETER Experiment Name: At_Siliques_P Parameter: Age (day) Value: 21
  misc_feature: MA Experiment 20000234 PARAMETER Experiment Name: At_Siliques_P Parameter: Organism Value: A. thaliana
  misc_feature: MA Experiment 20000234 PARAMETER Experiment Name: At_Siliques_P Parameter: Plant Line Value: WS
  misc_feature: MA Experiment 20000234 PARAMETER Experiment Name: At_Siliques_P Parameter: Tissue Value: Less Than 5mm Siliques vs. Whole Plant
  misc_feature: MA Experiment ID: 20000265 Result: Down-regulated in Transcription
  misc_feature: MA Experiment 20000265 PARAMETER Experiment Name: At_Open_Flower_P Parameter: Age (day) Value: 21
  misc_feature: MA Experiment 20000265 PARAMETER Experiment Name: At_Open_Flower_P Parameter: Plant Line Value: WS
  misc_feature: MA Experiment 20000265 PARAMETER Experiment Name: At_Open_Flower_P Parameter: Tissue Value: Closed Flower vs. Whole Plant
  misc_feature: MA Experiment ID: 20000437 Result: Down-regulated in Transcription
  misc_feature: MA Experiment 20000437 PARAMETER Experiment Name: At_Drought_P Parameter: Age (day) Value: 8
  misc_feature: MA Experiment 20000437 PARAMETER Experiment Name: At_Drought_P Parameter: Organism Value: A. thaliana
  misc_feature: MA Experiment 20000437 PARAMETER Experiment Name: At_Drought_P Parameter: Plant Line Value: WS
  misc_feature: MA Experiment 20000437 PARAMETER Experiment Name: At_Drought_P Parameter: Timepoint (hr) Value: 24
  misc_feature: MA Experiment 20000437 PARAMETER Experiment Name: At_Drought_P Parameter: Tissue Value: Whole Plant
  misc_feature: MA Experiment 20000437 PARAMETER Experiment Name: At_Drought_P Parameter: Treatment Value: Drought vs. No Drought
  misc_feature: MA Experiment ID: 20000439 Result: Up-regulated in Transcription
  misc_feature: MA Experiment 20000439 PARAMETER Experiment Name: At_Roots__P Parameter: Age (day) Value: 14 vs. 21
  misc_feature: MA Experiment 20000439 PARAMETER Experiment Name: At_Roots__P Parameter: Organism Value: A. thaliana
  misc_feature: MA Experiment 20000439 PARAMETER Experiment Name: At_Roots__P Parameter: Tissue Value: Roots vs. Whole Plant
  misc_feature: MA Experiment ID: 20000574 Result: Up-regulated in Transcription
  misc_feature: MA Experiment 20000574 PARAMETER Experiment Name: At_100uM_ABA_Mutants__P Parameter: Organism Value: A. thaliana
  misc_feature: MA Experiment 20000574 PARAMETER Experiment Name: At_100uM_ABA_Mutants__P Parameter: Plant Line Value: CS23 vs. Ler wt
  misc_feature: MA Experiment 20000574 PARAMETER Experiment Name: At_100uM_ABA_Mutants__P Parameter: Timepoint (hr) Value: N/A
  misc_feature: MA Experiment 20000574 PARAMETER Experiment Name: At_100uM_ABA_Mutants__P Parameter: Tissue Value: Whole Plant
  misc_feature: MA Experiment 20000574 PARAMETER Experiment Name: At_100uM_ABA_Mutants__P Parameter: Treatment Value: None
  misc_feature: MA Experiment ID: 20001451 Result: Down-regulated in Transcription
  misc_feature: MA Experiment 20001451 PARAMETER Experiment Name: At_Far-red-induction_P Parameter: Age (day) Value: 7
  misc_feature: MA Experiment 20001451 PARAMETER Experiment Name: At_Far-red-induction_P Parameter: Light Value: Far-red vs. White
  misc_feature: MA Experiment 20001451 PARAMETER Experiment Name: At_Far-red-induction_P Parameter: Organism Value: A. thaliana
  misc_feature: MA Experiment 20001451 PARAMETER Experiment Name: At_Far-red-induction_P Parameter: Plant Line Value: Columbia
  misc_feature: MA Experiment 20001451 PARAMETER Experiment Name: At_Far-red-induction_P Parameter: Timepoint (hr) Value: 24
  misc_feature: MA Experiment 20001451 PARAMETER Experiment Name: At_Far-red-induction_P Parameter: Tissue Value: Whole Plant
  misc_feature: MA Experiment ID: 20001557 Result: Up-regulated in Transcription
  misc_feature: MA Experiment 20001557 PARAMETER Experiment Name: At_Drought_Soil_Dry_P Parameter: Age (day) Value: 27
  misc_feature: MA Experiment 20001557 PARAMETER Experiment Name: At_Drought_Soil_Dry_P Parameter: Organism Value: A. thaliana
  misc_feature: MA Experiment 20001557 PARAMETER Experiment Name: At_Drought_Soil_Dry_P Parameter: Plant Line Value: WS
  misc_feature: MA Experiment 20001557 PARAMETER Experiment Name: At_Drought_Soil_Dry_P Parameter: Post Timepoint (hr) Value: 3
  misc_feature: MA Experiment 20001557 PARAMETER Experiment Name: At_Drought_Soil_Dry_P Parameter: Post-Treatment Value: Re-Water vs. No Drought
  misc_feature: MA Experiment 20001557 PARAMETER Experiment Name: At_Drought_Soil_Dry_P Parameter: Timepoint (day) Value: 13
  misc_feature: MA Experiment 20001557 PARAMETER Experiment Name: At_Drought_Soil_Dry_P Parameter: Treatment Value: Drought vs. No Drought
  misc_feature: MA Experiment ID: 20001773 Result: Down-regulated in Transcription
  misc_feature: MA Experiment 20001773 PARAMETER Experiment Name: At_Far-red-enriched-adult_P Parameter: Age (day) Value: 30
  misc_feature: MA Experiment 20001773 PARAMETER Experiment Name: At_Far-red-enriched-adult_P Parameter: Light Value: Far-red enriched vs. White
  misc_feature: MA Experiment 20001773 PARAMETER Experiment Name: At_Far-red-enriched-adult_P Parameter: Organism Value: A. thaliana
  misc_feature: MA Experiment 20001773 PARAMETER Experiment Name: At_Far-red-enriched-adult_P Parameter: Plant Line Value: Columbia
  misc_feature: MA Experiment 20001773 PARAMETER Experiment Name: At_Far-red-enriched-adult_P Parameter: Timepoint (hr) Value: 48
  misc_feature: MA Experiment 20001773 PARAMETER Experiment Name: At_Far-red-enriched-adult_P Parameter: Tissue Value: Aerial
  misc_feature: MA Experiment ID: 20001905 Result: Up-regulated in Transcription
  misc_feature: MA Experiment 20001905 PARAMETER Experiment Name: At_Drought_Reproduction_P Parameter: Age (day) Value: 40
  misc_feature: MA Experiment 20001905 PARAMETER Experiment Name: At_Drought_Reproduction_P Parameter: Organism Value: A. thaliana
  misc_feature: MA Experiment 20001905 PARAMETER Experiment Name: At_Drought_Reproduction_P Parameter: Plant Line Value: WS
  misc_feature: MA Experiment 20001905 PARAMETER Experiment Name: At_Drought_Reproduction_P Parameter: Timepoint (day) Value: 10
  misc_feature: MA Experiment 20001905 PARAMETER Experiment Name: At_Drought_Reproduction_P Parameter: Tissue Value: Rosettes
  misc_feature: MA Experiment 20001905 PARAMETER Experiment Name: At_Drought_Reproduction_P Parameter: Treatment Value: Drought vs. No Drought
ttgagcagtgaaattaatggcaataaaagagcgatcactagaggaaacaccaacatgggctgttgctgtagtttgcttcgttctccttttcatttccatcatgatcgaatacttcttgcactttattggtcactggtttaagaagaagcacaagaaagctttatctgaagctcttgaaaaggttaaagcagaactgatgcttctgggattcatatcgcttctattggttgtattgcaaacaccagtctccgagatttgcattccaagaaatattgctgcgacttggcatccttgtagcaaccatcaagaaatcgccaaatatggtaaagattatatcgacgatggccgcaaaattcttgaagattttgactccaacgacttttacagtcctcgccgaaatttagccaccaagggttatgacaaatgcgcagaaaaggggaaagtagcattagtatctgcctatggtatccaccagctgcatatattcatctttgtgctcgctgtttttcatgttctctactgcattataacctatgctttaggaaagaccaagatgaagaaatggaagtcatgggagagagagaccaaaacaattgagtaccaatatgccaatgatccagagaggttcagatttgcaagagatacatcgttcggacgtagacatctgaatatatggagcaagtctacctttaccctctggattacatgtttcttcagacagttctttggatcagtgacaaaagtagattatcttacactaagacatggctttattatggcacatttgccagcaggaagtgccgctcgtttcgatttccaaaaatacattgaaagatctttggaacaagatttcacggtggttgtcggtataagcccactgatatggtgcattgctgtcttattcatattgaccaatacacatggatgggactcatatctttggctgcccttccttcccttgattgtgatattgatagtaggagcaaaacttcaaatgataatatcgaaattaggattaaggattcaagaaaaaggagatgtggttaaaggagctcctgtggttgaaccgggcgatgatctcttttggtttggtcgtcctcgtttcattctcttcctcattcacttggttcttttcacgaatgcatttcaactggctttcttcgtttggagcacttacgaattcacactcaaaaactgcttccaccacaaaacagaagacattgcaattaggatcaccatgggggtattaatacaagttctatgcagctacatcactctacctctctatgctcttgttactcagatgggaacatcaatgaggccgacaatattcaacgacagggtagccaatgcattgaagaaatggcaccacacagccaagaaacagacgaaacatggacactcaggatctaacacacctcactcgagccgtcctactacgccaacacatggcatgtcaccggtgcatctcctccacaactacaataaccgcagcctcgaccaacaaaccagcttcactgcttctccttctcctcctagattctctgattatagcggccaaggccatggccatcagcatttcttcgaccctgaatctcagaatcactcttaccaacgtgagatcacagattctgaattcagcaatagtcatcatccccaagttgacatggcaagtcctgttagagaagagaaggagattgttgagcatgtcaaggttgatttgtctgagtttacgttcaagaagtga

SEQ ID NO: 96653 - protein, 576 aa, Arabidopsis thaliana
  peptide (1)..(576): Ceres Seq. ID no. 12734249
  misc_feature (3)..(495): Pfam Name: Mlo family Pfam Description: Mlo family
  misc_feature (1)..(576): Homolog of NCBI NO: 7487052 NR Description: H. vulgare Mlo protein homolog [imported] -
  misc_feature (3)..(576): Homolog of NCBI NO: 15220339 NR Description: Mlo protein, putative; protein id: At1g11310.1, by cDNA: 259664., supported by cDNA: gi_14091573, supported by gi_15809945 [Arabidopsis thaliana] >gi|25346298|pir||B86247
  misc_feature (3)..(576): Homolog of NCBI NO: 15220529 NR Description: Mlo protein, putative; protein id: At1g61560.1, by cDNA: gi_14091581 [Arabidopsis thaliana]
  misc_feature (6)..(552): Homolog of NCBI NO: 15290605 NR Description: seven transmembrane protein MLO2 [Oryza sativa
  misc_feature (6)..(552): Homolog of NCBI NO: 6063540 NR Description: similar to OsMlo-h1. (Z95353) [Oryza sativa
  misc_feature (6)..(440): Homolog of NCBI NO: 23306124 NR Description: Putative OsMlo-h1 [Oryza sativa (japonica
  misc_feature (429)..(552): Homolog of NCBI NO: 23306124 NR Description: Putative OsMlo-h1 [Oryza sativa (japonica
  misc_feature (6)..(544): Homolog of NCBI NO: 14718604 NR Description: Mlo [Oryza sativa]
  misc_feature (6)..(521): Homolog of NCBI NO: 6016585 NR Description: MLO PROTEIN HOMOLOG 1 >gi|7489390|pir||T05952
  misc_feature (137)..(544): Homolog of NCBI NO: 14334169 NR Description: MLo1 protein [Triticum aestivum]
MAIKERSLEETPTWAVAVVCFVLLFISIMIEYFLHFIGHWFKKKHKKALSEALEKVKAELMLLGFISLLLVVLQTPVSEICIPRNIAATWHPCSNHQEIAKYGKDYIDDGRKILEDFDSNDFYSPRRNLATKGYDKCAEKGKVALVSAYGIHQLHIFIFVLAVFHVLYCIITYALGKTKMKKWKSWERETKTIEYQYANDPERFRFARDTSFGRRHLNIWSKSTFTLWITCFFRQFFGSVTKVDYLTLRHGFIMAHLPAGSAARFDFQKYIERSLEQDFTVVVGISPLIWCIAVLFILTNTHGWDSYLWLPFLPLIVILIVGAKLQMIISKLGLRIQEKGDVVKGAPVVEPGDDLFWFGRPRFILFLIHLVLFTNAFQLAFFVWSTYEFTLKNCFHHKTEDIAIRITMGVLIQVLCSYITLPLYALVTQMGTSMRPTIFNDRVANALKKWHHTAKKQTKHGHSGSNTPHSSRPTTPTHGMSPVHLLHNYNNRSLDQQTSFTASPSPPRFSDYSGQGHGHQHFFDPESQNHSYQREITDSEFSNSHHPQVDMASPVREEKEIVEHVKVDLSEFTFKK

SEQ ID NO: 96654 - protein, 548 aa, Arabidopsis thaliana
  peptide (1)..(548): Ceres Seq. ID no. 12734250
  misc_feature (1)..(467): Pfam Name: Mlo family Pfam Description: Mlo family
  misc_feature (1)..(548): Homolog of NCBI NO: 7487052 NR Description: H. vulgare Mlo protein homolog [imported] -
  misc_feature (1)..(548): Homolog of NCBI NO: 15220339 NR Description: Mlo protein, putative; protein id: At1g11310.1, by cDNA: 259664., supported by cDNA: gi_14091573, supported by gi_15809945 [Arabidopsis thaliana] >gi|25346298|pir||B86247
  misc_feature (1)..(548): Homolog of NCBI NO: 15220529 NR Description: Mlo protein, putative; protein id: At1g61560.1, by cDNA: gi_14091581 [Arabidopsis thaliana]
  misc_feature (1)..(524): Homolog of NCBI NO: 15290605 NR Description: seven transmembrane protein MLO2 [Oryza sativa
  misc_feature (1)..(524): Homolog of NCBI NO: 6063540 NR Description: similar to OsMlo-h1. (Z95353) [Oryza sativa
  misc_feature (1)..(412): Homolog of NCBI NO: 23306124 NR Description: Putative OsMlo-h1 [Oryza sativa (japonica
  misc_feature (401)..(524): Homolog of NCBI NO: 23306124 NR Description: Putative OsMlo-h1 [Oryza sativa (japonica
  misc_feature (1)..(516): Homolog of NCBI NO: 14718604 NR Description: Mlo [Oryza sativa]
  misc_feature (1)..(493): Homolog of NCBI NO: 6016585 NR Description: MLO PROTEIN HOMOLOG 1 >gi|7489390|pir||T05952
  misc_feature (109)..(516): Homolog of NCBI NO: 14334169 NR Description: MLo1 protein [Triticum aestivum]
MIEYFLHFIGHWFKKKHKKALSEALEKVKAELMLLGFISLLLVVLQTPVSEICIPRNIAATWHPCSNHQEIAKYGKDYIDDGRKILEDFDSNDFYSPRRNLATKGYDKCAEKGKVALVSAYGIHQLHIFIFVLAVFHVLYCIITYALGKTKMKKWKSWERETKTIEYQYANDPERFRFARDTSFGRRHLNIWSKSTFTLWITCFFRQFFGSVTKVDYLTLRHGFIMAHLPAGSAARFDFQKYIERSLEQDFTVVVGISPLIWCIAVLFILTNTHGWDSYLWLPFLPLIVILIVGAKLQMIISKLGLRIQEKGDVVKGAPVVEPGDDLFWFGRPRFILFLIHLVLFTNAFQLAFFVWSTYEFTLKNCFHHKTEDIAIRITMGVLIQVLCSYITLPLYALVTQMGTSMRPTIFNDRVANALKKWHHTAKKQTKHGHSGSNTPHSSRPTTPTHGMSPVHLLHNYNNRSLDQQTSFTASPSPPRFSDYSGQGHGHQHFFDPESQNHSYQREITDSEFSNSHHPQVDMASPVREEKEIVEHVKVDLSEFTFKK

SEQ ID NO: 96655 - protein, 516 aa, Arabidopsis thaliana
  peptide (1)..(516): Ceres Seq. ID no. 12734251
  misc_feature (1)..(435): Pfam Name: Mlo family Pfam Description: Mlo family
  misc_feature (1)..(516): Homolog of NCBI NO: 7487052 NR Description: H. vulgare Mlo protein homolog [imported] -
  misc_feature (1)..(516): Homolog of NCBI NO: 15220339 NR Description: Mlo protein, putative; protein id: At1g11310.1, by cDNA: 259664., supported by cDNA: gi_14091573, supported by gi_15809945 [Arabidopsis thaliana] >gi|25346298|pir||B86247
  misc_feature (1)..(516): Homolog of NCBI NO: 15220529 NR Description: Mlo protein, putative; protein id: At1g61560.1, by cDNA: gi_14091581 [Arabidopsis thaliana]
  misc_feature (1)..(492): Homolog of NCBI NO: 15290605 NR Description: seven transmembrane protein MLO2 [Oryza sativa
  misc_feature (1)..(492): Homolog of NCBI NO: 6063540 NR Description: similar to OsMlo-h1. (Z95353) [Oryza sativa
  misc_feature (1)..(380): Homolog of NCBI NO: 23306124 NR Description: Putative OsMlo-h1 [Oryza sativa (japonica
  misc_feature (369)..(492): Homolog of NCBI NO: 23306124 NR Description: Putative OsMlo-h1 [Oryza sativa (japonica
  misc_feature (1)..(484): Homolog of NCBI NO: 14718604 NR Description: Mlo [Oryza sativa]
  misc_feature (1)..(461): Homolog of NCBI NO: 6016585 NR Description: MLO PROTEIN HOMOLOG 1 >gi|7489390|pir||T05952
  misc_feature (77)..(484): Homolog of NCBI NO: 14334169 NR Description: MLo1 protein [Triticum aestivum]
MLLGFISLLLVVLQTPVSEICIPRNIAATWHPCSNHQEIAKYGKDYIDDGRKILEDFDSNDFYSPRRNLATKGYDKCAEKGKVALVSAYGIHQLHIFIFVLAVFHVLYCIITYALGKTKMKKWKSWERETKTIEYQYANDPERFRFARDTSFGRRHLNIWSKSTFTLWITCFFRQFFGSVTKVDYLTLRHGFIMAHLPAGSAARFDFQKYIERSLEQDFTVVVGISPLIWCIAVLFILTNTHGWDSYLWLPFLPLIVILIVGAKLQMIISKLGLRIQEKGDVVKGAPVVEPGDDLFWFGRPRFILFLIHLVLFTNAFQLAFFVWSTYEFTLKNCFHHKTEDIAIRITMGVLIQVLCSYITLPLYALVTQMGTSMRPTIFNDRVANALKKWHHTAKKQTKHGHSGSNTPHSSRPTTPTHGMSPVHLLHNYNNRSLDQQTSFTASPSPPRFSDYSGQGHGHQHFFDPESQNHSYQREITDSEFSNSHHPQVDMASPVREEKEIVEHVKVDLSEFTFKK

SEQ ID NO: 96656 - DNA, 1966 bp, Arabidopsis thaliana
  misc_feature (1)..(1966): Ceres Seq. ID no. 12734252
  misc_feature: MA Experiment ID: 20000171 Result: Down-regulated in Transcription
  misc_feature: MA Experiment 20000171 PARAMETER Experiment Name: At_42deg_Heat_P Parameter: Age (day) Value: 14
  misc_feature: MA Experiment 20000171 PARAMETER Experiment Name: At_42deg_Heat_P Parameter: Organism Value: A. thaliana
  misc_feature: MA Experiment 20000171 PARAMETER Experiment Name: At_42deg_Heat_P Parameter: Plant Line Value: WS
  misc_feature: MA Experiment 20000171 PARAMETER Experiment Name: At_42deg_Heat_P Parameter: Temperature (deg C) Value: 42 vs. 22
  misc_feature: MA Experiment 20000171 PARAMETER Experiment Name: At_42deg_Heat_P Parameter: Timepoint (hr) Value: 1
  misc_feature: MA Experiment 20000171 PARAMETER Experiment Name: At_42deg_Heat_P Parameter: Tissue Value: Aerial
  misc_feature: MA Experiment ID: 20000173 Result: Down-regulated in Transcription
  misc_feature: MA Experiment 20000173 PARAMETER Experiment Name: At_42deg_Heat_P Parameter: Age (day) Value: 14
  misc_feature: MA Experiment 20000173 PARAMETER Experiment Name: At_42deg_Heat_P Parameter: Organism Value: A. thaliana
  misc_feature: MA Experiment 20000173 PARAMETER Experiment Name: At_42deg_Heat_P Parameter: Plant Line Value: WS
  misc_feature: MA Experiment 20000173 PARAMETER Experiment Name: At_42deg_Heat_P Parameter: Temperature (deg C) Value: 42 vs. 22
  misc_feature: MA Experiment 20000173 PARAMETER Experiment Name: At_42deg_Heat_P Parameter: Timepoint (hr) Value: 6
  misc_feature: MA Experiment 20000173 PARAMETER Experiment Name: At_42deg_Heat_P Parameter: Tissue Value: Aerial
  misc_feature: MA Experiment ID: 20000179 Result: Down-regulated in Transcription
  misc_feature: MA Experiment 20000179 PARAMETER Experiment Name: At_Germinating_Seeds_P Parameter: Age (hr) Value: 6 vs. 0
  misc_feature: MA Experiment 20000179 PARAMETER Experiment Name: At_Germinating_Seeds_P Parameter: Tissue Value: Germinating Seeds
  misc_feature: MA Experiment ID: 20000182 Result: Up-regulated in Transcription
  misc_feature: MA Experiment 20000182 PARAMETER Experiment Name: At_2mM_SA_P Parameter: Age (day) Value: 14
  misc_feature: MA Experiment 20000182 PARAMETER Experiment Name: At_2mM_SA_P Parameter: Organism Value: A. thaliana
  misc_feature: MA Experiment 20000182 PARAMETER Experiment Name: At_2mM_SA_P Parameter: Plant Line Value: WS
  misc_feature: MA Experiment 20000182 PARAMETER Experiment Name: At_2mM_SA_P Parameter: Timepoint (hr) Value: 6
  misc_feature: MA Experiment 20000182 PARAMETER Experiment Name: At_2mM_SA_P Parameter: Tissue Value: Aerial
  misc_feature: MA Experiment 20000182 PARAMETER Experiment Name: At_2mM_SA_P Parameter: Treatment Value: 2mM SA vs. No Treatment
  misc_feature: MA Experiment ID: 20000184 Result: Down-regulated in Transcription
  misc_feature: MA Experiment 20000184 PARAMETER Experiment Name: At_Shoots__P Parameter: Age (day) Value: 7
  misc_feature: MA Experiment 20000184 PARAMETER Experiment Name: At_Shoots__P Parameter: Tissue Value: Shoots vs. Whole Plant
  misc_feature: MA Experiment ID: 20000213 Result: Up-regulated in Transcription
  misc_feature: MA Experiment 20000213 PARAMETER Experiment Name: At_4deg_Cold_P Parameter: Timepoint (hr) Value: 2
  misc_feature: MA Experiment ID: 20000227 Result: Up-regulated in Transcription
  misc_feature: MA Experiment 20000227 PARAMETER Experiment Name: At_Root-Tips-vs-Tops_P Parameter: Tissue Value: Root Tips vs. Root Tops
  misc_feature: MA Experiment ID: 20000234 Result: Down-regulated in Transcription
  misc_feature: MA Experiment 20000234 PARAMETER Experiment Name: At_Siliques_P Parameter: Age (day) Value: 21
  misc_feature: MA Experiment 20000234 PARAMETER Experiment Name: At_Siliques_P Parameter: Organism Value: A. thaliana
  misc_feature: MA Experiment 20000234 PARAMETER Experiment Name: At_Siliques_P Parameter: Plant Line Value: WS
  misc_feature: MA Experiment 20000234 PARAMETER Experiment Name: At_Siliques_P Parameter: Tissue Value: Less Than 5mm Siliques vs. Whole Plant
  misc_feature: MA Experiment ID: 20000235 Result: Down-regulated in Transcription
  misc_feature: MA Experiment 20000235 PARAMETER Experiment Name: At_Siliques_P Parameter: Age (day) Value: 21
  misc_feature: MA Experiment 20000235 PARAMETER Experiment Name: At_Siliques_P Parameter: Organism Value: A. thaliana
  misc_feature: MA Experiment 20000235 PARAMETER Experiment Name: At_Siliques_P Parameter: Plant Line Value: WS
  misc_feature: MA Experiment 20000235 PARAMETER Experiment Name: At_Siliques_P Parameter: Tissue Value: 5-10mm Siliques vs. Whole Plant
  misc_feature: MA Experiment ID: 20000265 Result: Down-regulated in Transcription
  misc_feature: MA Experiment 20000265 PARAMETER Experiment Name: At_Open_Flower_P Parameter: Age (day) Value: 21
  misc_feature: MA Experiment 20000265 PARAMETER Experiment Name: At_Open_Flower_P Parameter: Plant Line Value: WS
  misc_feature: MA Experiment 20000265 PARAMETER Experiment Name: At_Open_Flower_P Parameter: Tissue Value: Closed Flower vs. Whole Plant
  misc_feature: MA Experiment ID: 20000438 Result: Down-regulated in Transcription
  misc_feature: MA Experiment 20000438 PARAMETER Experiment Name: At_Shoots__P Parameter: Age (day) Value: 14
  misc_feature: MA Experiment 20000438 PARAMETER Experiment Name: At_Shoots__P Parameter: Tissue Value: Shoots vs. Whole Plant
  misc_feature: MA Experiment ID: 20000441 Result: Up-regulated in Transcription
  misc_feature: MA Experiment 20000441 PARAMETER Experiment Name: At_1uM_BR-BRZ__P Parameter: Tissue Value: Shoot Apices
  misc_feature: MA Experiment 20000441 PARAMETER Experiment Name: At_1uM_BR-BRZ__P Parameter: Treatment Value: 1uM BR vs. No Treatment
  misc_feature: MA Experiment ID: 20000443 Result: Up-regulated in Transcription
  misc_feature: MA Experiment 20000443 PARAMETER Experiment Name: At_1uM_BR-BRZ__P Parameter: Tissue Value: Shoot Apices
  misc_feature: MA Experiment 20000443 PARAMETER Experiment Name: At_1uM_BR-BRZ__P Parameter: Treatment Value: 1uM BRZ vs. No Treatment
  misc_feature: MA Experiment ID: 20000527 Result: Down-regulated in Transcription
  misc_feature: MA Experiment 20000527 PARAMETER Experiment Name: At_10percent_PEG_P Parameter: Age (day) Value: 20
  misc_feature: MA Experiment 20000527 PARAMETER Experiment Name: At_10percent_PEG_P Parameter: Organism Value: A. thaliana
  misc_feature: MA Experiment 20000527 PARAMETER Experiment Name: At_10percent_PEG_P Parameter: Plant Line Value: WS
  misc_feature: MA Experiment 20000527 PARAMETER Experiment Name: At_10percent_PEG_P Parameter: Timepoint (day) Value: 20
  misc_feature: MA Experiment 20000527 PARAMETER Experiment Name: At_10percent_PEG_P Parameter: Tissue Value: Whole Plant
  misc_feature: MA Experiment 20000527 PARAMETER Experiment Name: At_10percent_PEG_P Parameter: Treatment Value: 10percent PEG vs. No Treatment
  misc_feature: MA Experiment ID: 20000575 Result: Down-regulated in Transcription
  misc_feature: MA Experiment 20000575 PARAMETER Experiment Name: At_100uM_ABA_Mutants__P Parameter: Organism Value: A. thaliana
  misc_feature: MA Experiment 20000575 PARAMETER Experiment Name: At_100uM_ABA_Mutants__P Parameter: Plant Line Value: CS22
  misc_feature: MA Experiment 20000575 PARAMETER Experiment Name: At_100uM_ABA_Mutants__P Parameter: Timepoint (hr) Value: 6
  misc_feature: MA Experiment 20000575 PARAMETER Experiment Name: At_100uM_ABA_Mutants__P Parameter: Tissue Value: Whole Plant
  misc_feature: MA Experiment 20000575 PARAMETER Experiment Name: At_100uM_ABA_Mutants__P Parameter: Treatment Value: 1uM ABA vs. No Treatment
  misc_feature: MA Experiment ID: 20000606 Result: Up-regulated in Transcription
  misc_feature: MA Experiment 20000606 PARAMETER Experiment Name: At_CS8548_Mutant_P Parameter: Age (day) Value: 14
  misc_feature: MA Experiment 20000606 PARAMETER Experiment Name: At_CS8548_Mutant_P Parameter: Plant Line Value: CS8548 vs. wt
  misc_feature: MA Experiment 20000606 PARAMETER Experiment Name: At_CS8548_Mutant_P Parameter: Tissue Value: Whole Plant
  misc_feature: MA Experiment ID: 20000709 Result: Down-regulated in Transcription
  misc_feature: MA Experiment 20000709 PARAMETER Experiment Name: At_15mM_NH4NO3_L-to-H_P Parameter: Age (hr) Value: 14
  misc_feature: MA Experiment 20000709 PARAMETER Experiment Name: At_15mM_NH4NO3_L-to-H_P Parameter: Organism Value: A. thaliana
  misc_feature: MA Experiment 20000709 PARAMETER Experiment Name: At_15mM_NH4NO3_L-to-H_P Parameter: Plant Line Value: WS
  misc_feature: MA Experiment 20000709 PARAMETER Experiment Name: At_15mM_NH4NO3_L-to-H_P Parameter: Timepoint (hr) Value: 4
  misc_feature: MA Experiment 20000709 PARAMETER Experiment Name: At_15mM_NH4NO3_L-to-H_P Parameter: Tissue Value: Aerial
  misc_feature: MA Experiment 20000709 PARAMETER Experiment Name: At_15mM_NH4NO3_L-to-H_P Parameter: Treatment Value: 15mM NH4NO3 vs. 30mM Mannitol
  misc_feature: MA Experiment ID: 20001247 Result: Up-regulated in Transcription
  misc_feature: MA Experiment 20001247 PARAMETER Experiment Name: At_Far-red-induction_P Parameter: Age (day) Value: 7
  misc_feature: MA Experiment 20001247 PARAMETER Experiment Name: At_Far-red-induction_P Parameter: Light Value: Far-red vs. White
  misc_feature: MA Experiment 20001247 PARAMETER Experiment Name: At_Far-red-induction_P Parameter: Organism Value: A. thaliana
  misc_feature: MA Experiment 20001247 PARAMETER Experiment Name: At_Far-red-induction_P Parameter: Plant Line Value: Columbia
  misc_feature: MA Experiment 20001247 PARAMETER Experiment Name: At_Far-red-induction_P Parameter: Timepoint (hr) Value: 1
  misc_feature: MA Experiment 20001247 PARAMETER Experiment Name: At_Far-red-induction_P Parameter: Tissue Value: Whole Plant
  misc_feature: MA Experiment ID: 20001554 Result: Down-regulated in Transcription
  misc_feature: MA Experiment 20001554 PARAMETER Experiment Name: At_Drought_Soil_Dry_P Parameter: Age (day) Value: 21
  misc_feature: MA Experiment 20001554 PARAMETER Experiment Name: At_Drought_Soil_Dry_P Parameter: Organism Value: A. thaliana
  misc_feature: MA Experiment 20001554 PARAMETER Experiment Name: At_Drought_Soil_Dry_P Parameter: Plant Line Value: WS
  misc_feature: MA Experiment 20001554 PARAMETER Experiment Name: At_Drought_Soil_Dry_P Parameter: Post Timepoint (hr) Value: None
  misc_feature: MA Experiment 20001554 PARAMETER Experiment Name: At_Drought_Soil_Dry_P Parameter: Post-Treatment Value: None
  misc_feature: MA Experiment 20001554 PARAMETER Experiment Name: At_Drought_Soil_Dry_P Parameter: Timepoint (day) Value: 7
  misc_feature: MA Experiment 20001554 PARAMETER Experiment Name: At_Drought_Soil_Dry_P Parameter: Treatment Value: Drought vs. No Drought
  misc_feature: MA Experiment ID: 20001555 Result: Down-regulated in Transcription
  misc_feature: MA Experiment 20001555 PARAMETER Experiment Name: At_Drought_Soil_Dry_P Parameter: Age (day) Value: 24
  misc_feature: MA Experiment 20001555 PARAMETER Experiment Name: At_Drought_Soil_Dry_P Parameter: Organism Value: A. thaliana
  misc_feature: MA Experiment 20001555 PARAMETER Experiment Name: At_Drought_Soil_Dry_P Parameter: Plant Line Value: WS
  misc_feature: MA Experiment 20001555 PARAMETER Experiment Name: At_Drought_Soil_Dry_P Parameter: Post Timepoint (hr) Value: None
  misc_feature: MA Experiment 20001555 PARAMETER Experiment Name: At_Drought_Soil_Dry_P Parameter: Post-Treatment Value: None
  misc_feature: MA Experiment 20001555 PARAMETER Experiment Name: At_Drought_Soil_Dry_P Parameter: Timepoint (day) Value: 10
  misc_feature: MA Experiment 20001555 PARAMETER Experiment Name: At_Drought_Soil_Dry_P Parameter: Treatment Value: Drought vs. No Drought
  misc_feature: MA Experiment ID: 20001556 Result: Down-regulated in Transcription
  misc_feature: MA Experiment 20001556 PARAMETER Experiment Name: At_Drought_Soil_Dry_P Parameter: Age (day) Value: 26
  misc_feature: MA Experiment 20001556 PARAMETER Experiment Name: At_Drought_Soil_Dry_P Parameter: Organism Value: A. thaliana
  misc_feature: MA Experiment 20001556 PARAMETER Experiment Name: At_Drought_Soil_Dry_P Parameter: Plant Line Value: WS
  misc_feature: MA Experiment 20001556 PARAMETER Experiment Name: At_Drought_Soil_Dry_P Parameter: Post Timepoint (hr) Value: None
  misc_feature: MA Experiment 20001556 PARAMETER Experiment Name: At_Drought_Soil_Dry_P Parameter: Post-Treatment Value: None
  misc_feature: MA Experiment 20001556 PARAMETER Experiment Name: At_Drought_Soil_Dry_P Parameter: Timepoint (day) Value: 12
  misc_feature: MA Experiment 20001556 PARAMETER Experiment Name: At_Drought_Soil_Dry_P Parameter: Treatment Value: Drought vs. No Drought
  misc_feature: MA Experiment ID: 20001557 Result: Up-regulated in Transcription
  misc_feature: MA Experiment 20001557 PARAMETER Experiment Name: At_Drought_Soil_Dry_P Parameter: Age (day) Value: 27
  misc_feature: MA Experiment 20001557 PARAMETER Experiment Name: At_Drought_Soil_Dry_P Parameter: Organism Value: A. thaliana
  misc_feature: MA Experiment 20001557 PARAMETER Experiment Name: At_Drought_Soil_Dry_P Parameter: Plant Line Value: WS
  misc_feature: MA Experiment 20001557 PARAMETER Experiment Name: At_Drought_Soil_Dry_P Parameter: Post Timepoint (hr) Value: 3
  misc_feature: MA Experiment 20001557 PARAMETER Experiment Name: At_Drought_Soil_Dry_P Parameter: Post-Treatment Value: Re-Water vs. No Drought
  misc_feature: MA Experiment 20001557 PARAMETER Experiment Name: At_Drought_Soil_Dry_P Parameter: Timepoint (day) Value: 13
  misc_feature: MA Experiment 20001557 PARAMETER Experiment Name: At_Drought_Soil_Dry_P Parameter: Treatment Value: Drought vs. No Drought
  misc_feature: MA Experiment ID: 20001560 Result: Down-regulated in Transcription
  misc_feature: MA Experiment 20001560 PARAMETER Experiment Name: At_Drought_Soil_Dry_P Parameter: Age (day) Value: 28
  misc_feature: MA Experiment 20001560 PARAMETER Experiment Name: At_Drought_Soil_Dry_P Parameter: Organism Value: A. thaliana
  misc_feature: MA Experiment 20001560 PARAMETER Experiment Name: At_Drought_Soil_Dry_P Parameter: Plant Line Value: WS
  misc_feature: MA Experiment 20001560 PARAMETER Experiment Name: At_Drought_Soil_Dry_P Parameter: Post Timepoint (hr) Value: None
  misc_feature: MA Experiment 20001560 PARAMETER Experiment Name: At_Drought_Soil_Dry_P Parameter: Post-Treatment Value: None
  misc_feature: MA Experiment 20001560 PARAMETER Experiment Name: At_Drought_Soil_Dry_P Parameter: Timepoint (day) Value: 14
  misc_feature: MA Experiment 20001560 PARAMETER Experiment Name: At_Drought_Soil_Dry_P Parameter: Treatment Value: Drought vs. No Drought
  misc_feature: MA Experiment ID: 20001904 Result: Down-regulated in Transcription
  misc_feature: MA Experiment 20001904 PARAMETER Experiment Name: At_Drought_Reproduction_P Parameter: Age (day) Value: 37
  misc_feature: MA Experiment 20001904 PARAMETER Experiment Name: At_Drought_Reproduction_P Parameter: Organism Value: A. thaliana
  misc_feature: MA Experiment 20001904 PARAMETER Experiment Name: At_Drought_Reproduction_P Parameter: Plant Line Value: WS
  misc_feature: MA Experiment 20001904 PARAMETER Experiment Name: At_Drought_Reproduction_P Parameter: Timepoint (day) Value: 7
  misc_feature: MA Experiment 20001904 PARAMETER Experiment Name: At_Drought_Reproduction_P Parameter: Tissue Value: Rosettes
  misc_feature: MA Experiment 20001904 PARAMETER Experiment Name: At_Drought_Reproduction_P Parameter: Treatment Value: Drought vs. No Drought
  misc_feature: MA Experiment ID: 20001907 Result: Down-regulated in Transcription
  misc_feature: MA Experiment 20001907 PARAMETER Experiment Name: At_Drought_Reproduction_P Parameter: Age (day) Value: 37
  misc_feature: MA Experiment 20001907 PARAMETER Experiment Name: At_Drought_Reproduction_P Parameter: Organism Value: A. thaliana
  misc_feature: MA Experiment 20001907 PARAMETER Experiment Name: At_Drought_Reproduction_P Parameter: Plant Line Value: WS
  misc_feature: MA Experiment 20001907 PARAMETER Experiment Name: At_Drought_Reproduction_P Parameter: Timepoint (day) Value: 7
  misc_feature: MA Experiment 20001907 PARAMETER Experiment Name: At_Drought_Reproduction_P Parameter: Tissue Value: Siliques
  misc_feature: MA Experiment 20001907 PARAMETER Experiment Name: At_Drought_Reproduction_P Parameter: Treatment Value: Drought vs. No Drought
  misc_feature: MA Experiment ID: 20001911 Result: Down-regulated in Transcription
  misc_feature: MA Experiment 20001911 PARAMETER Experiment Name: At_Drought_Reproduction_P Parameter: Age (day) Value: 40
  misc_feature: MA Experiment 20001911 PARAMETER Experiment Name: At_Drought_Reproduction_P Parameter: Organism Value: A. thaliana
  misc_feature: MA Experiment 20001911 PARAMETER Experiment Name: At_Drought_Reproduction_P Parameter: Plant Line Value: WS
  misc_feature: MA Experiment 20001911 PARAMETER Experiment Name: At_Drought_Reproduction_P Parameter: Timepoint (day) Value: 10
  misc_feature: MA Experiment 20001911 PARAMETER Experiment Name: At_Drought_Reproduction_P Parameter: Tissue Value: Flowers
  misc_feature: MA Experiment 20001911 PARAMETER Experiment Name: At_Drought_Reproduction_P Parameter: Treatment Value: Drought vs. No Drought
atccctctcgacacacacacttctctcctaaaacccaaaaatggtggctgcaagtcccggtggctcaatgaagagcttaaccatccaaatcctaaccggaagatggttcatgttctttggaagtctcttaatcatgtcgacagctggagccacttacatgttcggtatctactcaggcgatatcaaggaaaccttaggctacgaccaaaccactcttaatctcctaagtttcttcaaagatctcggagccaacgttggagtcctcgcgggtctactcaatgaggtaactcctccttggttcatcctcttgatcggagccatccttaacttctttggatacttcatgatttggctcgccgtcacggaacggatctcgaaacctcaagtttggcacatgtgtctctatatctgcgttggagccaactcgcagtcgttcgctaataccggatctctcgtcacgtgcgttaagaacttcccggagtcacgtggggttgtcttggggattctcaaaggctacgttggtcttagtggcgccattattacacagctctaccgtgccttttatggtgaagacacaaaagagctcatcttgatgattggttggttgccggctatagtctcgtttgcgtttttgagaacgataagaataatgaaagtgaaaagacagacaaacgaactaaaggtgttctataacttcctctacatatcgctcgggcttgcgacgtttctcatggtggtcatcatcatcaacaaactctcgggctttacacaaagcgagtttggaggtagcgccgcggtagtgatcgtcttacttcttttgcccattatagtcgtcatcttggaagagaagaagctttggaaggagaaacaagtcgccttaaacgatccagcacccatcaatgtcgtaactgagaaacccaagttagattcatcagagttcaaagatgatgatggtgaagagtcaaaggaggtagtggagaaggtgaaaacaccgtcgtgttggacgactgtgtttaatccaccggagagaggagatgactatacaatcttgcaagcgttgtttagcgtagacatgttgattttgttcttagcaacgatatgtggcgtaggagggactttgacggcgatagacaatttgggtcaaatcggaaactcgttgggttacccgaagagaagcgtaagcacgtttgtgtcactcgtaagcatatggaattactatggtcgtgtggtttcaggtgtggtctctgagatcttcttgatcaaatacaaatttccaaggcctttaatgctcacgatggtcctcctcttgtcctgcgcgggtcacctcctcatcgcctttaatgtccccggtggactttatgtcgcatcggtcatcatagggttttgttttggtgcgcaatggcctcttctatttgctataatatctgagattttcgggcttaagtactactcgacattgtataacttcgggtcagtcgcgagcccgatcgggtcttacttgctaaacgttcgggtcgcagggtatttgtacgacgtggaggcgggtaagcaatataaggcattagggaaaacgagagtagaagggcaagatttgaattgcataggcacgtcttgttttaagttgtcttttataataattgccgctgtaactttgttcggtgtattggtctcgatggttttggtgatccggaccaagaagttttacaagagtgatatctacaaaaagtttagagaaaaagcgttagctgccgagatggagatggcagcgccggctgcagccagatctaccgtggctaaggaagacaaggatgatgttaaaggcaaagtaataggaaaaggagggtaaactatttagtagatgattgttacagatactagataacaaaagatggtcaagtattttgtaaacacttttatatatctccttaatgtgaaacctatcttttattaatagcattttgttttg

SEQ ID NO: 96657 - protein, 601 aa, Arabidopsis thaliana
  peptide (1)..(601): Ceres Seq. ID no. 12734253
  misc_feature (21)..(159): Pfam Name: Sugar (and other) transporter Pfam Description: Sugar (and other) transporter
  misc_feature (15)..(574): Homolog of NCBI NO: 15226338 NR Description: nodulin-like protein; protein id: At2g28120.1, by cDNA: gi_16209713, supported by cDNA: gi_17064921, supported
  misc_feature (16)..(571): Homolog of NCBI NO: 34394606 NR Description: putative nodule-specific protein [Oryza sativa
  misc_feature (9)..(577): Homolog of NCBI NO: 3329366 NR Description: nodule-specific protein Nlj70 [Lotus japonicus]
  misc_feature (17)..(601): Homolog of NCBI NO: 31712079 NR Description: hypothetical protein [Oryza sativa (japonica
  misc_feature (16)..(573): Homolog of NCBI NO: 37531482 NR Description: hypothetical protein [Oryza sativa (japonica group)] >gi|19881621|gb|AAM01022.1| Hypothetical protein [Oryza >gi|31430413|gb|AAP52330.1| hypothetical protein [Oryza sativa
  misc_feature (216)..(594): Homolog of NCBI NO: 34897160 NR Description: putative nodule-specific protein [Oryza sativa
  misc_feature (231)..(564): Homolog of NCBI NO: 15241312 NR Description: nodulin-like protein; protein id: At5g14120.1
  misc_feature (15)..(267): Homolog of NCBI NO: 15241312 NR Description: nodulin-like protein; protein id: At5g14120.1
  misc_feature (13)..(266): Homolog of NCBI NO: 15221898 NR Description: hypothetical protein; protein id: At1g18940.1 thaliana] >gi|8778273|gb|AAF79282.1|AC068602_5 F14D16.8
  misc_feature (336)..(562): Homolog of NCBI NO: 15221898 NR Description: hypothetical protein; protein id: At1g18940.1 thaliana] >gi|8778273|gb|AAF79282.1|AC068602_5 F14D16.8
MVAASPGGSMKSLTIQILTGRWFMFFGSLLIMSTAGATYMFGIYSGDIKETLGYDQTTLNLLSFFKDLGANVGVLAGLLNEVTPPWFILLIGAILNFFGYFMIWLAVTERISKPQVWHMCLYICVGANSQSFANTGSLVTCVKNFPESRGVVLGILKGYVGLSGAIITQLYRAFYGEDTKELILMIGWLPAIVSFAFLRTIRIMKVKRQTNELKVFYNFLYISLGLATFLMVVIIINKLSGFTQSEFGGSAAVVIVLLLLPIIVVILEEKKLWKEKQVALNDPAPINVVTEKPKLDSSEFKDDDGEESKEVVEKVKTPSCWTTVFNPPERGDDYTILQALFSVDMLILFLATICGVGGTLTAIDNLGQIGNSLGYPKRSVSTFVSLVSIWNYYGRVVSGVVSEIFLIKYKFPRPLMLTMVLLLSCAGHLLIAFNVPGGLYVASVIIGFCFGAQWPLLFAIISEIFGLKYYSTLYNFGSVASPIGSYLLNVRVAGYLYDVEAGKQYKALGKTRVEGQDLNCIGTSCFKLSFIIIAAVTLFGVLVSMVLVIRTKKFYKSDIYKKFREKALAAEMEMAAPAAARSTVAKEDKDDVKGKVIGKGG

SEQ ID NO: 96658 - protein, 592 aa, Arabidopsis thaliana
  peptide (1)..(592): Ceres Seq. ID no. 12734254
  misc_feature (12)..(150): Pfam Name: Sugar (and other) transporter Pfam Description: Sugar (and other) transporter
  misc_feature (6)..(565): Homolog of NCBI NO: 15226338 NR Description: nodulin-like protein; protein id: At2g28120.1, by cDNA: gi_16209713, supported by cDNA: gi_17064921, supported
  misc_feature (7)..(562): Homolog of NCBI NO: 34394606 NR Description: putative nodule-specific protein [Oryza sativa
  misc_feature (1)..(568): Homolog of NCBI NO: 3329366 NR Description: nodule-specific protein Nlj70 [Lotus japonicus]
  misc_feature (8)..(592): Homolog of NCBI NO: 31712079 NR Description: hypothetical protein [Oryza sativa (japonica
  misc_feature (7)..(564): Homolog of NCBI NO: 37531482 NR Description: hypothetical protein [Oryza sativa (japonica group)] >gi|19881621|gb|AAM01022.1| Hypothetical protein [Oryza >gi|31430413|gb|AAP52330.1| hypothetical protein [Oryza sativa
  misc_feature (207)..(585): Homolog of NCBI NO: 34897160 NR Description: putative nodule-specific protein [Oryza sativa
  misc_feature (222)..(555): Homolog of NCBI NO: 15241312 NR Description: nodulin-like protein; protein id: At5g14120.1
  misc_feature (6)..(258): Homolog of NCBI NO: 15241312 NR Description: nodulin-like protein; protein id: At5g14120.1
  misc_feature (4)..(257): Homolog of NCBI NO: 15221898 NR Description: hypothetical protein; protein id: At1g18940.1 thaliana] >gi|8778273|gb|AAF79282.1|AC068602_5 F14D16.8
  misc_feature (327)..(553): Homolog of NCBI NO: 15221898 NR Description: hypothetical protein; protein id: At1g18940.1 thaliana] >gi|8778273|gb|AAF79282.1|AC068602_5 F14D16.8
MKSLTIQILTGRWFMFFGSLLIMSTAGATYMFGIYSGDIKETLGYDQTTLNLLSFFKDLGANVGVLAGLLNEVTPPWFILLIGAILNFFGYFMIWLAVTERISKPQVWHMCLYICVGANSQSFANTGSLVTCVKNFPESRGVVLGILKGYVGLSGAIITQLYRAFYGEDTKELILMIGWLPAIVSFAFLRTIRIMKVKRQTNELKVFYNFLYISLGLATFLMVVIIINKLSGFTQSEFGGSAAVVIVLLLLPIIVVILEEKKLWKEKQVALNDPAPINVVTEKPKLDSSEFKDDDGEESKEVVEKVKTPSCWTTVFNPPERGDDYTILQALFSVDMLILFLATICGVGGTLTAIDNLGQIGNSLGYPKRSVSTFVSLVSIWNYYGRVVSGVVSEIFLIKYKFPRPLMLTMVLLLSCAGHLLIAFNVPGGLYVASVIIGFCFGAQWPLLFAIISEIFGLKYYSTLYNFGSVASPIGSYLLNVRVAGYLYDVEAGKQYKALGKTRVEGQDLNCIGTSCFKLSFIIIAAVTLFGVLVSMVLVIRTKKFYKSDIYKKFREKALAAEMEMAAPAAARSTVAKEDKDDVKGKVIGKGG

SEQ ID NO: 96659 - protein, 578 aa, Arabidopsis thaliana
  peptide (1)..(578): Ceres Seq. ID no. 12734255
  misc_feature (1)..(136): Pfam Name: Sugar (and other) transporter Pfam Description: Sugar (and other) transporter
  misc_feature (1)..(551): Homolog of NCBI NO: 15226338 NR Description: nodulin-like protein; protein id: At2g28120.1, by cDNA: gi_16209713, supported by cDNA: gi_17064921, supported
  misc_feature (1)..(548): Homolog of NCBI NO: 34394606 NR Description: putative nodule-specific protein [Oryza sativa
  misc_feature (1)..(554): Homolog of NCBI NO: 3329366 NR Description: nodule-specific protein Nlj70 [Lotus japonicus]
  misc_feature (1)..(578): Homolog of NCBI NO: 31712079 NR Description: hypothetical protein [Oryza sativa (japonica
  misc_feature (1)..(550): Homolog of NCBI NO: 37531482 NR Description: hypothetical protein [Oryza sativa (japonica group)] >gi|19881621|gb|AAM01022.1| Hypothetical protein [Oryza >gi|31430413|gb|AAP52330.1| hypothetical protein [Oryza sativa
  misc_feature (193)..(571): Homolog of NCBI NO: 34897160 NR Description: putative nodule-specific protein [Oryza sativa
  misc_feature (208)..(541): Homolog of NCBI NO: 15241312 NR Description: nodulin-like protein; protein id: At5g14120.1
  misc_feature (1)..(244): Homolog of NCBI NO: 15241312 NR Description: nodulin-like protein; protein id: At5g14120.1
  misc_feature (1)..(243): Homolog of NCBI NO: 15221898 NR Description: hypothetical protein; protein id: At1g18940.1 thaliana] >gi|8778273|gb|AAF79282.1|AC068602_5 F14D16.8
  misc_feature (313)..(539): Homolog of NCBI NO: 15221898 NR Description: hypothetical protein; protein id: At1g18940.1 thaliana] >gi|8778273|gb|AAF79282.1|AC068602_5 F14D16.8
MFFGSLLIMSTAGATYMFGIYSGDIKETLGYDQTTLNLLSFFKDLGANVGVLAGLLNEVTPPWFILLIGAILNFFGYFMIWLAVTERISKPQVWHMCLYICVGANSQSFANTGSLVTCVKNFPESRGVVLGILKGYVGLSGAIITQLYRAFYGEDTKELILMIGWLPAIVSFAFLRTIRIMKVKRQTNELKVFYNFLYISLGLATFLMVVIIINKLSGFTQSEFGGSAAVVIVLLLLPIIVVILEEKKLWKEKQVALNDPAPINVVTEKPKLDSSEFKDDDGEESKEVVEKVKTPSCWTTVFNPPERGDDYTILQALFSVDMLILFLATICGVGGTLTAIDNLGQIGNSLGYPKRSVSTFVSLVSIWNYYGRVVSGVVSEIFLIKYKFPRPLMLTMVLLLSCAGHLLIAFNVPGGLYVASVIIGFCFGAQWPLLFAIISEIFGLKYYSTLYNFGSVASPIGSYLLNVRVAGYLYDVEAGKQYKALGKTRVEGQDLNCIGTSCFKLSFIIIAAVTLFGVLVSMVLVIRTKKFYKSDIYKKFREKALAAEMEMAAPAAARSTVAKEDKDDVKGKVIGKGG

SEQ ID NO: 96660 - DNA, 2016 bp, Arabidopsis thaliana
  misc_feature (1)..(2016): Ceres Seq. ID no. 12734256
  misc_feature: MA Experiment ID: 20000307 Result: Up-regulated in Transcription
  misc_feature: MA Experiment 20000307 PARAMETER Experiment Name: At_Germinating_Seeds_Sub_P Parameter: Age (hr) Value: 24 vs. 0
  misc_feature: MA Experiment 20000307 PARAMETER Experiment Name: At_Germinating_Seeds_Sub_P Parameter: Organism Value: A. thaliana
  misc_feature: MA Experiment 20000307 PARAMETER Experiment Name: At_Germinating_Seeds_Sub_P Parameter: Plant Line Value: WS
  misc_feature: MA Experiment 20000307 PARAMETER Experiment Name: At_Germinating_Seeds_Sub_P Parameter: Tissue Value: Germinating Seeds
  misc_feature: MA Experiment ID: 20000314 Result: Down-regulated in Transcription
  misc_feature: MA Experiment 20000314 PARAMETER Experiment Name: At_14day_Shoots-Roots_Sub_P Parameter: Age (day) Value: 14
  misc_feature: MA Experiment 20000314 PARAMETER Experiment Name: At_14day_Shoots-Roots_Sub_P Parameter: Organism Value: A. thaliana
  misc_feature: MA Experiment 20000314 PARAMETER Experiment Name: At_14day_Shoots-Roots_Sub_P Parameter: Plant Line Value: WS
  misc_feature: MA Experiment 20000314 PARAMETER Experiment Name: At_14day_Shoots-Roots_Sub_P Parameter: Tissue Value: Roots vs. Whole Plant
  misc_feature: MA Experiment ID: 20000327 Result: Down-regulated in Transcription
  misc_feature: MA Experiment 20000327 PARAMETER Experiment Name: At_42deg_Heat_Sub_P Parameter: Age (day) Value: 14
  misc_feature: MA Experiment 20000327 PARAMETER Experiment Name: At_42deg_Heat_Sub_P Parameter: Organism Value: A. thaliana
  misc_feature: MA Experiment 20000327 PARAMETER Experiment Name: At_42deg_Heat_Sub_P Parameter: Plant Line Value: WS
  misc_feature: MA Experiment 20000327 PARAMETER Experiment Name: At_42deg_Heat_Sub_P Parameter: Temperature (deg C) Value: 42 vs. 22
  misc_feature: MA Experiment 20000327 PARAMETER Experiment Name: At_42deg_Heat_Sub_P Parameter: Timepoint (hr) Value: 1
  misc_feature: MA Experiment 20000327 PARAMETER Experiment Name: At_42deg_Heat_Sub_P Parameter: Tissue Value: Aerial
  misc_feature: MA Experiment ID: 20000328 Result: Down-regulated in Transcription
  misc_feature: MA Experiment 20000328 PARAMETER Experiment Name: At_42deg_Heat_Sub_P Parameter: Age (day) Value: 14
  misc_feature: MA Experiment 20000328 PARAMETER Experiment Name: At_42deg_Heat_Sub_P Parameter: Organism Value: A. thaliana
  misc_feature: MA Experiment 20000328 PARAMETER Experiment Name: At_42deg_Heat_Sub_P Parameter: Plant Line Value: WS
  misc_feature: MA Experiment 20000328 PARAMETER Experiment Name: At_42deg_Heat_Sub_P Parameter: Temperature (deg C) Value: 42 vs. 22
  misc_feature: MA Experiment 20000328 PARAMETER Experiment Name: At_42deg_Heat_Sub_P Parameter: Timepoint (hr) Value: 6
  misc_feature: MA Experiment 20000328 PARAMETER Experiment Name: At_42deg_Heat_Sub_P Parameter: Tissue Value: Aerial
  misc_feature: MA Experiment ID: 20000329 Result: Up-regulated in Transcription
  misc_feature: MA Experiment 20000329 PARAMETER Experiment Name: At_4deg_Cold_Sub_P Parameter: Age (day) Value: 14
  misc_feature: MA Experiment 20000329 PARAMETER Experiment Name: At_4deg_Cold_Sub_P Parameter: Organism Value: A. thaliana
  misc_feature: MA Experiment 20000329 PARAMETER Experiment Name: At_4deg_Cold_Sub_P Parameter: Plant Line Value: WS
  misc_feature: MA Experiment 20000329 PARAMETER Experiment Name: At_4deg_Cold_Sub_P Parameter: Temperature (deg C) Value: 4 vs. 22
  misc_feature: MA Experiment 20000329 PARAMETER Experiment Name: At_4deg_Cold_Sub_P Parameter: Timepoint (hr) Value: 6
  misc_feature: MA Experiment 20000329 PARAMETER Experiment Name: At_4deg_Cold_Sub_P Parameter: Tissue Value: Aerial
  misc_feature: MA Experiment ID: 20000440 Result: Up-regulated in Transcription
  misc_feature: MA Experiment 20000440 PARAMETER Experiment Name: At_Closed-Flower__Sub_P Parameter: Tissue Value: Closed Flower vs. Whole Plant
acgcgtgagatataaaagaagatcctttgcagtttctctgttcttgctccttcttcttcatctccctttattgatactgtctgagtaataataaaaattcactctttttgtcttctcaagacagatttcaaaatagaaatcattctccttttttctttttgaaaatttcgagtgatttaaggagggaaaataaagacagaaacaagaacaaaagcatcgtttgcgaataagacttctcgtactctgttttcttttctcgtgttcttatgacagatttataaaaaagattaggtttttgtcttgtcttggcgataatgcctagagagtgttttaaagatttgatttaaatactcttttatgttaactacgatgcaaagagtacacaacaaaccgattgattctatcggaggttttaagcatttggtaaaacagagtaacggcggtgacggtggagtgacggcgacggatatgcaagaaccgagcatcgagactgataagcttagctacgagattttctctattctcgaaagcaagtttcttttcgggtatgatgatgacctgaagcttatggaatcaagaagcagagacccgagtccagagcaagaaacggcatcaccggcgatggtggaagctttaaacggcgttgttccgggtacagttaagaaccagagaggtaaagtttgtgttttgagtatcgatagtggtggaatgagagggattatacctggaaaagctttggcttatctggaacatgctctgaaatcgaaatcgggtgacccgaatgctcgaatcgctgattacttcgacgtagcttccggttccggtatcggtgggattttcacggcgatgctttttgcgtcgagcgatggtaaccgtccgatcttcaaagcggaagacacgtggcggtttttagctatgaaaggtaaaagcttttacaacaaatcaccaccggggatactaaacagggttatgaaaaccgggtcgggtggttcgggtgggtcaggttcgaagcttgagaaagcgatgaaggagtctttcgaagagcttacgcttaaggatacgcttaaaccggttttgattccttgttacgacctcacgagctctgcaccgttcttgttctcacgtgctgatgcgttggaaacggacggttatgattttaagctgtgggaagtttgtagagctacttgggctgagccaggagtgtttgagccggtggagatgagatcagttgatggtaagacacggtgtgtagctgttgatggtggtttagcaatgagtaatccaacggctgcagcgattactcatgtgttgcataataagcaagagtttccttttgttagaggtgttgaggatttgcttgtgttgtcacttggtacgggacagttggttgatgttaagtatgattgtgataaggttatgaagtggaaggctaagcattgggctcgacctgcggttcggatttctgctgatggagcagctgatactgtggatcaggctgtttccatggcgtttggtcagtgtaggaggagtaactacgtccgtattcaggcgaatggatcaagctttggtccgtgcaaaccaaacatagacacagatgcgagtccaagcaatgtgaatatgcttgtgggagtagcagaggagatgctgaagcagaagaatgcagagtctgttctgtttggtggtaagaaaatcaatgaagaaagcaattatgagaagctggattggttagccggtgaactagtgctagaacaccagaggaggagttgtagaatcgctcccactgtagcgttcaagcaatccggcgacagaagagtcgatcaacagaccattttcaaggatattgattgtatgttttgaatatttttaaattgtatagatttgtgtttaagtccagaagaaagcaacattatattcgaattaggctttttattaaatcttaaagatatgtgtaatttttgttttactgaattgttattttctattgactctaaaagagcttcgtcaacaaaattttgg

SEQ ID NO: 96661 - protein, 499 aa, Arabidopsis thaliana
  peptide (1)..(499): Ceres Seq. ID no. 12734257
  misc_feature (111)..(314): Pfam Name: Patatin-like phospholipase Pfam Description: Patatin-like phospholipase
  misc_feature (1)..(499): Homolog of NCBI NO: 15225054 NR Description: patatin family; protein id: At2g39220.1, by cDNA: gi_17065143 [Arabidopsis thaliana]
  misc_feature (5)..(495): Homolog of NCBI NO: 15233136 NR Description: patatin-related; protein id: At3g54950.1
  misc_feature (78)..(481): Homolog of NCBI NO: 30688454 NR Description: patatin-related [Arabidopsis thaliana]
  misc_feature (78)..(481): Homolog of NCBI NO: 7486230 NR Description: hypothetical protein F27B13.40 - Arabidopsis >gi|4914404|emb|CAB43655.1| putative protein [Arabidopsis >gi|7269879|emb|CAB79738.1| putative protein [Arabidopsis
  misc_feature (43)..(483): Homolog of NCBI NO: 34897124 NR Description: putative lipid acyl hydrolase [Oryza sativa]
  misc_feature (105)..(477): Homolog of NCBI NO: 34899642 NR Description: contains ESTs
  misc_feature (46)..(64): Homolog of NCBI NO: 34899642 NR Description: contains ESTs
  misc_feature (107)..(404): Homolog of NCBI NO: 11357489 NR Description: hypothetical protein F16M2.50 - Arabidopsis >gi|7523402|emb|CAB86421.1| putative protein [Arabidopsis
  misc_feature (107)..(404): Homolog of NCBI NO: 18412659 NR Description: putative protein; protein id: At3g63200.1, by cDNA: gi_15912226 [Arabidopsis thaliana] AT3g63200/F16M2_50 [Arabidopsis thaliana]
  misc_feature (412)..(462): Homolog of NCBI NO: 11357489 NR Description: hypothetical protein F16M2.50 - Arabidopsis >gi|7523402|emb|CAB86421.1| putative protein [Arabidopsis
MLTTMQRVHNKPIDSIGGFKHLVKQSNGGDGGVTATDMQEPSIETDKLSYEIFSILESKFLFGYDDDLKLMESRSRDPSPEQETASPAMVEALNGVVPGTVKNQRGKVCVLSIDSGGMRGIIPGKALAYLEHALKSKSGDPNARIADYFDVASGSGIGGIFTAMLFASSDGNRPIFKAEDTWRFLAMKGKSFYNKSPPGILNRVMKTGSGGSGGSGSKLEKAMKESFEELTLKDTLKPVLIPCYDLTSSAPFLFSRADALETDGYDFKLWEVCRATWAEPGVFEPVEMRSVDGKTRCVAVDGGLAMSNPTAAAITHVLHNKQEFPFVRGVEDLLVLSLGTGQLVDVKYDCDKVMKWKAKHWARPAVRISADGAADTVDQAVSMAFGQCRRSNYVRIQANGSSFGPCKPNIDTDASPSNVNMLVGVAEEMLKQKNAESVLFGGKKINEESNYEKLDWLAGELVLEHQRRSCRIAPTVAFKQSGDRRVDQQTIFKDIDCMF

SEQ ID NO: 96662 - protein, 495 aa, Arabidopsis thaliana
  peptide (1)..(495): Ceres Seq. ID no. 12734258
  misc_feature (107)..(310): Pfam Name: Patatin-like phospholipase Pfam Description: Patatin-like phospholipase
  misc_feature (1)..(495): Homolog of NCBI NO: 15225054 NR Description: patatin family; protein id: At2g39220.1, by cDNA: gi_17065143 [Arabidopsis thaliana]
  misc_feature (1)..(491): Homolog of NCBI NO: 15233136 NR Description: patatin-related; protein id: At3g54950.1
  misc_feature (74)..(477): Homolog of NCBI NO: 30688454 NR Description: patatin-related [Arabidopsis thaliana]
  misc_feature (74)..(477): Homolog of NCBI NO: 7486230 NR Description: hypothetical protein F27B13.40 - Arabidopsis >gi|4914404|emb|CAB43655.1| putative protein [Arabidopsis >gi|7269879|emb|CAB79738.1| putative protein [Arabidopsis
  misc_feature (39)..(479): Homolog of NCBI NO: 34897124 NR Description: putative lipid acyl hydrolase [Oryza sativa]
  misc_feature (101)..(473): Homolog of NCBI NO: 34899642 NR Description: contains ESTs
  misc_feature (42)..(60): Homolog of NCBI NO: 34899642 NR Description: contains ESTs
  misc_feature (103)..(400): Homolog of NCBI NO: 11357489 NR Description: hypothetical protein F16M2.50 - Arabidopsis >gi|7523402|emb|CAB86421.1| putative protein [Arabidopsis
  misc_feature (103)..(400): Homolog of NCBI NO: 18412659 NR Description: putative protein; protein id: At3g63200.1, by cDNA: gi_15912226 [Arabidopsis thaliana] AT3g63200/F16M2_50 [Arabidopsis thaliana]
  misc_feature (408)..(458): Homolog of NCBI NO: 11357489 NR Description: hypothetical protein F16M2.50 - Arabidopsis >gi|7523402|emb|CAB86421.1| putative protein [Arabidopsis
MQRVHNKPIDSIGGFKHLVKQSNGGDGGVTATDMQEPSIETDKLSYEIFSILESKFLFGYDDDLKLMESRSRDPSPEQETASPAMVEALNGVVPGTVKNQRGKVCVLSIDSGGMRGIIPGKALAYLEHALKSKSGDPNARIADYFDVASGSGIGGIFTAMLFASSDGNRPIFKAEDTWRFLAMKGKSFYNKSPPGILNRVMKTGSGGSGGSGSKLEKAMKESFEELTLKDTLKPVLIPCYDLTSSAPFLFSRADALETDGYDFKLWEVCRATWAEPGVFEPVEMRSVDGKTRCVAVDGGLAMSNPTAAAITHVLHNKQEFPFVRGVEDLLVLSLGTGQLVDVKYDCDKVMKWKAKHWARPAVRISADGAADTVDQAVSMAFGQCRRSNYVRIQANGSSFGPCKPNIDTDASPSNVNMLVGVAEEMLKQKNAESVLFGGKKINEESNYEKLDWLAGELVLEHQRRSCRIAPTVAFKQSGDRRVDQQTIFKDIDCMF

SEQ ID NO: 96663 - protein, 462 aa, Arabidopsis thaliana
  peptide (1)..(462): Ceres Seq. ID no. 12734259
  misc_feature (74)..(277): Pfam Name: Patatin-like phospholipase Pfam Description: Patatin-like phospholipase
  misc_feature (1)..(462): Homolog of NCBI NO: 15225054 NR Description: patatin family; protein id: At2g39220.1, by cDNA: gi_17065143 [Arabidopsis thaliana]
  misc_feature (1)..(458): Homolog of NCBI NO: 15233136 NR Description: patatin-related; protein id: At3g54950.1
  misc_feature (41)..(444): Homolog of NCBI NO: 30688454 NR Description: patatin-related [Arabidopsis thaliana]
  misc_feature (41)..(444): Homolog of NCBI NO: 7486230 NR Description: hypothetical protein F27B13.40 - Arabidopsis >gi|4914404|emb|CAB43655.1| putative protein [Arabidopsis >gi|7269879|emb|CAB79738.1| putative protein [Arabidopsis
  misc_feature (6)..(446): Homolog of NCBI NO: 34897124 NR Description: putative lipid acyl hydrolase [Oryza sativa]
  misc_feature (68)..(440): Homolog of NCBI NO: 34899642 NR Description: contains ESTs
  misc_feature (9)..(27): Homolog of NCBI NO: 34899642 NR Description: contains ESTs
  misc_feature (70)..(367): Homolog of NCBI NO: 11357489 NR Description: hypothetical protein F16M2.50 - Arabidopsis >gi|7523402|emb|CAB86421.1| putative protein [Arabidopsis
  misc_feature (70)..(367): Homolog of NCBI NO: 18412659 NR Description: putative protein; protein id: At3g63200.1, by cDNA: gi_15912226 [Arabidopsis thaliana] AT3g63200/F16M2_50 [Arabidopsis thaliana]
  misc_feature (375)..(425): Homolog of NCBI NO: 11357489 NR Description: hypothetical protein F16M2.50 - Arabidopsis >gi|7523402|emb|CAB86421.1| putative protein [Arabidopsis
MQEPSIETDKLSYEIFSILESKFLFGYDDDLKLMESRSRDPSPEQETASPAMVEALNGVVPGTVKNQRGKVCVLSIDSGGMRGIIPGKALAYLEHALKSKSGDPNARIADYFDVASGSGIGGIFTAMLFASSDGNRPIFKAEDTWRFLAMKGKSFYNKSPPGILNRVMKTGSGGSGGSGSKLEKAMKESFEELTLKDTLKPVLIPCYDLTSSAPFLFSRADALETDGYDFKLWEVCRATWAEPGVFEPVEMRSVDGKTRCVAVDGGLAMSNPTAAAITHVLHNKQEFPFVRGVEDLLVLSLGTGQLVDVKYDCDKVMKWKAKHWARPAVRISADGAADTVDQAVSMAFGQCRRSNYVRIQANGSSFGPCKPNIDTDASPSNVNMLVGVAEEMLKQKNAESVLFGGKKINEESNYEKLDWLAGELVLEHQRRSCRIAPTVAFKQSGDRRVDQQTIFKDIDCMF

SEQ ID NO: 96664 - DNA, 2604 bp, Arabidopsis thaliana
  misc_feature (1)..(2604): Ceres Seq. ID no. 12734260
  misc_feature: MA Experiment ID: 20000307 Result: Down-regulated in Transcription
  misc_feature: MA Experiment 20000307 PARAMETER Experiment Name: At_Germinating_Seeds_Sub_P Parameter: Age (hr) Value: 24 vs. 0
  misc_feature: MA Experiment 20000307 PARAMETER Experiment Name: At_Germinating_Seeds_Sub_P Parameter: Organism Value: A. thaliana
  misc_feature: MA Experiment 20000307 PARAMETER Experiment Name: At_Germinating_Seeds_Sub_P Parameter: Plant Line Value: WS
  misc_feature: MA Experiment 20000307 PARAMETER Experiment Name: At_Germinating_Seeds_Sub_P Parameter: Tissue Value: Germinating Seeds
atgactactttcatggtttccaaacgatttcgtccacctatttttctccatcgttttataaatccaaaacccatttcttcacagactcgatttctccatccaccggataatcaaagtcgagacatttccgattccactactgaaaccatctcaacactagaatttcctcataaaacctctgtaccaaatcattcacctttaacttcaacctctgagactgagaatcatgtggacgacgctcgtgtaatcgaagtgcttctaggtcgtagaaacgacccagtctcagctcttcagtactgcaattgggtcaagcctttacatcgtctctgtgaaggtggagatgtcttctgggtacttattcatatccttctaagctctattcacactcacgatcgtgccagcaatttgctcgtaatgttcgtttcgaacaatccaacgctaattccaaacgtaatggttaacaatttggttgattcgtctaaacggtttggttttgaacttaccccacgagctttcaattacttgttgaatgcttatattcgaaacaagcgaatggattatgctgtagattgctttggtttgatggtggatcgaaaggttgttccttttgtgccatatgtgaacaatgttctaagttctttagttagaagtaatttgatagatgaagctaaggagatttataataagatggttttaattggtgttgctggtgataatgtaactacacagttgttgatgcgagctagtttgagagagaggaagcctgaagaggctgtgaaaattttcaggagagttatgagtagaggagcagaaccagatggtttgttgtttagtcttgctgttcaagctgcttgtaagacgccagatttggttatggctttggatttgttgagggaaatgagggggaagttaggtgtcccggcctcgcaggaaacgtatactagtgtgattgtggcttttgtgaaggaaggtaatatggaggaggcagtgagggttatggatgagatggttggttttgggataccgatgagtgtaattgctgcaacgagtttggttaatggatattgcaaggggaatgagttaggtaaggctttggatttgtttaatagaatggaggaggaagggctggctccggacaaagttatgttttcggttatggtcgaatggttttgtaagaatatggagatggagaaagctattgagttttatatgaggatgaaatctgtaaggattgctccttcatctgttcttgtccatacaatgatccaagggtgtttgaaagctgagtcaccagaagcggcgctagaaatctttaacgacagttttgaaagctggattgcgcatggttttatgtgtaacaagatttttttattgttttgcaagcaaggtaaagtcgatgctgcaacaagctttttgaagatgatggagcaaaaagggattgagccgaatgtagttttttacaataacatgatgcttgctcattgcagaatgaaaaacatggacttggctcgttcaatattttctgaaatgctggaaaagggtctagagccgaataacttcacttattccatcttgatcgatggatttttcaagaataaggatgaacagaatgcttgggatgtcatcaatcagatgaatgcttccaatttcgaagctaatgaagtcatatataatacgatcatcaatggtttgtgtaaagttggtcagacgtctaaagccaaagagatgttgcaaaatttgatcaaagaaaagcgctattccatgagttgcacgagttacaatagcatcatagatggattcgtcaaagtaggtgatactgattccgctgtcgaaacttacagagagatgagtgaaaacggtaaatctccaaatgttgtaaccttcaccagcttgatcaatggattctgcaaaagtaaccgaatggatctagctcttgaaatgacacacgaaatgaaaagcatggagttgaaacttgatcttccagcctacggtgcactaatagacgggttctgtaaaaagaatgacatgaaaaccgcatatactttgttctctgaactgccggaactaggattgatgccaaatgtgtctgtctacaatagtttgatttcaggattccgtaatctgggaaagatggatgcagcgattgacttgtacaagaaaatggtgaatgatggaataagttgtgatctgtttacatatacaacgatgatcgacgggttgttaaaagatggaaatataaatcttgcctctgatttgtactcggagttgcttgatttaggtattgtccctgatgaaatcttgcacatggtacttgtcaacggtcttagtaagaagggacagtttttgaaagctagcaagatgttagaggagatgaagaagaaagatgtgactccaaatgtgcttctatacagtactgttattgcaggacatcatagagaaggaaatctcaatgaggcttttagacttcatgatgagatgcttgagaaaggtattgtacatgatgatactgtattcaatttactcgtgagtggaagagttgagaaacctcctgctgcatccaagattagtagcttggcttctcctgagatgagatcgagctactaa

SEQ ID NO: 96665 - protein, 867 aa, Arabidopsis thaliana
  peptide (1)..(867): Ceres Seq. ID no. 12734261
  misc_feature (661)..(695): Pfam Name: PPR repeat Pfam Description: PPR repeat
  misc_feature (1)..(846): Homolog of NCBI NO: 15233142 NR Description: putative protein; protein id: At3g54980.1
  misc_feature (91)..(842): Homolog of NCBI NO: 34912586 NR Description: P0046B10.10 [Oryza sativa (japonica
  misc_feature (69)..(843): Homolog of NCBI NO: 15238562 NR Description: putative protein; protein id: At5g59900.1 thaliana] >gi|9757911|dbj|BAB08358.1|
  misc_feature (293)..(848): Homolog of NCBI NO: 6630464 NR Description: F23N19.4 [Arabidopsis thaliana]
  misc_feature (171)..(341): Homolog of NCBI NO: 6630464 NR Description: F23N19.4 [Arabidopsis thaliana]
  misc_feature (76)..(844): Homolog of NCBI NO: 15221621 NR Description: unknown protein; protein id: At1g62910.1
  misc_feature (183)..(792): Homolog of NCBI NO: 32452381 NR Description: fertility restorer homologue A [Raphanus sativus]
  misc_feature (183)..(792): Homolog of NCBI NO: 32527604 NR Description: pentatricopeptide repeat-containing protein
  misc_feature (164)..(866): Homolog of NCBI NO: 34900768 NR Description: hypothetical protein~similar to Arabidopsis
  misc_feature (170)..(829): Homolog of NCBI NO: 34394343 NR Description: putative fertility restorer homologue [Oryza
MTTFMVSKRFRPPIFLHRFINPKPISSQTRFLHPPDNQSRDISDSTTETISTLEFPHKTSVPNHSPLTSTSETENHVDDARVIEVLLGRRNDPVSALQYCNWVKPLHRLCEGGDVFWVLIHILLSSIHTHDRASNLLVMFVSNNPTLIPNVMVNNLVDSSKRFGFELTPRAFNYLLNAYIRNKRMDYAVDCFGLMVDRKVVPFVPYVNNVLSSLVRSNLIDEAKEIYNKMVLIGVAGDNVTTQLLMRASLRERKPEEAVKIFRRVMSRGAEPDGLLFSLAVQAACKTPDLVMALDLLREMRGKLGVPASQETYTSVIVAFVKEGNMEEAVRVMDEMVGFGIPMSVIAATSLVNGYCKGNELGKALDLFNRMEEEGLAPDKVMFSVMVEWFCKNMEMEKAIEFYMRMKSVRIAPSSVLVHTMIQGCLKAESPEAALEIFNDSFESWIAHGFMCNKIFLLFCKQGKVDAATSFLKMMEQKGIEPNVVFYNNMMLAHCRMKNMDLARSIFSEMLEKGLEPNNFTYSILIDGFFKNKDEQNAWDVINQMNASNFEANEVIYNTIINGLCKVGQTSKAKEMLQNLIKEKRYSMSCTSYNSIIDGFVKVGDTDSAVETYREMSENGKSPNVVTFTSLINGFCKSNRMDLALEMTHEMKSMELKLDLPAYGALIDGFCKKNDMKTAYTLFSELPELGLMPNVSVYNSLISGFRNLGKMDAAIDLYKKMVNDGISCDLFTYTTMIDGLLKDGNINLASDLYSELLDLGIVPDEILHMVLVNGLSKKGQFLKASKMLEEMKKKDVTPNVLLYSTVIAGHHREGNLNEAFRLHDEMLEKGIVHDDTVFNLLVSGRVEKPPAASKISSLASPEMRSSY

SEQ ID NO: 96666 - protein, 863 aa, Arabidopsis thaliana
  peptide (1)..(863): Ceres Seq. ID no. 12734262
  misc_feature (657)..(691): Pfam Name: PPR repeat Pfam Description: PPR repeat
  misc_feature (1)..(842): Homolog of NCBI NO: 15233142 NR Description: putative protein; protein id: At3g54980.1
  misc_feature (87)..(838): Homolog of NCBI NO: 34912586 NR Description: P0046B10.10 [Oryza sativa (japonica
  misc_feature (65)..(839): Homolog of NCBI NO: 15238562 NR Description: putative protein; protein id: At5g59900.1 thaliana] >gi|9757911|dbj|BAB08358.1|
  misc_feature (289)..(844): Homolog of NCBI NO: 6630464 NR Description: F23N19.4 [Arabidopsis thaliana]
  misc_feature (167)..(337): Homolog of NCBI NO: 6630464 NR Description: F23N19.4 [Arabidopsis thaliana]
  misc_feature (72)..(840): Homolog of NCBI NO: 15221621 NR Description: unknown protein; protein id: At1g62910.1
  misc_feature (179)..(788): Homolog of NCBI NO: 32452381 NR Description: fertility restorer homologue A [Raphanus sativus]
  misc_feature (179)..(788): Homolog of NCBI NO: 32527604 NR Description: pentatricopeptide repeat-containing protein
  misc_feature (160)..(862): Homolog of NCBI NO: 34900768 NR Description: hypothetical protein~similar to Arabidopsis
  misc_feature (166)..(825): Homolog of NCBI NO: 34394343 NR Description: putative fertility restorer homologue [Oryza
MVSKRFRPPIFLHRFINPKPISSQTRFLHPPDNQSRDISDSTTETISTLEFPHKTSVPNHSPLTSTSETENHVDDARVIEVLLGRRNDPVSALQYCNWVKPLHRLCEGGDVFWVLIHILLSSIHTHDRASNLLVMFVSNNPTLIPNVMVNNLVDSSKRFGFELTPRAFNYLLNAYIRNKRMDYAVDCFGLMVDRKVVPFVPYVNNVLSSLVRSNLIDEAKEIYNKMVLIGVAGDNVTTQLLMRASLRERKPEEAVKIFRRVMSRGAEPDGLLFSLAVQAACKTPDLVMALDLLREMRGKLGVPASQETYTSVIVAFVKEGNMEEAVRVMDEMVGFGIPMSVIAATSLVNGYCKGNELGKALDLFNRMEEEGLAPDKVMFSVMVEWFCKNMEMEKAIEFYMRMKSVRIAPSSVLVHTMIQGCLKAESPEAALEIFNDSFESWIAHGFMCNKIFLLFCKQGKVDAATSFLKMMEQKGIEPNVVFYNNMMLAHCRMKNMDLARSIFSEMLEKGLEPNNFTYSILIDGFFKNKDEQNAWDVINQMNASNFEANEVIYNTIINGLCKVGQTSKAKEMLQNLIKEKRYSMSCTSYNSIIDGFVKVGDTDSAVETYREMSENGKSPNVVTFTSLINGFCKSNRMDLALEMTHEMKSMELKLDLPAYGALIDGFCKKNDMKTAYTLFSELPELGLMPNVSVYNSLISGFRNLGKMDAAIDLYKKMVNDGISCDLFTYTTMIDGLLKDGNINLASDLYSELLDLGIVPDEILHMVLVNGLSKKGQFLKASKMLEEMKKKDVTPNVLLYSTVIAGHHREGNLNEAFRLHDEMLEKGIVHDDTVFNLLVSGRVEKPPAASKISSLASPEMRSSY

SEQ ID NO: 96667 - protein, 729 aa, Arabidopsis thaliana
  peptide (1)..(729): Ceres Seq. ID no. 12734263
  misc_feature (523)..(557): Pfam Name: PPR repeat Pfam Description: PPR repeat
  misc_feature (1)..(708): Homolog of NCBI NO: 15233142 NR Description: putative protein; protein id: At3g54980.1
  misc_feature (1)..(704): Homolog of NCBI NO: 34912586 NR Description: P0046B10.10 [Oryza sativa (japonica
  misc_feature (1)..(705): Homolog of NCBI NO: 15238562 NR Description: putative protein; protein id: At5g59900.1 thaliana] >gi|9757911|dbj|BAB08358.1|
  misc_feature (155)..(710): Homolog of NCBI NO: 6630464 NR Description: F23N19.4 [Arabidopsis thaliana]
  misc_feature (33)..(203): Homolog of NCBI NO: 6630464 NR Description: F23N19.4 [Arabidopsis thaliana]
  misc_feature (1)..(706): Homolog of NCBI NO: 15221621 NR Description: unknown protein; protein id: At1g62910.1
  misc_feature (45)..(654): Homolog of NCBI NO: 32452381 NR Description: fertility restorer homologue A [Raphanus sativus]
  misc_feature (45)..(654): Homolog of NCBI NO: 32527604 NR Description: pentatricopeptide repeat-containing protein
  misc_feature (26)..(728): Homolog of NCBI NO: 34900768 NR Description: hypothetical protein~similar to Arabidopsis
  misc_feature (32)..(691): Homolog of NCBI NO: 34394343 NR Description: putative fertility restorer homologue [Oryza
MFVSNNPTLIPNVMVNNLVDSSKRFGFELTPRAFNYLLNAYIRNKRMDYAVDCFGLMVDRKVVPFVPYVNNVLSSLVRSNLIDEAKEIYNKMVLIGVAGDNVTTQLLMRASLRERKPEEAVKIFRRVMSRGAEPDGLLFSLAVQAACKTPDLVMALDLLREMRGKLGVPASQETYTSVIVAFVKEGNMEEAVRVMDEMVGFGIPMSVIAATSLVNGYCKGNELGKALDLFNRMEEEGLAPDKVMFSVMVEWFCKNMEMEKAIEFYMRMKSVRIAPSSVLVHTMIQGCLKAESPEAALEIFNDSFESWIAHGFMCNKIFLLFCKQGKVDAATSFLKMMEQKGIEPNVVFYNNMMLAHCRMKNMDLARSIFSEMLEKGLEPNNFTYSILIDGFFKNKDEQNAWDVINQMNASNFEANEVIYNTIINGLCKVGQTSKAKEMLQNLIKEKRYSMSCTSYNSIIDGFVKVGDTDSAVETYREMSENGKSPNVVTFTSLINGFCKSNRMDLALEMTHEMKSMELKLDLPAYGALIDGFCKKNDMKTAYTLFSELPELGLMPNVSVYNSLISGFRNLGKMDAAIDLYKKMVNDGISCDLFTYTTMIDGLLKDGNINLASDLYSELLDLGIVPDEILHMVLVNGLSKKGQFLKASKMLEEMKKKDVTPNVLLYSTVIAGHHREGNLNEAFRLHDEMLEKGIVHDDTVFNLLVSGRVEKPPAASKISSLASPEMRSSY

SEQ ID NO: 96668 - DNA, 1230 bp, Arabidopsis thaliana
  misc_feature (1)..(1230): Ceres Seq. ID no. 12734264
  misc_feature: MA Experiment ID: 20000171 Result: Down-regulated in Transcription
  misc_feature: MA Experiment 20000171 PARAMETER Experiment Name: At_42deg_Heat_P Parameter: Age (day) Value: 14
  misc_feature: MA Experiment 20000171 PARAMETER Experiment Name: At_42deg_Heat_P Parameter: Organism Value: A. thaliana
  misc_feature: MA Experiment 20000171 PARAMETER Experiment Name: At_42deg_Heat_P Parameter: Plant Line Value: WS
  misc_feature: MA Experiment 20000171 PARAMETER Experiment Name: At_42deg_Heat_P Parameter: Temperature (deg C) Value: 42 vs. 22
  misc_feature: MA Experiment 20000171 PARAMETER Experiment Name: At_42deg_Heat_P Parameter: Timepoint (hr) Value: 1
  misc_feature: MA Experiment 20000171 PARAMETER Experiment Name: At_42deg_Heat_P Parameter: Tissue Value: Aerial
  misc_feature: MA Experiment ID: 20000173 Result: Down-regulated in Transcription
  misc_feature: MA Experiment 20000173 PARAMETER Experiment Name: At_42deg_Heat_P Parameter: Age (day) Value: 14
  misc_feature: MA Experiment 20000173 PARAMETER Experiment Name: At_42deg_Heat_P Parameter: Organism Value: A. thaliana
  misc_feature: MA Experiment 20000173 PARAMETER Experiment Name: At_42deg_Heat_P Parameter: Plant Line Value: WS
  misc_feature: MA Experiment 20000173 PARAMETER Experiment Name: At_42deg_Heat_P Parameter: Temperature (deg C) Value: 42 vs. 22
  misc_feature: MA Experiment 20000173 PARAMETER Experiment Name: At_42deg_Heat_P Parameter: Timepoint (hr) Value: 6
  misc_feature: MA Experiment 20000173 PARAMETER Experiment Name: At_42deg_Heat_P Parameter: Tissue Value: Aerial
  misc_feature: MA Experiment ID: 20000180 Result: Up-regulated in Transcription
  misc_feature: MA Experiment 20000180 PARAMETER Experiment Name: At_Germinating_Seeds_P Parameter: Age (hr) Value: 24 vs. 0
  misc_feature: MA Experiment 20000180 PARAMETER Experiment Name: At_Germinating_Seeds_P Parameter: Tissue Value: Germinating Seeds
  misc_feature: MA Experiment ID: 20000184 Result: Up-regulated in Transcription
  misc_feature: MA Experiment 20000184 PARAMETER Experiment Name: At_Shoots__P Parameter: Age (day) Value: 7
  misc_feature: MA Experiment 20000184 PARAMETER Experiment Name: At_Shoots__P Parameter: Tissue Value: Shoots vs. Whole Plant
  misc_feature: MA Experiment ID: 20000436 Result: Up-regulated in Transcription
  misc_feature: MA Experiment 20000436 PARAMETER Experiment Name: At_Drought_P Parameter: Age (day) Value: 7
  misc_feature: MA Experiment 20000436 PARAMETER Experiment Name: At_Drought_P Parameter: Organism Value: A. thaliana
  misc_feature: MA Experiment 20000436 PARAMETER Experiment Name: At_Drought_P Parameter: Plant Line Value: WS
  misc_feature: MA Experiment 20000436 PARAMETER Experiment Name: At_Drought_P Parameter: Timepoint (hr) Value: 12
  misc_feature: MA Experiment 20000436 PARAMETER Experiment Name: At_Drought_P Parameter: Tissue Value: Whole Plant
  misc_feature: MA Experiment 20000436 PARAMETER Experiment Name: At_Drought_P Parameter: Treatment Value: Drought vs. No Drought
  misc_feature: MA Experiment ID: 20000437 Result: Up-regulated in Transcription
  misc_feature: MA Experiment 20000437 PARAMETER Experiment Name: At_Drought_P Parameter: Age (day) Value: 8
  misc_feature: MA Experiment 20000437 PARAMETER Experiment Name: At_Drought_P Parameter: Organism Value: A. thaliana
  misc_feature: MA Experiment 20000437 PARAMETER Experiment Name: At_Drought_P Parameter: Plant Line Value: WS
  misc_feature: MA Experiment 20000437 PARAMETER Experiment Name: At_Drought_P Parameter: Timepoint (hr) Value: 24
  misc_feature: MA Experiment 20000437 PARAMETER Experiment Name: At_Drought_P Parameter: Tissue Value: Whole Plant
  misc_feature: MA Experiment 20000437 PARAMETER Experiment Name: At_Drought_P Parameter: Treatment Value: Drought vs. No Drought
  misc_feature: MA Experiment ID: 20000438 Result: Up-regulated in Transcription
  misc_feature: MA Experiment 20000438 PARAMETER Experiment Name: At_Shoots__P Parameter: Age (day) Value: 14
  misc_feature: MA Experiment 20000438 PARAMETER Experiment Name: At_Shoots__P Parameter: Tissue Value: Shoots vs. Whole Plant
  misc_feature: MA Experiment ID: 20000495 Result: Down-regulated in Transcription
  misc_feature: MA Experiment 20000495 PARAMETER Experiment Name: At_Guard_Cells_P Parameter: Harvest Date Value: 8/2/2002
  misc_feature: MA Experiment 20000495 PARAMETER Experiment Name: At_Guard_Cells_P Parameter: Organism Value: A. thaliana
  misc_feature: MA Experiment 20000495 PARAMETER Experiment Name: At_Guard_Cells_P Parameter: Tissue Value: Guard Cells vs. Leaves
  misc_feature: MA Experiment ID: 20000573 Result: Down-regulated in Transcription
  misc_feature: MA Experiment 20000573 PARAMETER Experiment Name: At_100uM_ABA_Mutants__P Parameter: Organism Value: A. thaliana
  misc_feature: MA Experiment 20000573 PARAMETER Experiment Name: At_100uM_ABA_Mutants__P Parameter: Plant Line Value: CS22 vs. Ler wt
  misc_feature: MA Experiment 20000573 PARAMETER Experiment Name: At_100uM_ABA_Mutants__P Parameter: Timepoint (hr) Value: N/A
  misc_feature: MA Experiment 20000573 PARAMETER Experiment Name: At_100uM_ABA_Mutants__P Parameter: Tissue Value: Whole Plant
  misc_feature: MA Experiment 20000573 PARAMETER Experiment Name: At_100uM_ABA_Mutants__P Parameter: Treatment Value: None
  misc_feature: MA Experiment ID: 20001248 Result: Down-regulated in Transcription
  misc_feature: MA Experiment 20001248 PARAMETER Experiment Name: At_Far-red-induction_P Parameter: Age (day) Value: 7
  misc_feature: MA Experiment 20001248 PARAMETER Experiment Name: At_Far-red-induction_P Parameter: Light Value: Far-red vs. White
  misc_feature: MA Experiment 20001248 PARAMETER Experiment Name: At_Far-red-induction_P Parameter: Organism Value: A. thaliana
  misc_feature: MA Experiment 20001248 PARAMETER Experiment Name: At_Far-red-induction_P Parameter: Plant Line Value: Columbia
  misc_feature: MA Experiment 20001248 PARAMETER Experiment Name: At_Far-red-induction_P Parameter: Timepoint (hr) Value: 4
  misc_feature: MA Experiment 20001248 PARAMETER Experiment Name: At_Far-red-induction_P Parameter: Tissue Value: Whole Plant
  misc_feature: MA Experiment ID: 20001450 Result: Down-regulated in Transcription
  misc_feature: MA Experiment 20001450 PARAMETER Experiment Name: At_Far-red-induction_P Parameter: Age (day) Value: 7
  misc_feature: MA Experiment 20001450 PARAMETER Experiment Name: At_Far-red-induction_P Parameter: Light Value: Far-red vs. White
  misc_feature: MA Experiment 20001450 PARAMETER Experiment Name: At_Far-red-induction_P Parameter: Organism Value: A. thaliana
  misc_feature: MA Experiment 20001450 PARAMETER Experiment Name: At_Far-red-induction_P Parameter: Plant Line Value: Columbia
  misc_feature: MA Experiment 20001450 PARAMETER Experiment Name: At_Far-red-induction_P Parameter: Timepoint (hr) Value: 8
  misc_feature: MA Experiment 20001450 PARAMETER Experiment Name: At_Far-red-induction_P Parameter: Tissue Value: Whole Plant
  misc_feature: MA Experiment ID: 20001451 Result: Down-regulated in Transcription
  misc_feature: MA Experiment 20001451 PARAMETER Experiment Name: At_Far-red-induction_P Parameter: Age (day) Value: 7
  misc_feature: MA Experiment 20001451 PARAMETER Experiment Name: At_Far-red-induction_P Parameter: Light Value: Far-red vs. White
  misc_feature: MA Experiment 20001451 PARAMETER Experiment Name: At_Far-red-induction_P Parameter: Organism Value: A. thaliana
  misc_feature: MA Experiment 20001451 PARAMETER Experiment Name: At_Far-red-induction_P Parameter: Plant Line Value: Columbia
  misc_feature: MA Experiment 20001451 PARAMETER Experiment Name: At_Far-red-induction_P Parameter: Timepoint (hr) Value: 24
  misc_feature: MA Experiment 20001451 PARAMETER Experiment Name: At_Far-red-induction_P Parameter: Tissue Value: Whole Plant
aaatcagtgtgtagacaatcgcactgaacaacacgtcccacgttctttttcttccctgttttagatagactcttagagtctctctagagtcaccggaacaatcacaaaagcgacgacatattactcattcctacaaatactcatgttggacctcaacctcggaatcttgtcgacacacaacgaagatgaagattgcaaagtaccaacttccatcttcattcaagaagaagattccattaatccctcaaacgacaacttgtctttgattacatttggaatccttaaacgaaacgtcgaaatccttcctcctccccctcctcctcctcctcctcctcctccttcggaaaatgaactctccggccccggaaatgagtggttggatctttcgtcgatgcaaagaaataaacaagaaacgttggtgatgaagaaaaaaagtcgacgtggcccaagatcaagaagctctcattatcgtggcgttaccttttaccgtcgaaccggccgttgggaatctcatatttgggactgtggaaaacaagtttatttgggtggtttcgacacagcctacacagccgcaagagcgtacgaccgagctgctatcagattccggggactccaagcagatatcaactttatcgtggatgattacaaacaagacattgaaaagatgaagaatttaagcaaagaagagtttgtgcaatctcttagacgagcgagtgcaagcttagcaagaggaggttctaaatacaaaaacacccatatgagaaatgatcacatccatctcttccaaaacagcagcagcaaaatgcaatgagataagaaagatggaaggggatattaagttgggtgcccatagtaaaggaaatgagcacaacgatctcgagctaagtcttgggatatcttcatcgtcaaaagttagaattttggaaccagcagattattacatgggtttgaatcgatcggtgacgagtttgcatgggaagccgttgccgggatatctaccgatcacagaaattaaaccgttaaagacagttgtagcatcatcaggattccctttcattaccatgatcaatccttcttctttgtccttatcttgttttgatccatgaggtgatcactatttacttttaaaattttcccctttttattgataatctattgaatgacggaatgattatgtgacttatatctttttataaaccatattcttgtggaatcaggaattttgtgcca

SEQ ID NO: 96669 - protein, 222 aa, Arabidopsis thaliana
  peptide (1)..(222): Ceres Seq. ID no. 12734265
  misc_feature (106)..(169): Pfam Name: AP2 domain Pfam Description: AP2 domain
  misc_feature (1)..(222): Homolog of NCBI NO: 30687828 NR Description: apetala2 family protein (RAP2) [Arabidopsis >gi|17065004|gb|AAL32656.1| putative AP2 domain transcription [Arabidopsis thaliana] >gi|20260076|gb|AAM13385.1| putative AP2
  misc_feature (1)..(216): Homolog of NCBI NO: 7487047 NR Description: probable AP2 domain transcription factor - Arabidopsis thaliana >gi|3402680|gb|AAC28983.1| putative AP2
  misc_feature (1)..(216): Homolog of NCBI NO: 15233145 NR Description: apetala2 family protein (RAP2); protein id:
  misc_feature (45)..(202): Homolog of NCBI NO: 28876023 NR Description: putative transcription factor AP2 family protein,
  misc_feature (45)..(202): Homolog of NCBI NO: 29124121 NR Description: APETALA2-like protein [Oryza sativa (japonica
  misc_feature (52)..(202): Homolog of NCBI NO: 18476518 NR Description: APETALA2-like protein [Hordeum vulgare]
  misc_feature (58)..(202): Homolog of NCBI NO: 7489779 NR Description: indeterminate spikelet 1 - maize
  misc_feature (50)..(202): Homolog of NCBI NO: 21717332 NR Description: transcription factor AHAP2 [Malus x domestica]
  misc_feature (52)..(202): Homolog of NCBI NO: 5360996 NR Description: APETALA2 protein homolog HAP2 [Hyacinthus
  misc_feature (58)..(202): Homolog of NCBI NO: 34900512 NR Description: putative indeterminate spikelet 1 [Oryza sativa
MLDLNLGILSTHNEDEDCKVPTSIFIQEEDSINPSNDNLSLITFGILKRNVEILPPPPPPPPPPPPSENELSGPGNEWLDLSSMQRNKQETLVMKKKSRRGPRSRSSHYRGVTFYRRTGRWESHIWDCGKQVYLGGFDTAYTAARAYDRAAIRFRGLQADINFIVDDYKQDIEKMKNLSKEEFVQSLRRASASLARGGSKYKNTHMRNDHIHLFQNSSSKMQ

SEQ ID NO: 96670 - protein, 139 aa, Arabidopsis thaliana
  peptide (1)..(139): Ceres Seq. ID no. 12734266
  misc_feature (23)..(86): Pfam Name: AP2 domain Pfam Description: AP2 domain
  misc_feature (1)..(139): Homolog of NCBI NO: 30687828 NR Description: apetala2 family protein (RAP2) [Arabidopsis >gi|17065004|gb|AAL32656.1| putative AP2 domain transcription [Arabidopsis thaliana] >gi|20260076|gb|AAM13385.1| putative AP2
  misc_feature (1)..(133): Homolog of NCBI NO: 7487047 NR Description: probable AP2 domain transcription factor - Arabidopsis thaliana >gi|3402680|gb|AAC28983.1| putative AP2
  misc_feature (1)..(133): Homolog of NCBI NO: 15233145 NR Description: apetala2 family protein (RAP2); protein id:
  misc_feature (1)..(119): Homolog of NCBI NO: 28876023 NR Description: putative transcription factor AP2 family protein,
  misc_feature (1)..(119): Homolog of NCBI NO: 29124121 NR Description: APETALA2-like protein [Oryza sativa (japonica
  misc_feature (1)..(119): Homolog of NCBI NO: 18476518 NR Description: APETALA2-like protein [Hordeum vulgare]
  misc_feature (1)..(119): Homolog of NCBI NO: 7489779 NR Description: indeterminate spikelet 1 - maize
  misc_feature (1)..(119): Homolog of NCBI NO: 21717332 NR Description: transcription factor AHAP2 [Malus x domestica]
  misc_feature (1)..(119): Homolog of NCBI NO: 5360996 NR Description: APETALA2 protein homolog HAP2 [Hyacinthus
  misc_feature (1)..(119): Homolog of NCBI NO: 34900512 NR Description: putative indeterminate spikelet 1 [Oryza sativa
MQRNKQETLVMKKKSRRGPRSRSSHYRGVTFYRRTGRWESHIWDCGKQVYLGGFDTAYTAARAYDRAAIRFRGLQADINFIVDDYKQDIEKMKNLSKEEFVQSLRRASASLARGGSKYKNTHMRNDHIHLFQNSSSKMQ

SEQ ID NO: 96671 - protein, 129 aa, Arabidopsis thaliana
  peptide (1)..(129): Ceres Seq. ID no. 12734267
  misc_feature (13)..(76): Pfam Name: AP2 domain Pfam Description: AP2 domain
  misc_feature (1)..(129): Homolog of NCBI NO: 30687828 NR Description: apetala2 family protein (RAP2) [Arabidopsis >gi|17065004|gb|AAL32656.1| putative AP2 domain transcription [Arabidopsis thaliana] >gi|20260076|gb|AAM13385.1| putative AP2
  misc_feature (1)..(123): Homolog of NCBI NO: 7487047 NR Description: probable AP2 domain transcription factor - Arabidopsis thaliana >gi|3402680|gb|AAC28983.1| putative AP2
  misc_feature (1)..(123): Homolog of NCBI NO: 15233145 NR Description: apetala2 family protein (RAP2); protein id:
  misc_feature (1)..(109): Homolog of NCBI NO: 28876023 NR Description: putative transcription factor AP2 family protein,
  misc_feature (1)..(109): Homolog of NCBI NO: 29124121 NR Description: APETALA2-like protein [Oryza sativa (japonica
  misc_feature (1)..(109): Homolog of NCBI NO: 18476518 NR Description: APETALA2-like protein [Hordeum vulgare]
  misc_feature (1)..(109): Homolog of NCBI NO: 7489779 NR Description: indeterminate spikelet 1 - maize
  misc_feature (1)..(109): Homolog of NCBI NO: 21717332 NR Description: transcription factor AHAP2 [Malus x domestica]
  misc_feature (1)..(109): Homolog of NCBI NO: 5360996 NR Description: APETALA2 protein homolog HAP2 [Hyacinthus
  misc_feature (1)..(109): Homolog of NCBI NO: 34900512 NR Description: putative indeterminate spikelet 1 [Oryza sativa
MKKKSRRGPRSRSSHYRGVTFYRRTGRWESHIWDCGKQVYLGGFDTAYTAARAYDRAAIRFRGLQADINFIVDDYKQDIEKMKNLSKEEFVQSLRRASASLARGGSKYKNTHMRNDHIHLFQNSSSKMQ

SEQ ID NO: 96672 - DNA, 1186 bp, Arabidopsis thaliana
  misc_feature (1)..(1186): Ceres Seq. ID no. 12734274
  misc_feature: MA Experiment ID: 20000235 Result: Up-regulated in Transcription
  misc_feature: MA Experiment 20000235 PARAMETER Experiment Name: At_Siliques_P Parameter: Age (day) Value: 21
  misc_feature: MA Experiment 20000235 PARAMETER Experiment Name: At_Siliques_P Parameter: Organism Value: A. thaliana
  misc_feature: MA Experiment 20000235 PARAMETER Experiment Name: At_Siliques_P Parameter: Plant Line Value: WS
  misc_feature: MA Experiment 20000235 PARAMETER Experiment Name: At_Siliques_P Parameter: Tissue Value: 5-10mm Siliques vs. Whole Plant
  misc_feature: MA Experiment ID: 20001556 Result: Up-regulated in Transcription
  misc_feature: MA Experiment 20001556 PARAMETER Experiment Name: At_Drought_Soil_Dry_P Parameter: Age (day) Value: 26
  misc_feature: MA Experiment 20001556 PARAMETER Experiment Name: At_Drought_Soil_Dry_P Parameter: Organism Value: A. thaliana
  misc_feature: MA Experiment 20001556 PARAMETER Experiment Name: At_Drought_Soil_Dry_P Parameter: Plant Line Value: WS
  misc_feature: MA Experiment 20001556 PARAMETER Experiment Name: At_Drought_Soil_Dry_P Parameter: Post Timepoint (hr) Value: None
  misc_feature: MA Experiment 20001556 PARAMETER Experiment Name: At_Drought_Soil_Dry_P Parameter: Post-Treatment Value: None
  misc_feature: MA Experiment 20001556 PARAMETER Experiment Name: At_Drought_Soil_Dry_P Parameter: Timepoint (day) Value: 12
  misc_feature: MA Experiment 20001556 PARAMETER Experiment Name: At_Drought_Soil_Dry_P Parameter: Treatment Value: Drought vs. No Drought
  misc_feature: MA Experiment ID: 20001557 Result: Up-regulated in Transcription
  misc_feature: MA Experiment 20001557 PARAMETER Experiment Name: At_Drought_Soil_Dry_P Parameter: Age (day) Value: 27
  misc_feature: MA Experiment 20001557 PARAMETER Experiment Name: At_Drought_Soil_Dry_P Parameter: Organism Value: A. thaliana
  misc_feature: MA Experiment 20001557 PARAMETER Experiment Name: At_Drought_Soil_Dry_P Parameter: Plant Line Value: WS
  misc_feature: MA Experiment 20001557 PARAMETER Experiment Name: At_Drought_Soil_Dry_P Parameter: Post Timepoint (hr) Value: 3
  misc_feature: MA Experiment 20001557 PARAMETER Experiment Name: At_Drought_Soil_Dry_P Parameter: Post-Treatment Value: Re-Water vs. No Drought
  misc_feature: MA Experiment 20001557 PARAMETER Experiment Name: At_Drought_Soil_Dry_P Parameter: Timepoint (day) Value: 13
  misc_feature: MA Experiment 20001557 PARAMETER Experiment Name: At_Drought_Soil_Dry_P Parameter: Treatment Value: Drought vs. No Drought
  misc_feature: MA Experiment ID: 20001558 Result: Up-regulated in Transcription
  misc_feature: MA Experiment 20001558 PARAMETER Experiment Name: At_Drought_Soil_Dry_P Parameter: Age (day) Value: 27
  misc_feature: MA Experiment 20001558 PARAMETER Experiment Name: At_Drought_Soil_Dry_P Parameter: Organism Value: A. thaliana
  misc_feature: MA Experiment 20001558 PARAMETER Experiment Name: At_Drought_Soil_Dry_P Parameter: Plant Line Value: WS
  misc_feature: MA Experiment 20001558 PARAMETER Experiment Name: At_Drought_Soil_Dry_P Parameter: Post Timepoint (hr) Value: 6
  misc_feature: MA Experiment 20001558 PARAMETER Experiment Name: At_Drought_Soil_Dry_P Parameter: Post-Treatment Value: Re-Water vs. No Drought
  misc_feature: MA Experiment 20001558 PARAMETER Experiment Name: At_Drought_Soil_Dry_P Parameter: Timepoint (day) Value: 13
  misc_feature: MA Experiment 20001558 PARAMETER Experiment Name: At_Drought_Soil_Dry_P Parameter: Treatment Value: Drought vs. No Drought
ttagtaagctcgcccatgctcagatccggtctggcttcgttaatcgtcgatgtcaatttgcggcgcacgttacgtccatccccaaccttttcttttccggcgcatcttagccgttgcattatcacttcccgttactcctcccgtacatctctaaggtttccgattcaaatatctcgccaccaacaccgtctatcctacttttcttcatcctcttcgtcggagcaaagcagaccaacttcctcttcccgaaacagtttcagtggtcacggtcagcttgatagtgatgataattcttcaccgcctccgtcgcaatcatcttccaaagttcttacattgcctaccgtattaacacttggtcgtgtcgccgccgtcccgcttctcgtcgcaaccttttacgttgatagttggtggggaacaactgctacaacaagcattttcattgcagcagccattacagactggcttgacggctatcttgcccgcaagatgaggttaggttctgcgtttggtgcctttttggatccagttgctgataagcttatggttgcagctacattgattttactgtgtacaaaacctatccaagttgctgaattaggaccacttccatggttattgaccgtaccttctattgcaatcattggtagggagattactatgtccgcagtaagagaatgggctgcatctcaaaatggaaagcttttagaggcagttgctgtaaataacttgggcaagtggaaaaccgccacgcagatgacagcactaaccatacttcttgcaagccgagatagcaatgttggatggctcgtagcttcaggtgctggcttgctttatgtatcagcaggactatctgtttggtctttagccgtttatatgaggaagatatggaaagtactaatgaagtagtattagtagtagtaattcatctattggttttgttttgctttgacctgcatttggatttatgtattgatggaaagggtctcagtcatcgcctgtacaagagcacaaaacttgaatgctgcaacatttaagtagtttgagaatatgtagatgattttgctttgcacttttccaacacaatatagagtgtgcaacatagtcttggttgagattaaagccttataatgagtgtattgtataaacgatgaatacgtatttccaacatatggaacaaacattcttt

SEQ ID NO: 96673 - protein, 301 aa, Arabidopsis thaliana
  peptide (1)..(301): Ceres Seq. ID no. 12734275
  misc_feature (143)..(294): Pfam Name: CDP-alcohol phosphatidyltransferase Pfam Description: CDP-alcohol phosphatidyltransferase
  misc_feature (6)..(301): Homolog of NCBI NO: 15225064 NR Description: putative CDP-diacylglycerol--glycerol-3-phosphate phosphatidyltransferase; protein id: At2g39290.1, supported by gi_13365518, supported by cDNA: gi_15778124 [Arabidopsis
  misc_feature (83)..(301): Homolog of NCBI NO: 15233163 NR Description: phosphatidylglycerophosphate synthase - like protein id: At3g55030.1 [Arabidopsis thaliana]
  misc_feature (95)..(301): Homolog of NCBI NO: 24796824 NR Description: putative phosphatidylglycerolphosphate synthase
  misc_feature (110)..(296): Homolog of NCBI NO: 23061902 NR Description: hypothetical protein [Pseudomonas fluorescens
  misc_feature (110)..(296): Homolog of NCBI NO: 27753591 NR Description: CDP-diacylglycerol-glycerol-3-phosphate
  misc_feature (110)..(296): Homolog of NCBI NO: 28870198 NR Description: CDP-diacylglycerol--glycerol-3-phosphate 3-
  misc_feature (110)..(296): Homolog of NCBI NO: 23472904 NR Description: hypothetical protein [Pseudomonas syringae pv.
  misc_feature (110)..(296): Homolog of NCBI NO: 26990792 NR Description: CDP-diacylglycerol--glycerol-3-phosphate 3-
  misc_feature (110)..(296): Homolog of NCBI NO: 15597780 NR Description: CDP-diacylglycerol--glycerol-3-phosphate 3-
  misc_feature (110)..(296): Homolog of NCBI NO: 23104171 NR Description: hypothetical protein [Azotobacter vinelandii]
LVSSPMLRSGLASLIVDVNLRRTLRPSPTFSFPAHLSRCIITSRYSSRTSLRFPIQISRHQHRLSYFSSSSSSEQSRPTSSSRNSFSGHGQLDSDDNSSPPPSQSSSKVLTLPTVLTLGRVAAVPLLVATFYVDSWWGTTATTSIFIAAAITDWLDGYLARKMRLGSAFGAFLDPVADKLMVAATLILLCTKPIQVAELGPLPWLLTVPSIAIIGREITMSAVREWAASQNGKLLEAVAVNNLGKWKTATQMTALTILLASRDSNVGWLVASGAGLLYVSAGLSVWSLAVYMRKIWKVLMK

SEQ ID NO: 96674 - protein, 296 aa, Arabidopsis thaliana
  peptide (1)..(296): Ceres Seq. ID no. 12734276
  misc_feature (138)..(289): Pfam Name: CDP-alcohol phosphatidyltransferase Pfam Description: CDP-alcohol phosphatidyltransferase
  misc_feature (1)..(296): Homolog of NCBI NO: 15225064 NR Description: putative CDP-diacylglycerol--glycerol-3-phosphate phosphatidyltransferase; protein id: At2g39290.1, supported by gi_13365518, supported by cDNA: gi_15778124 [Arabidopsis
  misc_feature (78)..(296): Homolog of NCBI NO: 15233163 NR Description: phosphatidylglycerophosphate synthase - like protein id: At3g55030.1 [Arabidopsis thaliana]
  misc_feature (90)..(296): Homolog of NCBI NO: 24796824 NR Description: putative phosphatidylglycerolphosphate synthase
  misc_feature (105)..(291): Homolog of NCBI NO: 23061902 NR Description: hypothetical protein [Pseudomonas fluorescens
  misc_feature (105)..(291): Homolog of NCBI NO: 27753591 NR Description: CDP-diacylglycerol-glycerol-3-phosphate
  misc_feature (105)..(291): Homolog of NCBI NO: 28870198 NR Description: CDP-diacylglycerol--glycerol-3-phosphate 3-
  misc_feature (105)..(291): Homolog of NCBI NO: 23472904 NR Description: hypothetical protein [Pseudomonas syringae pv.
  misc_feature (105)..(291): Homolog of NCBI NO: 26990792 NR Description: CDP-diacylglycerol--glycerol-3-phosphate 3-
  misc_feature (105)..(291): Homolog of NCBI NO: 15597780 NR Description: CDP-diacylglycerol--glycerol-3-phosphate 3-
  misc_feature (105)..(291): Homolog of NCBI NO: 23104171 NR Description: hypothetical protein [Azotobacter vinelandii]
MLRSGLASLIVDVNLRRTLRPSPTFSFPAHLSRCIITSRYSSRTSLRFPIQISRHQHRLSYFSSSSSSEQSRPTSSSRNSFSGHGQLDSDDNSSPPPSQSSSKVLTLPTVLTLGRVAAVPLLVATFYVDSWWGTTATTSIFIAAAITDWLDGYLARKMRLGSAFGAFLDPVADKLMVAATLILLCTKPIQVAELGPLPWLLTVPSIAIIGREITMSAVREWAASQNGKLLEAVAVNNLGKWKTATQMTALTILLASRDSNVGWLVASGAGLLYVSAGLSVWSLAVYMRKIWKVLMK

SEQ ID NO: 96675 - DNA, 2448 bp, Arabidopsis thaliana
  misc_feature (1)..(2448): Ceres Seq. ID no. 12734289
  misc_feature: MA Experiment ID: 20000234 Result: Down-regulated in Transcription
  misc_feature: MA Experiment 20000234 PARAMETER Experiment Name: At_Siliques_P Parameter: Age (day) Value: 21
  misc_feature: MA Experiment 20000234 PARAMETER Experiment Name: At_Siliques_P Parameter: Organism Value: A. thaliana
  misc_feature: MA Experiment 20000234 PARAMETER Experiment Name: At_Siliques_P Parameter: Plant Line Value: WS
  misc_feature: MA Experiment 20000234 PARAMETER Experiment Name: At_Siliques_P Parameter: Tissue Value: Less Than 5mm Siliques vs. Whole Plant
  misc_feature: MA Experiment ID: 20000265 Result: Down-regulated in Transcription
  misc_feature: MA Experiment 20000265 PARAMETER Experiment Name: At_Open_Flower_P Parameter: Age (day) Value: 21
  misc_feature: MA Experiment 20000265 PARAMETER Experiment Name: At_Open_Flower_P Parameter: Plant Line Value: WS
  misc_feature: MA Experiment 20000265 PARAMETER Experiment Name: At_Open_Flower_P Parameter: Tissue Value: Closed Flower vs. Whole Plant
  misc_feature: MA Experiment ID: 20000286 Result: Down-regulated in Transcription
  misc_feature: MA Experiment 20000286 PARAMETER Experiment Name: At_Open_Flower_P Parameter: Age (day) Value: 21
  misc_feature: MA Experiment 20000286 PARAMETER Experiment Name: At_Open_Flower_P Parameter: Plant Line Value: WS
  misc_feature: MA Experiment 20000286 PARAMETER Experiment Name: At_Open_Flower_P Parameter: Tissue Value: Half Open vs. Whole Plant
  misc_feature: MA Experiment ID: 20000495 Result: Down-regulated in Transcription
  misc_feature: MA Experiment 20000495 PARAMETER Experiment Name: At_Guard_Cells_P Parameter: Harvest Date Value: 8/2/2002
  misc_feature: MA Experiment 20000495 PARAMETER Experiment Name: At_Guard_Cells_P Parameter: Organism Value: A. thaliana
  misc_feature: MA Experiment 20000495 PARAMETER Experiment Name: At_Guard_Cells_P Parameter: Tissue Value: Guard Cells vs. Leaves
  misc_feature: MA Experiment ID: 20000496 Result: Down-regulated in Transcription
  misc_feature: MA Experiment 20000496 PARAMETER Experiment Name: At_Guard_Cells_P Parameter: Harvest Date Value: 7/19/2002
  misc_feature: MA Experiment 20000496 PARAMETER Experiment Name: At_Guard_Cells_P Parameter: Organism Value: Canola
  misc_feature: MA Experiment 20000496 PARAMETER Experiment Name: At_Guard_Cells_P Parameter: Tissue Value: Guard Cells vs. Leaves
  misc_feature: MA Experiment ID: 20001247 Result: Up-regulated in Transcription
  misc_feature: MA Experiment 20001247 PARAMETER Experiment Name: At_Far-red-induction_P Parameter: Age (day) Value: 7
  misc_feature: MA Experiment 20001247 PARAMETER Experiment Name: At_Far-red-induction_P Parameter: Light Value: Far-red vs. White
  misc_feature: MA Experiment 20001247 PARAMETER Experiment Name: At_Far-red-induction_P Parameter: Organism Value: A. thaliana
  misc_feature: MA Experiment 20001247 PARAMETER Experiment Name: At_Far-red-induction_P Parameter: Plant Line Value: Columbia
  misc_feature: MA Experiment 20001247 PARAMETER Experiment Name: At_Far-red-induction_P Parameter: Timepoint (hr) Value: 1
  misc_feature: MA Experiment 20001247 PARAMETER Experiment Name: At_Far-red-induction_P Parameter: Tissue Value: Whole Plant
atgataaacctcaagctattcttagagctaaagttatgttttttaataactttactctgttcttcacacatctcctctgtttctgacactttcttcatcaactgtggatctccgacgaatgtaacagtcaacaatagaaccttcgtctccgacaacaatcttgttcaaggattctctgtcggaaccaccgattcgaattcaggtgatgaatcgactctgtttcagaccgcaagagtattctccgatgaatcatcatcaacttacagattcccgatcgaggaacacggttggttcttgattcgtatttactttttaccattagtctctgcttctcaagatttaaccacagctagattctcagtctcggctcagaatttcactctgatcagagaatataaaccctcaacgacttctgttgttagagaatacattttaaacgttaccacagatagtctcttgcttcagtttctccctagaactggttctgtttctttcatcaatgctttggaagttttgagacttccagagactttgatacctgaagatgcaaaactcattggtacacagaaggatcttaagctcagtagtcatgcgatggagactgtttctcgtgtaaacatggggaatcttagtgtgagtcgtgatcaagataagctgtggaggcaatgggattctgattctgcttataaagctcacttcggtacaccggttatgaacctcaaagcggttaacttcagtgctggtggaataactgatgacattgcaccagtttacgtctatggaaccgccacgaggttaaactctgatcttgatcctaatactaacgccaatcttacttggacattcaaagtcgagcctggtttcgattactttgttcggtttcacttttgtaacataatagtggatccttttggattcgagcgtcagatacgttttgacatttttgtgaactcagagaaagttagaaccattgatatgacagaggttttaaatggaacttttggggctccttttttcgttgatgcagtgatgcgtaaagcgaaaagccgtgaagggttcttgaatttatctattggtttagttatggatgtttcttcgtaccctgtttcttttattaacggatttgagatttcgaagctaagcaatgataagcggagtcttgatgcttttgatgccattttacctgatggttcttcgagtaacaagagttcgaatacgagtgtcggattgatagctggtttgtctgcagctttgtgtgttgctttagtgtttggtgtggttgtgtcttggtggtgcattaggaaaagaagaagaagaaatagacaaatgcagactgttcattctagaggagatgatcatcagattaagaagaatgaaacaggtgagagcttaatcttttcgagctcaaagatcggttatcgataccctttggctctaatcaaggaagcaactgatgattttgatgaaagcttagtgattggggttggtgggtttggtaaagtttacaaaggagtcttgagagacaaaaccgaagtagctgtgaaacgtggtgctcctcaatctcgacaaggtctggcggagtttaagacagaggttgaaatgcttactcagttcagacacagacatttggtttctttaatcggatattgcgatgaaaacagtgaaatgatcattgtctatgaatatatggagaagggaacgcttaaggaccatttgtatgacttggatgataagccgaggttgagttggagacagaggcttgagatatgcgttggtgcagctagagggcttcattatctccacacaggttccacaagagcaatcatacaccgcgatgtgaaatctgctaacattctattggatgataattttatggctaaagttgcagattttggattgtctaagacaggtcctgatcttgatcaaacacatgtgagtaccgcggtcaaaggaagctttggatatcttgatccagagtatctaacaagacaacaattaactgagaaatctgatgtttactcttttggtgtggtgatgcttgaagtagtatgtggtagaccagtcattgatccatcactaccgagagagaaagtgaatttgatcgaatgggcgatgaagttggtgaagaaagggaaattggaagatatcatagacccatttcttgtaggaaaagtaaagcttgaagaggtgaaaaagtactgtgaggtaacagagaagtgtttgtcccaaaacggaattgagaggccagcaatgggagatttgttgtggaacctagagttcatgcttcaggtgcaagcaaaagatgagaaagcagcaatggtggatgataagccagaggcgagtgtcgttggctcgaccatgcagtttagtgtgaatggagtgggagatattgcaggggtctcaatgagcaaagttttcgcacaaatggttagagaagaaacgagataa

SEQ ID NO: 96676 - protein, 815 aa, Arabidopsis thaliana
  peptide (1)..(815): Ceres Seq. ID no. 12734290
  misc_feature (18)..(779): Homolog of NCBI NO: 15231393 NR Description: receptor protein kinase -like; protein id:
  misc_feature (781)..(815): Homolog of NCBI NO: 15231393 NR Description: receptor protein kinase -like; protein id:
  misc_feature (16)..(804): Homolog of NCBI NO: 15238498 NR Description: receptor-like protein kinase precursor - like;
  misc_feature (19)..(813): Homolog of NCBI NO: 24796812 NR Description: putative receptor-like protein kinase [Oryza
  misc_feature (29)..(809): Homolog of NCBI NO: 25553554 NR Description: OSJNBa0038F22.1 [Oryza sativa (japonica
  misc_feature (29)..(809): Homolog of NCBI NO: 34898020 NR Description: Similar to putative receptor-like protein kinase
  misc_feature (8)..(448): Homolog of NCBI NO: 15240228 NR Description: receptor-like protein kinase precursor - like; id: At5g61350.1 [Arabidopsis thaliana]
  misc_feature (456)..(782): Homolog of NCBI NO: 15240228 NR Description: receptor-like protein kinase precursor - like; id: At5g61350.1 [Arabidopsis thaliana]
  misc_feature (59)..(787): Homolog of NCBI NO: 15239630 NR Description: receptor-protein kinase-like protein; protein id:
  misc_feature (28)..(765): Homolog of NCBI NO: 15226565 NR Description: putative protein kinase; protein id: At2g21480.1
MINLKLFLELKLCFLITLLCSSHISSVSDTFFINCGSPTNVTVNNRTFVSDNNLVQGFSVGTTDSNSGDESTLFQTARVFSDESSSTYRFPIEEHGWFLIRIYFLPLVSASQDLTTARFSVSAQNFTLIREYKPSTTSVVREYILNVTTDSLLLQFLPRTGSVSFINALEVLRLPETLIPEDAKLIGTQKDLKLSSHAMETVSRVNMGNLSVSRDQDKLWRQWDSDSAYKAHFGTPVMNLKAVNFSAGGITDDIAPVYVYGTATRLNSDLDPNTNANLTWTFKVEPGFDYFVRFHFCNIIVDPFGFERQIRFDIFVNSEKVRTIDMTEVLNGTFGAPFFVDAVMRKAKSREGFLNLSIGLVMDVSSYPVSFINGFEISKLSNDKRSLDAFDAILPDGSSSNKSSNTSVGLIAGLSAALCVALVFGVVVSWWCIRKRRRRNRQMQTVHSRGDDHQIKKNETGESLIFSSSKIGYRYPLALIKEATDDFDESLVIGVGGFGKVYKGVLRDKTEVAVKRGAPQSRQGLAEFKTEVEMLTQFRHRHLVSLIGYCDENSEMIIVYEYMEKGTLKDHLYDLDDKPRLSWRQRLEICVGAARGLHYLHTGSTRAIIHRDVKSANILLDDNFMAKVADFGLSKTGPDLDQTHVSTAVKGSFGYLDPEYLTRQQLTEKSDVYSFGVVMLEVVCGRPVIDPSLPREKVNLIEWAMKLVKKGKLEDIIDPFLVGKVKLEEVKKYCEVTEKCLSQNGIERPAMGDLLWNLEFMLQVQAKDEKAAMVDDKPEASVVGSTMQFSVNGVGDIAGVSMSKVFAQMVREETR

SEQ ID NO: 96677 - protein, 617 aa, Arabidopsis thaliana
  peptide (1)..(617): Ceres Seq. ID no. 12734291
  misc_feature (1)..(581): Homolog of NCBI NO: 15231393 NR Description: receptor protein kinase -like; protein id:
  misc_feature (583)..(617): Homolog of NCBI NO: 15231393 NR Description: receptor protein kinase -like; protein id:
  misc_feature (1)..(606): Homolog of NCBI NO: 15238498 NR Description: receptor-like protein kinase precursor - like;
  misc_feature (1)..(615): Homolog of NCBI NO: 24796812 NR Description: putative receptor-like protein kinase [Oryza
  misc_feature (1)..(611): Homolog of NCBI NO: 25553554 NR Description: OSJNBa0038F22.1 [Oryza sativa (japonica
  misc_feature (1)..(611): Homolog of NCBI NO: 34898020 NR Description: Similar to putative receptor-like protein kinase
  misc_feature (1)..(250): Homolog of NCBI NO: 15240228 NR Description: receptor-like protein kinase precursor - like; id: At5g61350.1 [Arabidopsis thaliana]
  misc_feature (258)..(584): Homolog of NCBI NO: 15240228 NR Description: receptor-like protein kinase precursor - like; id: At5g61350.1 [Arabidopsis thaliana]
  misc_feature (1)..(589): Homolog of NCBI NO: 15239630 NR Description: receptor-protein kinase-like protein; protein id:
  misc_feature (1)..(567): Homolog of NCBI NO: 15226565 NR Description: putative protein kinase; protein id: At2g21480.1
METVSRVNMGNLSVSRDQDKLWRQWDSDSAYKAHFGTPVMNLKAVNFSAGGITDDIAPVYVYGTATRLNSDLDPNTNANLTWTFKVEPGFDYFVRFHFCNIIVDPFGFERQIRFDIFVNSEKVRTIDMTEVLNGTFGAPFFVDAVMRKAKSREGFLNLSIGLVMDVSSYPVSFINGFEISKLSNDKRSLDAFDAILPDGSSSNKSSNTSVGLIAGLSAALCVALVFGVVVSWWCIRKRRRRNRQMQTVHSRGDDHQIKKNETGESLIFSSSKIGYRYPLALIKEATDDFDESLVIGVGGFGKVYKGVLRDKTEVAVKRGAPQSRQGLAEFKTEVEMLTQFRHRHLVSLIGYCDENSEMIIVYEYMEKGTLKDHLYDLDDKPRLSWRQRLEICVGAARGLHYLHTGSTRAIIHRDVKSANILLDDNFMAKVADFGLSKTGPDLDQTHVSTAVKGSFGYLDPEYLTRQQLTEKSDVYSFGVVMLEVVCGRPVIDPSLPREKVNLIEWAMKLVKKGKLEDIIDPFLVGKVKLEEVKKYCEVTEKCLSQNGIERPAMGDLLWNLEFMLQVQAKDEKAAMVDDKPEASVVGSTMQFSVNGVGDIAGVSMSKVFAQMVREETR

SEQ ID NO: 96678 - protein, 609 aa, Arabidopsis thaliana
  peptide (1)..(609): Ceres Seq. ID no. 12734292
  misc_feature (1)..(573): Homolog of NCBI NO: 15231393 NR Description: receptor protein kinase -like; protein id:
  misc_feature (575)..(609): Homolog of NCBI NO: 15231393 NR Description: receptor protein kinase -like; protein id:
  misc_feature (1)..(598): Homolog of NCBI NO: 15238498 NR Description: receptor-like protein kinase precursor - like;
  misc_feature (1)..(607): Homolog of NCBI NO: 24796812 NR Description: putative receptor-like protein kinase [Oryza
  misc_feature (1)..(603): Homolog of NCBI NO: 25553554 NR Description: OSJNBa0038F22.1 [Oryza sativa (japonica
  misc_feature (1)..(603): Homolog of NCBI NO: 34898020 NR Description: Similar to putative receptor-like protein kinase
  misc_feature (1)..(242): Homolog of NCBI NO: 15240228 NR Description: receptor-like protein kinase precursor - like; id: At5g61350.1 [Arabidopsis thaliana]
  misc_feature (250)..(576): Homolog of NCBI NO: 15240228 NR Description: receptor-like protein kinase precursor - like; id: At5g61350.1 [Arabidopsis thaliana]
  misc_feature (1)..(581): Homolog of NCBI NO: 15239630 NR Description: receptor-protein kinase-like protein; protein id:
  misc_feature (1)..(559): Homolog of NCBI NO: 15226565 NR Description: putative protein kinase; protein id: At2g21480.1
MGNLSVSRDQDKLWRQWDSDSAYKAHFGTPVMNLKAVNFSAGGITDDIAPVYVYGTATRLNSDLDPNTNANLTWTFKVEPGFDYFVRFHFCNIIVDPFGFERQIRFDIFVNSEKVRTIDMTEVLNGTFGAPFFVDAVMRKAKSREGFLNLSIGLVMDVSSYPVSFINGFEISKLSNDKRSLDAFDAILPDGSSSNKSSNTSVGLIAGLSAALCVALVFGVVVSWWCIRKRRRRNRQMQTVHSRGDDHQIKKNETGESLIFSSSKIGYRYPLALIKEATDDFDESLVIGVGGFGKVYKGVLRDKTEVAVKRGAPQSRQGLAEFKTEVEMLTQFRHRHLVSLIGYCDENSEMIIVYEYMEKGTLKDHLYDLDDKPRLSWRQRLEICVGAARGLHYLHTGSTRAIIHRDVKSANILLDDNFMAKVADFGLSKTGPDLDQTHVSTAVKGSFGYLDPEYLTRQQLTEKSDVYSFGVVMLEVVCGRPVIDPSLPREKVNLIEWAMKLVKKGKLEDIIDPFLVGKVKLEEVKKYCEVTEKCLSQNGIERPAMGDLLWNLEFMLQVQAKDEKAAMVDDKPEASVVGSTMQFSVNGVGDIAGVSMSKVFAQMVREETR

SEQ ID NO: 96679 - DNA, 987 bp, Arabidopsis thaliana
  misc_feature (1)..(987): Ceres Seq. ID no. 12734293
  misc_feature: MA Experiment ID: 20000185 Result: Up-regulated in Transcription
  misc_feature: MA Experiment 20000185 PARAMETER Experiment Name: At_Roots__P Parameter: Age (day) Value: 7 vs. 21
  misc_feature: MA Experiment 20000185 PARAMETER Experiment Name: At_Roots__P Parameter: Organism Value: A. thaliana
  misc_feature: MA Experiment 20000185 PARAMETER Experiment Name: At_Roots__P Parameter: Tissue Value: Roots vs. Whole Plant
  misc_feature: MA Experiment ID: 20000439 Result: Up-regulated in Transcription
  misc_feature: MA Experiment 20000439 PARAMETER Experiment Name: At_Roots__P Parameter: Age (day) Value: 14 vs. 21
  misc_feature: MA Experiment 20000439 PARAMETER Experiment Name: At_Roots__P Parameter: Organism Value: A. thaliana
  misc_feature: MA Experiment 20000439 PARAMETER Experiment Name: At_Roots__P Parameter: Tissue Value: Roots vs. Whole Plant
atggcggcttatctagagcgatgcgacagtgtagaagaagattacattgatatggaagtaacttctttcacaaacctcgtacgtaaaactctgagcaacaactaccctcgagagttcgagttccaaatgtctcatctttgtcctcttgagatagacaaaaccacttcccctgcggacgaactcttctacaaaggcaagcttctccctcttcacttacctccacgtctccaaatggtccaaaagattctagaagattacaccttcgacgacgaattctacagcactcctttagccaccggaacggttacaactccagtgacgagcaacactccgttcgagtcctgcaccgtctctccggcagagtcttgccaagtgagtaaagagcttaaccctgaagactacttcctagaatattcagattcattggaggaggacgatgagaagaagaaatcttggaccacgaaactaagattgatgaagcagtcaagtctcggaacgaagattaaagcttcgagagcttatctaagatcgttctttggtaagacaagttgttctgatgagtcatcatgcgcgtcttccgctgcgagagttgcagacgaagattcggttttgaggtattcgcgagtaaagccttttggacagatcaaaacagagagacctaaaaaacagagtaatggttctgtttccggaagccataggagatcattttcagtttctatgaggaggcaagctgccaagagttctaacaacaaatcatcgaatagtttagggtttcgtccgttgcagtttttgaagagaagtacgagttcgagttctgaaattgagaattctatccaaggagctatcttgcattgcaagcaatcacagcagcagaagcagaaacagaaacagtatagtactgttaacgaggtcggattctgttcgttgtcagcgtcaagaatcgcagctagggatgatcaagaatgggctcagatgtttaggggctaa

SEQ ID NO: 96680 - protein, 328 aa, Arabidopsis thaliana
  peptide (1)..(328): Ceres Seq. ID no. 12734294
  misc_feature (1)..(328): Homolog of NCBI NO: 15225080 NR Description: unknown protein; protein id: At2g39370.1
  misc_feature (12)..(288): Homolog of NCBI NO: 15228126 NR Description: unknown protein; protein id: At2g37380.1
  misc_feature (37)..(317): Homolog of NCBI NO: 34908072 NR Description: P0506B12.25 [Oryza sativa (japonica
  misc_feature (148)..(324): Homolog of NCBI NO: 8099142 NR Description: hypothetical protein [Oryza sativa]
  misc_feature (11)..(85): Homolog of NCBI NO: 8099142 NR Description: hypothetical protein [Oryza sativa]
  misc_feature (38)..(97): Homolog of NCBI NO: 15239627 NR Description: putative protein; protein id: At5g26230.1
MAAYLERCDSVEEDYIDMEVTSFTNLVRKTLSNNYPREFEFQMSHLCPLEIDKTTSPADELFYKGKLLPLHLPPRLQMVQKILEDYTFDDEFYSTPLATGTVTTPVTSNTPFESCTVSPAESCQVSKELNPEDYFLEYSDSLEEDDEKKKSWTTKLRLMKQSSLGTKIKASRAYLRSFFGKTSCSDESSCASSAARVADEDSVLRYSRVKPFGQIKTERPKKQSNGSVSGSHRRSFSVSMRRQAAKSSNNKSSNSLGFRPLQFLKRSTSSSSEIENSIQGAILHCKQSQQQKQKQKQYSTVNEVGFCSLSASRIAARDDQEWAQMFRG

SEQ ID NO: 96681 - protein, 311 aa, Arabidopsis thaliana
  peptide (1)..(311): Ceres Seq. ID no. 12734295
  misc_feature (1)..(311): Homolog of NCBI NO: 15225080 NR Description: unknown protein; protein id: At2g39370.1
  misc_feature (1)..(271): Homolog of NCBI NO: 15228126 NR Description: unknown protein; protein id: At2g37380.1
  misc_feature (20)..(300): Homolog of NCBI NO: 34908072 NR Description: P0506B12.25 [Oryza sativa (japonica
  misc_feature (131)..(307): Homolog of NCBI NO: 8099142 NR Description: hypothetical protein [Oryza sativa]
  misc_feature (1)..(68): Homolog of NCBI NO: 8099142 NR Description: hypothetical protein [Oryza sativa]
  misc_feature (21)..(80): Homolog of NCBI NO: 15239627 NR Description: putative protein; protein id: At5g26230.1
MEVTSFTNLVRKTLSNNYPREFEFQMSHLCPLEIDKTTSPADELFYKGKLLPLHLPPRLQMVQKILEDYTFDDEFYSTPLATGTVTTPVTSNTPFESCTVSPAESCQVSKELNPEDYFLEYSDSLEEDDEKKKSWTTKLRLMKQSSLGTKIKASRAYLRSFFGKTSCSDESSCASSAARVADEDSVLRYSRVKPFGQIKTERPKKQSNGSVSGSHRRSFSVSMRRQAAKSSNNKSSNSLGFRPLQFLKRSTSSSSEIENSIQGAILHCKQSQQQKQKQKQYSTVNEVGFCSLSASRIAARDDQEWAQMFRG

SEQ ID NO: 96682 - protein, 286 aa, Arabidopsis thaliana
  peptide (1)..(286): Ceres Seq. ID no. 12734296
  misc_feature (1)..(286): Homolog of NCBI NO: 15225080 NR Description: unknown protein; protein id: At2g39370.1
  misc_feature (1)..(246): Homolog of NCBI NO: 15228126 NR Description: unknown protein; protein id: At2g37380.1
  misc_feature (1)..(275): Homolog of NCBI NO: 34908072 NR Description: P0506B12.25 [Oryza sativa (japonica
  misc_feature (106)..(282): Homolog of NCBI NO: 8099142 NR Description: hypothetical protein [Oryza sativa]
  misc_feature (1)..(43): Homolog of NCBI NO: 8099142 NR Description: hypothetical protein [Oryza sativa]
  misc_feature (1)..(55): Homolog of NCBI NO: 15239627 NR Description: putative protein; protein id: At5g26230.1
MSHLCPLEIDKTTSPADELFYKGKLLPLHLPPRLQMVQKILEDYTFDDEFYSTPLATGTVTTPVTSNTPFESCTVSPAESCQVSKELNPEDYFLEYSDSLEEDDEKKKSWTTKLRLMKQSSLGTKIKASRAYLRSFFGKTSCSDESSCASSAARVADEDSVLRYSRVKPFGQIKTERPKKQSNGSVSGSHRRSFSVSMRRQAAKSSNNKSSNSLGFRPLQFLKRSTSSSSEIENSIQGAILHCKQSQQQKQKQKQYSTVNEVGFCSLSASRIAARDDQEWAQMFRG

SEQ ID NO: 96683 - DNA, 1650 bp, Arabidopsis thaliana
  misc_feature (1)..(1650): Ceres Seq. ID no. 12734319
  misc_feature: MA Experiment ID: 20000234 Result: Up-regulated in Transcription
  misc_feature: MA Experiment 20000234 PARAMETER Experiment Name: At_Siliques_P Parameter: Age (day) Value: 21
  misc_feature: MA Experiment 20000234 PARAMETER Experiment Name: At_Siliques_P Parameter: Organism Value: A. thaliana
  misc_feature: MA Experiment 20000234 PARAMETER Experiment Name: At_Siliques_P Parameter: Plant Line Value: WS
  misc_feature: MA Experiment 20000234 PARAMETER Experiment Name: At_Siliques_P Parameter: Tissue Value: Less Than 5mm Siliques vs. Whole Plant
  misc_feature: MA Experiment ID: 20000235 Result: Up-regulated in Transcription
  misc_feature: MA Experiment 20000235 PARAMETER Experiment Name: At_Siliques_P Parameter: Age (day) Value: 21
  misc_feature: MA Experiment 20000235 PARAMETER Experiment Name: At_Siliques_P Parameter: Organism Value: A. thaliana
  misc_feature: MA Experiment 20000235 PARAMETER Experiment Name: At_Siliques_P Parameter: Plant Line Value: WS
  misc_feature: MA Experiment 20000235 PARAMETER Experiment Name: At_Siliques_P Parameter: Tissue Value: 5-10mm Siliques vs. Whole Plant
  misc_feature: MA Experiment ID: 20001760 Result: Up-regulated in Transcription
  misc_feature: MA Experiment 20001760 PARAMETER Experiment Name: At_50mM_NH4NO3_L-to-H_P Parameter: Timepoint (hr) Value: 2
  misc_feature: MA Experiment 20001760 PARAMETER Experiment Name: At_50mM_NH4NO3_L-to-H_P Parameter: Tissue Value: Siliques
  misc_feature: MA Experiment 20001760 PARAMETER Experiment Name: At_50mM_NH4NO3_L-to-H_P Parameter: Treatment Value: 50mM NH4NO3 vs 100mM Mannitol
  misc_feature: MA Experiment ID: 20001910 Result: Up-regulated in Transcription
  misc_feature: MA Experiment 20001910 PARAMETER Experiment Name: At_Drought_Reproduction_P Parameter: Age (day) Value: 37
  misc_feature: MA Experiment 20001910 PARAMETER Experiment Name: At_Drought_Reproduction_P Parameter: Organism Value: A. thaliana
  misc_feature: MA Experiment 20001910 PARAMETER Experiment Name: At_Drought_Reproduction_P Parameter: Plant Line Value: WS
  misc_feature: MA Experiment 20001910 PARAMETER Experiment Name: At_Drought_Reproduction_P Parameter: Timepoint (day) Value: 7
  misc_feature: MA Experiment 20001910 PARAMETER Experiment Name: At_Drought_Reproduction_P Parameter: Tissue Value: Flowers
  misc_feature: MA Experiment 20001910 PARAMETER Experiment Name: At_Drought_Reproduction_P Parameter: Treatment Value: Drought vs. No Drought
atggccaaaacgattcggtctttcattctccctttcctcctcatagtcgccggcgtgatctttcaactctcagccgtgacttccgccattggtatcaactatggaacactagggaaccttcaacctccacaacaagtggttgacttcatcaagacaaagaccacttttgacagtgtcaagatctatgatgctaatcccgacatcctccgagccttcgcgggctctgaaatcaacatcaccatcatggtccctaacggtaacattcctgccatggtcaacgttgcaaatgctcgtcaatgggtcgctgccaatgtcttaccgtttcagcagcagatcaagttcaaatacgtttgtgtcggaaacgagattcttgctagtaacgacaataacttgatatcaaatcttgtaccagcgatgcaaagtcttaacgaagctttaaaagcttccaatctcacttatatcaaggtgacaactccacatgcatttaccataagctataaccgtaatacaccaagtgagagcagatttactaacgatcaaaaagatatttttacaaagatcttggaatttcatcgtcaggctaagtccccattcatgatcaacgcctacacttttttcacgatggacacgaacaatgtcaattacgcaatatttggtccatcaaatgcaataacggataccaatacacaacaaacctacaccaacatgtttgacgcagtcatggatgcaacatattctgctatgaaagctcttggctatggcgacgtagatatcgcggtaggggagaccggttggcccacggcttgtgacgcttcatggtgctcacctcaaaacgctgaaaactacaacctcaatatcatcaagcgtgcacaagttatagggacacctctaatgcccaaccgccacatcgatatcttcatatttgcattgttcaatgaagatggaaaacccggtccaacacgtgagagaaattgggggatatttaaaccggatttttcaccgatgtatgatgttggagttctaaaaggcggtggaagcccgcttccgtttccaccgataaacaacaatggaaaatggtgtgtgggaaaaccagaagcgacgttaatgcaactacaagcaaatattgattgggtatgcagccatggtattgattgtacaccaatctcacctggtggcatatgttttgacaacaacaacatgacgactcggtcctcgtttattatgaacgcttattaccaaagcaagggatgcgttgatgttgtctgtgattttagcggtactggcatcgttaccagtaccaacccaagcactagcacatgccctataccgataggggaaggtggcggcggcaatggcgcaaaaagcaaaagtgcaaattggtgtatggcgaaacaagaagcgacagagacacaactacaagctaatattgattgggtgtgtagccaaggtattgattgtaaaccaatatcacctggtggcatatgttttgataacaacaacatgaagactcgatccacgttcataatgaacgcttattacgagagcaaaggatactccaaagacgcttgtgacttccgtggtagtggcatcgtcactactaccaacccaagcactagcacatgcgtcgtaccagcatcagtaacgctctga

SEQ ID NO: 96684 - protein, 549 aa, Arabidopsis thaliana
  peptide (1)..(549): Ceres Seq. ID no. 12734320
  misc_feature (30)..(340): Pfam Name: Glycosyl hydrolases family 17 Pfam Description: Glycosyl hydrolases family 17
  misc_feature (1)..(549): Homolog of NCBI NO: 15225516 NR Description: glycosyl hydrolase family 17; protein id:
  misc_feature (1)..(440): Homolog of NCBI NO: 15028379 NR Description: putative beta-1,3-glucanase [Arabidopsis thaliana]
  misc_feature (1)..(440): Homolog of NCBI NO: 15233271 NR Description: glycosyl hydrolase family 17 protein id: At3g55430.1, supported by cDNA: 8980., supported by
  misc_feature (1)..(440): Homolog of NCBI NO: 21617932 NR Description: beta-1,3-glucanase-like protein [Arabidopsis
  misc_feature (11)..(442): Homolog of NCBI NO: 11279328 NR Description: glucan endo-1,3-beta-D-glucosidase (EC 3.2.1.39)
  misc_feature (9)..(440): Homolog of NCBI NO: 1706551 NR Description: GLUCAN ENDO-1,3-BETA-GLUCOSIDASE PRECURSOR
  misc_feature (1)..(349): Homolog of NCBI NO: 13548679 NR Description: endo-1,3-beta-glucanase-like protein [Pyrus
  misc_feature (10)..(436): Homolog of NCBI NO: 15226720 NR Description: glycosyl hydrolase family 17; protein id:
  misc_feature (1)..(445): Homolog of NCBI NO: 14279169 NR Description: beta-1,3-glucanase-like protein [Olea europaea]
  misc_feature (24)..(440): Homolog of NCBI NO: 31126737 NR Description: putative beta 1,3-glucanase [Oryza sativa
MAKTIRSFILPFLLIVAGVIFQLSAVTSAIGINYGTLGNLQPPQQVVDFIKTKTTFDSVKIYDANPDILRAFAGSEINITIMVPNGNIPAMVNVANARQWVAANVLPFQQQIKFKYVCVGNEILASNDNNLISNLVPAMQSLNEALKASNLTYIKVTTPHAFTISYNRNTPSESRFTNDQKDIFTKILEFHRQAKSPFMINAYTFFTMDTNNVNYAIFGPSNAITDTNTQQTYTNMFDAVMDATYSAMKALGYGDVDIAVGETGWPTACDASWCSPQNAENYNLNIIKRAQVIGTPLMPNRHIDIFIFALFNEDGKPGPTRERNWGIFKPDFSPMYDVGVLKGGGSPLPFPPINNNGKWCVGKPEATLMQLQANIDWVCSHGIDCTPISPGGICFDNNNMTTRSSFIMNAYYQSKGCVDVVCDFSGTGIVTSTNPSTSTCPIPIGEGGGGNGAKSKSANWCMAKQEATETQLQANIDWVCSQGIDCKPISPGGICFDNNNMKTRSTFIMNAYYESKGYSKDACDFRGSGIVTTTNPSTSTCVVPASVTL

SEQ ID NO: 96685 - protein, 468 aa, Arabidopsis thaliana
  peptide (1)..(468): Ceres Seq. ID no. 12734321
  misc_feature (1)..(259): Pfam Name: Glycosyl hydrolases family 17 Pfam Description: Glycosyl hydrolases family 17
  misc_feature (1)..(468): Homolog of NCBI NO: 15225516 NR Description: glycosyl hydrolase family 17; protein id:
  misc_feature (1)..(359): Homolog of NCBI NO: 15028379 NR Description: putative beta-1,3-glucanase [Arabidopsis thaliana]
  misc_feature (1)..(359): Homolog of NCBI NO: 15233271 NR Description: glycosyl hydrolase family 17 protein id: At3g55430.1, supported by cDNA: 8980., supported by
  misc_feature (1)..(359): Homolog of NCBI NO: 21617932 NR Description: beta-1,3-glucanase-like protein [Arabidopsis
  misc_feature (1)..(361): Homolog of NCBI NO: 11279328 NR Description: glucan endo-1,3-beta-D-glucosidase (EC 3.2.1.39)
  misc_feature (1)..(359): Homolog of NCBI NO: 1706551 NR Description: GLUCAN ENDO-1,3-BETA-GLUCOSIDASE PRECURSOR
  misc_feature (1)..(268): Homolog of NCBI NO: 13548679 NR Description: endo-1,3-beta-glucanase-like protein [Pyrus
  misc_feature (1)..(355): Homolog of NCBI NO: 15226720 NR Description: glycosyl hydrolase family 17; protein id:
  misc_feature (1)..(364): Homolog of NCBI NO: 14279169 NR Description: beta-1,3-glucanase-like protein [Olea europaea]
  misc_feature (1)..(359): Homolog of NCBI NO: 31126737 NR Description: putative beta 1,3-glucanase [Oryza sativa
MVPNGNIPAMVNVANARQWVAANVLPFQQQIKFKYVCVGNEILASNDNNLISNLVPAMQSLNEALKASNLTYIKVTTPHAFTISYNRNTPSESRFTNDQKDIFTKILEFHRQAKSPFMINAYTFFTMDTNNVNYAIFGPSNAITDTNTQQTYTNMFDAVMDATYSAMKALGYGDVDIAVGETGWPTACDASWCSPQNAENYNLNIIKRAQVIGTPLMPNRHIDIFIFALFNEDGKPGPTRERNWGIFKPDFSPMYDVGVLKGGGSPLPFPPINNNGKWCVGKPEATLMQLQANIDWVCSHGIDCTPISPGGICFDNNNMTTRSSFIMNAYYQSKGCVDVVCDFSGTGIVTSTNPSTSTCPIPIGEGGGGNGAKSKSANWCMAKQEATETQLQANIDWVCSQGIDCKPISPGGICFDNNNMKTRSTFIMNAYYESKGYSKDACDFRGSGIVTTTNPSTSTCVVPASVTL

SEQ ID NO: 96686 - protein, 459 aa, Arabidopsis thaliana
  peptide (1)..(459): Ceres Seq. ID no. 12734322
  misc_feature (1)..(250): Pfam Name: Glycosyl hydrolases family 17 Pfam Description: Glycosyl hydrolases family 17
  misc_feature (1)..(459): Homolog of NCBI NO: 15225516 NR Description: glycosyl hydrolase family 17; protein id:
  misc_feature (1)..(350): Homolog of NCBI NO: 15028379 NR Description: putative beta-1,3-glucanase [Arabidopsis thaliana]
  misc_feature (1)..(350): Homolog of NCBI NO: 15233271 NR Description: glycosyl hydrolase family 17 protein id: At3g55430.1, supported by cDNA: 8980., supported by
  misc_feature (1)..(350): Homolog of NCBI NO: 21617932 NR Description: beta-1,3-glucanase-like protein [Arabidopsis
  misc_feature (1)..(352): Homolog of NCBI NO: 11279328 NR Description: glucan endo-1,3-beta-D-glucosidase (EC 3.2.1.39)
  misc_feature (1)..(350): Homolog of NCBI NO: 1706551 NR Description: GLUCAN ENDO-1,3-BETA-GLUCOSIDASE PRECURSOR
  misc_feature (1)..(259): Homolog of NCBI NO: 13548679 NR Description: endo-1,3-beta-glucanase-like protein [Pyrus
  misc_feature (1)..(346): Homolog of NCBI NO: 15226720 NR Description: glycosyl hydrolase family 17; protein id:
  misc_feature (1)..(355): Homolog of NCBI NO: 14279169 NR Description: beta-1,3-glucanase-like protein [Olea europaea]
  misc_feature (1)..(350): Homolog of NCBI NO: 31126737 NR Description: putative beta 1,3-glucanase [Oryza sativa
MVNVANARQWVAANVLPFQQQIKFKYVCVGNEILASNDNNLISNLVPAMQSLNEALKASNLTYIKVTTPHAFTISYNRNTPSESRFTNDQKDIFTKILEFHRQAKSPFMINAYTFFTMDTNNVNYAIFGPSNAITDTNTQQTYTNMFDAVMDATYSAMKALGYGDVDIAVGETGWPTACDASWCSPQNAENYNLNIIKRAQVIGTPLMPNRHIDIFIFALFNEDGKPGPTRERNWGIFKPDFSPMYDVGVLKGGGSPLPFPPINNNGKWCVGKPEATLMQLQANIDWVCSHGIDCTPISPGGICFDNNNMTTRSSFIMNAYYQSKGCVDVVCDFSGTGIVTSTNPSTSTCPIPIGEGGGGNGAKSKSANWCMAKQEATETQLQANIDWVCSQGIDCKPISPGGICFDNNNMKTRSTFIMNAYYESKGYSKDACDFRGSGIVTTTNPSTSTCVVPASVTL

SEQ ID NO: 96687 - DNA, 1322 bp, Arabidopsis thaliana
  misc_feature (1)..(1322): Ceres Seq. ID no. 12734327
  misc_feature: MA Experiment ID: 108569 Result: Up-regulated in Transcription
  misc_feature: MA Experiment 108569 PARAMETER Experiment Name: At_0.001%_MeJA__cDNA_P Parameter: Timepoint (hr) Value: 6
  misc_feature: MA Experiment 108569 PARAMETER Experiment Name: At_0.001%_MeJA__cDNA_P Parameter: Tissue Value: Aerial
  misc_feature: MA Experiment 108569 PARAMETER Experiment Name: At_0.001%_MeJA__cDNA_P Parameter: Treatment Value: 0.001% MeJA vs. No Treatment
  misc_feature: MA Experiment ID: 108573 Result: Down-regulated in Transcription
  misc_feature: MA Experiment 108573 PARAMETER Experiment Name: At_Drought_cDNA_P Parameter: Timepoint (hr) Value: 6
  misc_feature: MA Experiment 108573 PARAMETER Experiment Name: At_Drought_cDNA_P Parameter: Tissue Value: Aerial
  misc_feature: MA Experiment 108573 PARAMETER Experiment Name: At_Drought_cDNA_P Parameter: Treatment Value: Drought vs. No Drought
  misc_feature: MA Experiment ID: 108576 Result: Down-regulated in Transcription
  misc_feature: MA Experiment 108576 PARAMETER Experiment Name: At_42deg_Heat_cDNA_P Parameter: Temperature (deg C) Value: 42 vs. 22
  misc_feature: MA Experiment 108576 PARAMETER Experiment Name: At_42deg_Heat_cDNA_P Parameter: Timepoint (hr) Value: 1
  misc_feature: MA Experiment 108576 PARAMETER Experiment Name: At_42deg_Heat_cDNA_P Parameter: Tissue Value: Aerial
  misc_feature: MA Experiment ID: 20000169 Result: Up-regulated in Transcription
  misc_feature: MA Experiment 20000169 PARAMETER Experiment Name: At_100uM_ABA_P Parameter: Age (day) Value: 14
  misc_feature: MA Experiment 20000169 PARAMETER Experiment Name: At_100uM_ABA_P Parameter: Organism Value: A. thaliana
  misc_feature: MA Experiment 20000169 PARAMETER Experiment Name: At_100uM_ABA_P Parameter: Plant Line Value: WS
  misc_feature: MA Experiment 20000169 PARAMETER Experiment Name: At_100uM_ABA_P Parameter: Timepoint (hr) Value: 6
  misc_feature: MA Experiment 20000169 PARAMETER Experiment Name: At_100uM_ABA_P Parameter: Tissue Value: Aerial
  misc_feature: MA Experiment 20000169 PARAMETER Experiment Name: At_100uM_ABA_P Parameter: Treatment Value: 100uM ABA vs. No Treatment
  misc_feature: MA Experiment ID: 20000171 Result: Down-regulated in Transcription
  misc_feature: MA Experiment 20000171 PARAMETER Experiment Name: At_42deg_Heat_P Parameter: Age (day) Value: 14
  misc_feature: MA Experiment 20000171 PARAMETER Experiment Name: At_42deg_Heat_P Parameter: Organism Value: A. thaliana
  misc_feature: MA Experiment 20000171 PARAMETER Experiment Name: At_42deg_Heat_P Parameter: Plant Line Value: WS
  misc_feature: MA Experiment 20000171 PARAMETER Experiment Name: At_42deg_Heat_P Parameter: Temperature (deg C) Value: 42 vs. 22
  misc_feature: MA Experiment 20000171 PARAMETER Experiment Name: At_42deg_Heat_P Parameter: Timepoint (hr) Value: 1
  misc_feature: MA Experiment 20000171 PARAMETER Experiment Name: At_42deg_Heat_P Parameter: Tissue Value: Aerial
  misc_feature: MA Experiment ID: 20000173 Result: Down-regulated in Transcription
  misc_feature: MA Experiment 20000173 PARAMETER Experiment Name: At_42deg_Heat_P Parameter: Age (day) Value: 14
  misc_feature: MA Experiment 20000173 PARAMETER Experiment Name: At_42deg_Heat_P Parameter: Organism Value: A. thaliana
  misc_feature: MA Experiment 20000173 PARAMETER Experiment Name: At_42deg_Heat_P Parameter: Plant Line Value: WS
  misc_feature: MA Experiment 20000173 PARAMETER Experiment Name: At_42deg_Heat_P Parameter: Temperature (deg C) Value: 42 vs. 22
  misc_feature: MA Experiment 20000173 PARAMETER Experiment Name: At_42deg_Heat_P Parameter: Timepoint (hr) Value: 6
  misc_feature: MA Experiment 20000173 PARAMETER Experiment Name: At_42deg_Heat_P Parameter: Tissue Value: Aerial
  misc_feature: MA Experiment ID: 20000179 Result: Down-regulated in Transcription
  misc_feature: MA Experiment 20000179 PARAMETER Experiment Name: At_Germinating_Seeds_P Parameter: Age (hr) Value: 6 vs. 0
  misc_feature: MA Experiment 20000179 PARAMETER Experiment Name: At_Germinating_Seeds_P Parameter: Tissue Value: Germinating Seeds
  misc_feature: MA Experiment ID: 20000184 Result: Up-regulated in Transcription
  misc_feature: MA Experiment 20000184 PARAMETER Experiment Name: At_Shoots__P Parameter: Age (day) Value: 7
  misc_feature: MA Experiment 20000184 PARAMETER Experiment Name: At_Shoots__P Parameter: Tissue Value: Shoots vs. Whole Plant
  misc_feature: MA Experiment ID: 20000227 Result: Down-regulated in Transcription
  misc_feature: MA Experiment 20000227 PARAMETER Experiment Name: At_Root-Tips-vs-Tops_P Parameter: Tissue Value: Root Tips vs. Root Tops
  misc_feature: MA Experiment ID: 20000234 Result: Up-regulated in Transcription
  misc_feature: MA Experiment 20000234 PARAMETER Experiment Name: At_Siliques_P Parameter: Age (day) Value: 21
  misc_feature: MA Experiment 20000234 PARAMETER Experiment Name: At_Siliques_P Parameter: Organism Value: A. thaliana
  misc_feature: MA Experiment 20000234 PARAMETER Experiment Name: At_Siliques_P Parameter: Plant Line Value: WS
  misc_feature: MA Experiment 20000234 PARAMETER Experiment Name: At_Siliques_P Parameter: Tissue Value: Less Than 5mm Siliques vs. Whole Plant
  misc_feature: MA Experiment ID: 20000264 Result: Up-regulated in Transcription
  misc_feature: MA Experiment 20000264 PARAMETER Experiment Name: At_Open_Flower_P Parameter: Age (day) Value: 21
  misc_feature: MA Experiment 20000264 PARAMETER Experiment Name: At_Open_Flower_P Parameter: Plant Line Value: WS
  misc_feature: MA Experiment 20000264 PARAMETER Experiment Name: At_Open_Flower_P Parameter: Tissue Value: Open Flower vs. Whole Plant
  misc_feature: MA Experiment ID: 20000439 Result: Up-regulated in Transcription
  misc_feature: MA Experiment 20000439 PARAMETER Experiment Name: At_Roots__P Parameter: Age (day) Value: 14 vs. 21
  misc_feature: MA Experiment 20000439 PARAMETER Experiment Name: At_Roots__P Parameter: Organism Value: A. thaliana
  misc_feature: MA Experiment 20000439 PARAMETER Experiment Name: At_Roots__P Parameter: Tissue Value: Roots vs. Whole Plant
  misc_feature: MA Experiment ID: 20000444 Result: Up-regulated in Transcription
  misc_feature: MA Experiment 20000444 PARAMETER Experiment Name: At_100uM_NAA__P Parameter: Age (day) Value: 14
  misc_feature: MA Experiment 20000444 PARAMETER Experiment Name: At_100uM_NAA__P Parameter: Organism Value: A. thaliana
  misc_feature: MA Experiment 20000444 PARAMETER Experiment Name: At_100uM_NAA__P Parameter: Plant Line Value: WS
  misc_feature: MA Experiment 20000444 PARAMETER Experiment Name: At_100uM_NAA__P Parameter: Timepoint (hr) Value: 1
  misc_feature: MA Experiment 20000444 PARAMETER Experiment Name: At_100uM_NAA__P Parameter: Tissue Value: Aerial
  misc_feature: MA Experiment 20000444 PARAMETER Experiment Name: At_100uM_NAA__P Parameter: Treatment Value: 100uM NAA vs. No Treatment
  misc_feature: MA Experiment ID: 20000495 Result: Up-regulated in Transcription
  misc_feature: MA Experiment 20000495 PARAMETER Experiment Name: At_Guard_Cells_P Parameter: Harvest Date Value: 8/2/2002
  misc_feature: MA Experiment 20000495 PARAMETER Experiment Name: At_Guard_Cells_P Parameter: Organism Value: A. thaliana
  misc_feature: MA Experiment 20000495 PARAMETER Experiment Name: At_Guard_Cells_P Parameter: Tissue Value: Guard Cells vs. Leaves
  misc_feature: MA Experiment ID: 20000496 Result: Up-regulated in Transcription
  misc_feature: MA Experiment 20000496 PARAMETER Experiment Name: At_Guard_Cells_P Parameter: Harvest Date Value: 7/19/2002
  misc_feature: MA Experiment 20000496 PARAMETER Experiment Name: At_Guard_Cells_P Parameter: Organism Value: Canola
  misc_feature: MA Experiment 20000496 PARAMETER Experiment Name: At_Guard_Cells_P Parameter: Tissue Value: Guard Cells vs. Leaves
  misc_feature: MA Experiment ID: 20000573 Result: Down-regulated in Transcription
  misc_feature: MA Experiment 20000573 PARAMETER Experiment Name: At_100uM_ABA_Mutants__P Parameter: Organism Value: A. thaliana
  misc_feature: MA Experiment 20000573 PARAMETER Experiment Name: At_100uM_ABA_Mutants__P Parameter: Plant Line Value: CS22 vs. Ler wt
  misc_feature: MA Experiment 20000573 PARAMETER Experiment Name: At_100uM_ABA_Mutants__P Parameter: Timepoint (hr) Value: N/A
  misc_feature: MA Experiment 20000573 PARAMETER Experiment Name: At_100uM_ABA_Mutants__P Parameter: Tissue Value: Whole Plant
  misc_feature: MA Experiment 20000573 PARAMETER Experiment Name: At_100uM_ABA_Mutants__P Parameter: Treatment Value: None
  misc_feature: MA Experiment ID: 20001450 Result: Down-regulated in Transcription
  misc_feature: MA Experiment 20001450 PARAMETER Experiment Name: At_Far-red-induction_P Parameter: Age (day) Value: 7
  misc_feature: MA Experiment 20001450 PARAMETER Experiment Name: At_Far-red-induction_P Parameter: Light Value: Far-red vs. White
  misc_feature: MA Experiment 20001450 PARAMETER Experiment Name: At_Far-red-induction_P Parameter: Organism Value: A. thaliana
  misc_feature: MA Experiment 20001450 PARAMETER Experiment Name: At_Far-red-induction_P Parameter: Plant Line Value: Columbia
  misc_feature: MA Experiment 20001450 PARAMETER Experiment Name: At_Far-red-induction_P Parameter: Timepoint (hr) Value: 8
  misc_feature: MA Experiment 20001450 PARAMETER Experiment Name: At_Far-red-induction_P Parameter: Tissue Value: Whole Plant
  misc_feature: MA Experiment ID: 20001556 Result: Down-regulated in Transcription
  misc_feature: MA Experiment 20001556 PARAMETER Experiment Name: At_Drought_Soil_Dry_P Parameter: Age (day) Value: 26
  misc_feature: MA Experiment 20001556 PARAMETER Experiment Name: At_Drought_Soil_Dry_P Parameter: Organism Value: A. thaliana
  misc_feature: MA Experiment 20001556 PARAMETER Experiment Name: At_Drought_Soil_Dry_P Parameter: Plant Line Value: WS
  misc_feature: MA Experiment 20001556 PARAMETER Experiment Name: At_Drought_Soil_Dry_P Parameter: Post Timepoint (hr) Value: None
  misc_feature: MA Experiment 20001556 PARAMETER Experiment Name: At_Drought_Soil_Dry_P Parameter: Post-Treatment Value: None
  misc_feature: MA Experiment 20001556 PARAMETER Experiment Name: At_Drought_Soil_Dry_P Parameter: Timepoint (day) Value: 12
  misc_feature: MA Experiment 20001556 PARAMETER Experiment Name: At_Drought_Soil_Dry_P Parameter: Treatment Value: Drought vs. No Drought
accatcctcatctctcaatcaacaaacctaactctttctctatacaagagcgcaagctcgaaggcgctcttgttctttcttcattttctccttaacaatcaccctcatagtaactttaaaactctctgtttctagtaattcacacacaaaatggctattaaactagcaattctatttaccacatttgttctttttagcctcgccgacgctagaatccccggtatttactccggcggcgcatggcaaaacgcacacgccactttttacggtggcagcgacgcctccggcacaatgggaggagcttgtggttacggtaacctatacagccaagggtacgggaccaacacggctgctttgagtacggcgctgtttaacaatggtatgagttgtggagcctgctttgagctaaaatgcgccaacgaccctcaatggtgtcactcaggtagtccttcgatcctcatcaccgcaaccaatttctgcccaccaaacttggctcagcctagcgacaacggaggatggtgcaacccaccacgtgaacactttgacctagccatgcctgtcttccttaagatcgctcaatatcgcgccggcattgtccccgtctcataccgcagggtgccatgtagaaagagaggaggcataaggttcacaatcaacggtcaccgttacttcaacttggttctgatcactaacgtggctggagcaggagacatcgtgagggctagtgtgaaaggatcacggactggttggatgagtttgagcagaaactggggacaaaactggcaatctaatgctgttttggttggtcaagcactctctttccgtgtcacaggcagtgaccgtagaacatctacttcctggaacatggttccttctaactggcagtttggtcaaacctttgtcgggaagaatttcagggtttaaggcgagtttcgagaaactaaaatttggaggaaattcgagaaattaaagtggttcgagacaaaagaaaactctccgctaatttcgctattcctcctcctttttttttactaaattttatatatggaaaggagagaaaaatcaggggaaagtatctttgacttttgtgtgtgttttcacttttttaatgtttttttttttgggtttggtgttttaattgtgagtgataaagggggaaatgagggagaaagagaaagtgagtagctgaagtggctgtgagaacattttgtaacagcccgcagctattaaagtattttacatggtttggttgtaagttacaacttgtaacgtttaatctcgtgtaatcttaaaacatggttgtattattgatacttaatact

SEQ ID NO: 96688 - protein, 257 aa, Arabidopsis thaliana; identical to SEQ ID NO: 30296
  peptide (1)..(257): Ceres Seq. ID no. 12734328
  misc_feature (164)..(241): Pfam Name: Pollen allergen Pfam Description: Pollen allergen
  misc_feature (1)..(257): Homolog of NCBI NO: 15225530 NR Description: expansin, putative; protein id: At2g39700.1, by cDNA: 17353., supported by cDNA: gi_15294171, supported by gi_17065213, supported by cDNA: gi_20259979 [Arabidopsis
  misc_feature (1)..(257): Homolog of NCBI NO: 21553844 NR Description: Alpha-expansin 4 precursor (At-EXP4) (AtEx4)
  misc_feature (1)..(257): Homolog of NCBI NO: 15233283 NR Description: expansin, putative; protein id: At3g55500.1
  misc_feature (14)..(257): Homolog of NCBI NO: 29466643 NR Description: expansin [Prunus persica]
  misc_feature (17)..(257): Homolog of NCBI NO: 13898655 NR Description: expansin [Prunus cerasus]
  misc_feature (3)..(257): Homolog of NCBI NO: 31506015 NR Description: expansin [Sambucus nigra]
  misc_feature (3)..(257): Homolog of NCBI NO: 29467595 NR Description: expansin [Pyrus communis]
  misc_feature (1)..(257): Homolog of NCBI NO: 38046726 NR Description: alpha-expansin 1 [Populus tremula x Populus
  misc_feature (1)..(257): Homolog of NCBI NO: 20502784 NR Description: expansin 11 precursor [Rumex palustris]
  misc_feature (1)..(257): Homolog of NCBI NO: 20502786 NR Description: expansin 12 precursor [Rumex palustris]

SEQ ID NO: 96689 - protein, 210 aa, Arabidopsis thaliana; identical to SEQ ID NO: 30297
  peptide (1)..(210): Ceres Seq. ID no. 12734329
  misc_feature (117)..(194): Pfam Name: Pollen allergen Pfam Description: Pollen allergen
  misc_feature (1)..(210): Homolog of NCBI NO: 15225530 NR Description: expansin, putative; protein id: At2g39700.1, by cDNA: 17353., supported by cDNA: gi_15294171, supported by gi_17065213, supported by cDNA: gi_20259979 [Arabidopsis
  misc_feature (1)..(210): Homolog of NCBI NO: 21553844 NR Description: Alpha-expansin 4 precursor (At-EXP4) (AtEx4)
  misc_feature (1)..(210): Homolog of NCBI NO: 15233283 NR Description: expansin, putative; protein id: At3g55500.1
  misc_feature (1)..(210): Homolog of NCBI NO: 29466643 NR Description: expansin [Prunus persica]
  misc_feature (1)..(210): Homolog of NCBI NO: 13898655 NR Description: expansin [Prunus cerasus]
  misc_feature (1)..(210): Homolog of NCBI NO: 31506015 NR Description: expansin [Sambucus nigra]
  misc_feature (1)..(210): Homolog of NCBI NO: 29467595 NR Description: expansin [Pyrus communis]
  misc_feature (1)..(210): Homolog of NCBI NO: 38046726 NR Description: alpha-expansin 1 [Populus tremula x Populus
  misc_feature (1)..(210): Homolog of NCBI NO: 20502784 NR Description: expansin 11 precursor [Rumex palustris]
  misc_feature (1)..(210): Homolog of NCBI NO: 20502786 NR Description: expansin 12 precursor [Rumex palustris]

SEQ ID NO: 96690 - protein, 180 aa, Arabidopsis thaliana; identical to SEQ ID NO: 30298
  peptide (1)..(180): Ceres Seq. ID no. 12734330
  misc_feature (87)..(164): Pfam Name: Pollen allergen Pfam Description: Pollen allergen
  misc_feature (1)..(180): Homolog of NCBI NO: 15225530 NR Description: expansin, putative; protein id: At2g39700.1, by cDNA: 17353., supported by cDNA: gi_15294171, supported by gi_17065213, supported by cDNA: gi_20259979 [Arabidopsis
  misc_feature (1)..(180): Homolog of NCBI NO: 21553844 NR Description: Alpha-expansin 4 precursor (At-EXP4) (AtEx4)
  misc_feature (1)..(180): Homolog of NCBI NO: 15233283 NR Description: expansin, putative; protein id: At3g55500.1
  misc_feature (1)..(180): Homolog of NCBI NO: 29466643 NR Description: expansin [Prunus persica]
  misc_feature (1)..(180): Homolog of NCBI NO: 13898655 NR Description: expansin [Prunus cerasus]
  misc_feature (1)..(180): Homolog of NCBI NO: 31506015 NR Description: expansin [Sambucus nigra]
  misc_feature (1)..(180): Homolog of NCBI NO: 29467595 NR Description: expansin [Pyrus communis]
  misc_feature (1)..(180): Homolog of NCBI NO: 38046726 NR Description: alpha-expansin 1 [Populus tremula x Populus
  misc_feature (1)..(180): Homolog of NCBI NO: 20502784 NR Description: expansin 11 precursor [Rumex palustris]
  misc_feature (1)..(180): Homolog of NCBI NO: 20502786 NR Description: expansin 12 precursor [Rumex palustris]

SEQ ID NO: 96691 - DNA, 744 bp, Arabidopsis thaliana
  misc_feature (1)..(744): Ceres Seq. ID no. 12734339
  misc_feature: MA Experiment ID: 20000185 Result: Down-regulated in Transcription
  misc_feature: MA Experiment 20000185 PARAMETER Experiment Name: At_Roots__P Parameter: Age (day) Value: 7 vs. 21
  misc_feature: MA Experiment 20000185 PARAMETER Experiment Name: At_Roots__P Parameter: Organism Value: A. thaliana
  misc_feature: MA Experiment 20000185 PARAMETER Experiment Name: At_Roots__P Parameter: Tissue Value: Roots vs. Whole Plant
  misc_feature: MA Experiment ID: 20000438 Result: Down-regulated in Transcription
  misc_feature: MA Experiment 20000438 PARAMETER Experiment Name: At_Shoots__P Parameter: Age (day) Value: 14
  misc_feature: MA Experiment 20000438 PARAMETER Experiment Name: At_Shoots__P Parameter: Tissue Value: Shoots vs. Whole Plant
  misc_feature: MA Experiment ID: 20000439 Result: Down-regulated in Transcription
  misc_feature: MA Experiment 20000439 PARAMETER Experiment Name: At_Roots__P Parameter: Age (day) Value: 14 vs. 21
  misc_feature: MA Experiment 20000439 PARAMETER Experiment Name: At_Roots__P Parameter: Organism Value: A. thaliana
  misc_feature: MA Experiment 20000439 PARAMETER Experiment Name: At_Roots__P Parameter: Tissue Value: Roots vs. Whole Plant
atggcgactcgtcttcaatatgataacaataattgcgaaattggtgtcttttccaaactcacaaatgcttattgtctcgtttccgcaacatctgcctccgcaaacttcttcactggttatgagtcgaagttaaaaggtgttatcccaattgttactacttccataggaggatcagggactattggtagtctatgtgtcggaaacaaaaacggacttcttctgtctcacaccattacagaccaagagcttcaacatttgagagatagtttgcctgatgaagttgtagtccaacgaattgaagaacctatatgtgcacttggaaacgctatagcttgcaatgactatgtcgcgcttgtgcatccaaagctcgagaaagacaccgaagagataataagtgatgttcttggtgttgaagtttatcgccaaaccattgcgaataacgaacttgtgggaagttattgttctttatccaataatggtggaatggttcactcaaataccaacgtggaagaaatggtcgagctagcgaatcttgttcaggtgcctttggttgcaggaaccgtgaaccgtggcagccaagttatatccgcgggtttgactgtgaacgattggaccgctttctgtgggtcagatactactgcagtagagctctctgttgttaacaatatcttcaaactagtccaatctcagcctgatttcgtcggtagtgaaatgaggaagtctttgatcgatacctatgtctaa

SEQ ID NO: 96692 - protein, 247 aa, Arabidopsis thaliana
  peptide (1)..(247): Ceres Seq. ID no. 12734340
  misc_feature (3)..(206): Pfam Name: eIF-6 family Pfam Description: eIF-6 family
  misc_feature (1)..(247): Homolog of NCBI NO: 15225573 NR Description: putative translation initiation factor; protein At2g39820.1 [Arabidopsis thaliana]
  misc_feature (1)..(247): Homolog of NCBI NO: 15228161 NR Description: eukaryotic translation initiation factor 6 - like protein; protein id: At3g55620.1 [Arabidopsis thaliana]
  misc_feature (1)..(247): Homolog of NCBI NO: 27261099 NR Description: putative eukaryotic translation initiation factor
  misc_feature (1)..(246): Homolog of NCBI NO: 6325273 NR Description: similar to human translation initiation factor 6 however, TIF6 does not act as a true translation initiation protein may be involved in the biogenesis and or stability of the
  misc_feature (1)..(245): Homolog of NCBI NO: 4504771 NR Description: integrin beta 4 binding protein; eukaryotic initiation factor 3A; p27BBP [Homo sapiens]
  misc_feature (1)..(245): Homolog of NCBI NO: 27501448 NR Description: integrin beta 4 binding protein [Mus musculus]
  misc_feature (1)..(245): Homolog of NCBI NO: 6381991 NR Description: b4 integrin interactor homolog [Mus musculus]
  misc_feature (1)..(245): Homolog of NCBI NO: 37181067 NR Description: p27BBP/eIF6 [Xenopus laevis]
  misc_feature (1)..(245): Homolog of NCBI NO: 29436495 NR Description: Similar to integrin beta 4 binding protein [Danio
  misc_feature (1)..(245): Homolog of NCBI NO: 37650717 NR Description: SI:zC239J9.6 (novel protein similar to vertebrate
MATRLQYDNNNCEIGVFSKLTNAYCLVSATSASANFFTGYESKLKGVIPIVTTSIGGSGTIGSLCVGNKNGLLLSHTITDQELQHLRDSLPDEVVVQRIEEPICALGNAIACNDYVALVHPKLEKDTEEIISDVLGVEVYRQTIANNELVGSYCSLSNNGGMVHSNTNVEEMVELANLVQVPLVAGTVNRGSQVISAGLTVNDWTAFCGSDTTAVELSVVNNIFKLVQSQPDFVGSEMRKSLIDTYV

SEQ ID NO: 96693 - DNA, 1446 bp, Arabidopsis thaliana
  misc_feature (1)..(1446): Ceres Seq. ID no. 12734382
  misc_feature: MA Experiment ID: 20000171 Result: Down-regulated in Transcription
  misc_feature: MA Experiment 20000171 PARAMETER Experiment Name: At_42deg_Heat_P Parameter: Age (day) Value: 14
  misc_feature: MA Experiment 20000171 PARAMETER Experiment Name: At_42deg_Heat_P Parameter: Organism Value: A. thaliana
  misc_feature: MA Experiment 20000171 PARAMETER Experiment Name: At_42deg_Heat_P Parameter: Plant Line Value: WS
  misc_feature: MA Experiment 20000171 PARAMETER Experiment Name: At_42deg_Heat_P Parameter: Temperature (deg C) Value: 42 vs. 22
  misc_feature: MA Experiment 20000171 PARAMETER Experiment Name: At_42deg_Heat_P Parameter: Timepoint (hr) Value: 1
  misc_feature: MA Experiment 20000171 PARAMETER Experiment Name: At_42deg_Heat_P Parameter: Tissue Value: Aerial
  misc_feature: MA Experiment ID: 20000184 Result: Up-regulated in Transcription
  misc_feature: MA Experiment 20000184 PARAMETER Experiment Name: At_Shoots__P Parameter: Age (day) Value: 7
  misc_feature: MA Experiment 20000184 PARAMETER Experiment Name: At_Shoots__P Parameter: Tissue Value: Shoots vs. Whole Plant
  misc_feature: MA Experiment ID: 20000185 Result: Up-regulated in Transcription
  misc_feature: MA Experiment 20000185 PARAMETER Experiment Name: At_Roots__P Parameter: Age (day) Value: 7 vs. 21
  misc_feature: MA Experiment 20000185 PARAMETER Experiment Name: At_Roots__P Parameter: Organism Value: A. thaliana
  misc_feature: MA Experiment 20000185 PARAMETER Experiment Name: At_Roots__P Parameter: Tissue Value: Roots vs. Whole Plant
  misc_feature: MA Experiment ID: 20000234 Result: Up-regulated in Transcription
  misc_feature: MA Experiment 20000234 PARAMETER Experiment Name: At_Siliques_P Parameter: Age (day) Value: 21
  misc_feature: MA Experiment 20000234 PARAMETER Experiment Name: At_Siliques_P Parameter: Organism Value: A. thaliana
  misc_feature: MA Experiment 20000234 PARAMETER Experiment Name: At_Siliques_P Parameter: Plant Line Value: WS
  misc_feature: MA Experiment 20000234 PARAMETER Experiment Name: At_Siliques_P Parameter: Tissue Value: Less Than 5mm Siliques vs. Whole Plant
  misc_feature: MA Experiment ID: 20000437 Result: Down-regulated in Transcription
  misc_feature: MA Experiment 20000437 PARAMETER Experiment Name: At_Drought_P Parameter: Age (day) Value: 8
  misc_feature: MA Experiment 20000437 PARAMETER Experiment Name: At_Drought_P Parameter: Organism Value: A. thaliana
  misc_feature: MA Experiment 20000437 PARAMETER Experiment Name: At_Drought_P Parameter: Plant Line Value: WS
  misc_feature: MA Experiment 20000437 PARAMETER Experiment Name: At_Drought_P Parameter: Timepoint (hr) Value: 24
  misc_feature: MA Experiment 20000437 PARAMETER Experiment Name: At_Drought_P Parameter: Tissue Value: Whole Plant
  misc_feature: MA Experiment 20000437 PARAMETER Experiment Name: At_Drought_P Parameter: Treatment Value: Drought vs. No Drought
  misc_feature: MA Experiment ID: 20000438 Result: Up-regulated in Transcription
  misc_feature: MA Experiment 20000438 PARAMETER Experiment Name: At_Shoots__P Parameter: Age (day) Value: 14
  misc_feature: MA Experiment 20000438 PARAMETER Experiment Name: At_Shoots__P Parameter: Tissue Value: Shoots vs. Whole Plant
  misc_feature: MA Experiment ID: 20000439 Result: Up-regulated in Transcription
  misc_feature: MA Experiment 20000439 PARAMETER Experiment Name: At_Roots__P Parameter: Age (day) Value: 14 vs. 21
  misc_feature: MA Experiment 20000439 PARAMETER Experiment Name: At_Roots__P Parameter: Organism Value: A. thaliana
  misc_feature: MA Experiment 20000439 PARAMETER Experiment Name: At_Roots__P Parameter: Tissue Value: Roots vs. Whole Plant
  misc_feature: MA Experiment ID: 20000573 Result: Down-regulated in Transcription
  misc_feature: MA Experiment 20000573 PARAMETER Experiment Name: At_100uM_ABA_Mutants__P Parameter: Organism Value: A. thaliana
  misc_feature: MA Experiment 20000573 PARAMETER Experiment Name: At_100uM_ABA_Mutants__P Parameter: Plant Line Value: CS22 vs. Ler wt
  misc_feature: MA Experiment 20000573 PARAMETER Experiment Name: At_100uM_ABA_Mutants__P Parameter: Timepoint (hr) Value: N/A
  misc_feature: MA Experiment 20000573 PARAMETER Experiment Name: At_100uM_ABA_Mutants__P Parameter: Tissue Value: Whole Plant
  misc_feature: MA Experiment 20000573 PARAMETER Experiment Name: At_100uM_ABA_Mutants__P Parameter: Treatment Value: None
  misc_feature: MA Experiment ID: 20000574 Result: Down-regulated in Transcription
  misc_feature: MA Experiment 20000574 PARAMETER Experiment Name: At_100uM_ABA_Mutants__P Parameter: Organism Value: A. thaliana
  misc_feature: MA Experiment 20000574 PARAMETER Experiment Name: At_100uM_ABA_Mutants__P Parameter: Plant Line Value: CS23 vs. Ler wt
  misc_feature: MA Experiment 20000574 PARAMETER Experiment Name: At_100uM_ABA_Mutants__P Parameter: Timepoint (hr) Value: N/A
  misc_feature: MA Experiment 20000574 PARAMETER Experiment Name: At_100uM_ABA_Mutants__P Parameter: Tissue Value: Whole Plant
  misc_feature: MA Experiment 20000574 PARAMETER Experiment Name: At_100uM_ABA_Mutants__P Parameter: Treatment Value: None
  misc_feature: MA Experiment ID: 20001248 Result: Down-regulated in Transcription
  misc_feature: MA Experiment 20001248 PARAMETER Experiment Name: At_Far-red-induction_P Parameter: Age (day) Value: 7
  misc_feature: MA Experiment 20001248 PARAMETER Experiment Name: At_Far-red-induction_P Parameter: Light Value: Far-red vs. White
  misc_feature: MA Experiment 20001248 PARAMETER Experiment Name: At_Far-red-induction_P Parameter: Organism Value: A. thaliana
  misc_feature: MA Experiment 20001248 PARAMETER Experiment Name: At_Far-red-induction_P Parameter: Plant Line Value: Columbia
  misc_feature: MA Experiment 20001248 PARAMETER Experiment Name: At_Far-red-induction_P Parameter: Timepoint (hr) Value: 4
  misc_feature: MA Experiment 20001248 PARAMETER Experiment Name: At_Far-red-induction_P Parameter: Tissue Value: Whole Plant
atctctctgagccacatgccgacacttacataactgttgaccaagtctctcttccttctttatcaaatcatgcaaccttcaagaacaagagtttcattttttgaaacaggagagaccatgaagcaaagaaagaagagttatctctcaatcttcgtgatcttcttctctcttttcttcttcgggatcttcatgtacaatgacaacctcaaatcctccattgctgacttcacatcttcgaacccattctctagttcatttgtggagttgccgccggatgagtgtgatctgttcaccggtcaatgggttttcgacaacaagacatatccattgtataaagaagaagagtgtgagttcttgacggagcaagtgacttgtttaagaaacggaaggaaagattctttgtttcagaattggagatggcaacctagagactgttctttaccaaaattcaatgcaagagtgttgttagagaagctgaggaacaagagattgatgtttgtcggtgactcgttaaaccggaaccaatgggaatcaatggtttgtttggttcaatcagtgattcctcccggtagaaaaagcttaaaccagaccggttcactcactgttttcaaaatccaggactataacgcgacggtggagttttattgggcgccatttttggtggaatcaaattcagacgatccggaaaagcacagtataatcgaccgtataataatgccagagtccatcgagaagcatggagtcaactggataggcgttgactttcttgtcttcaatagttacatctggtggatgaatactgtctccatcaaagtcctacgtggatcgttcgatgatggggacacagagtatgatgagatcaaacggccaatagcgtacgagagggtgttgaggacattgggagattgggtggaccataacattgatcctctaagtacaactgttttcttcatgagcatgtctcctcttcacatcaagagctcagattgggctaatcctgagggtataaggtgtgctttagagacaacaccgatcttgaacatgtctttcaacgtggcttacgggcagttttccgcggtggggacggattacaggctgtttccggtggcggaaaacgttacacagtctctaaaagttcctattcatttcctcaacattactgcattgtctgagtatcgtaaagatgcacatacttcggtttacacgatcaagcaaggcaagttgctgacgcgggagcagcaaaacgatccagccaattttgctgattgcatacactggtgcttaccaggccttcctgatacatggaatgagtttctctatacacatattatttctcgaagatgagattctttcatcctcttttttggtttaaaaaaattcttgtgatgtatataggacagagattcaagggatttgaagttagccaagtaaggctaaaaatttgtt

SEQ ID NO: 96694 - protein, 424 aa, Arabidopsis thaliana
  peptide (1)..(424): Ceres Seq. ID no. 12734383
  misc_feature (241)..(420): Pfam Name: Arabidopsis proteins of unknown function Pfam Description: Arabidopsis proteins of unknown function
  misc_feature (1)..(424): Homolog of NCBI NO: 18405283 NR Description: expressed protein; protein id: At2g40150.1, by cDNA: gi_13877598 [Arabidopsis thaliana] Unknown protein [Arabidopsis thaliana]
  misc_feature (17)..(424): Homolog of NCBI NO: 25366731 NR Description: hypothetical protein At2g40150 [imported] -
  misc_feature (64)..(423): Homolog of NCBI NO: 15228789 NR Description: putative protein; protein id: At3g55990.1
  misc_feature (64)..(423): Homolog of NCBI NO: 26452343 NR Description: unknown protein [Arabidopsis thaliana]
  misc_feature (1)..(62): Homolog of NCBI NO: 15228789 NR Description: putative protein; protein id: At3g55990.1
  misc_feature (1)..(62): Homolog of NCBI NO: 26452343 NR Description: unknown protein [Arabidopsis thaliana]
  misc_feature (68)..(423): Homolog of NCBI NO: 34907966 NR Description: P0446G04.14 [Oryza sativa (japonica
  misc_feature (23)..(421): Homolog of NCBI NO: 18405285 NR Description: expressed protein; protein id: At2g40160.1, by cDNA: gi_15983770 [Arabidopsis thaliana]
  misc_feature (71)..(422): Homolog of NCBI NO: 34898234 NR Description: P0034A04.28 [Oryza sativa (japonica
  misc_feature (197)..(349): Homolog of NCBI NO: 4587990 NR Description: hypothetical protein [Arabidopsis thaliana]
MQPSRTRVSFFETGETMKQRKKSYLSIFVIFFSLFFFGIFMYNDNLKSSIADFTSSNPFSSSFVELPPDECDLFTGQWVFDNKTYPLYKEEECEFLTEQVTCLRNGRKDSLFQNWRWQPRDCSLPKFNARVLLEKLRNKRLMFVGDSLNRNQWESMVCLVQSVIPPGRKSLNQTGSLTVFKIQDYNATVEFYWAPFLVESNSDDPEKHSIIDRIIMPESIEKHGVNWIGVDFLVFNSYIWWMNTVSIKVLRGSFDDGDTEYDEIKRPIAYERVLRTLGDWVDHNIDPLSTTVFFMSMSPLHIKSSDWANPEGIRCALETTPILNMSFNVAYGQFSAVGTDYRLFPVAENVTQSLKVPIHFLNITALSEYRKDAHTSVYTIKQGKLLTREQQNDPANFADCIHWCLPGLPDTWNEFLYTHIISRR

SEQ ID NO: 96695 - protein, 408 aa, Arabidopsis thaliana
  peptide (1)..(408): Ceres Seq. ID no. 12734384
  misc_feature (225)..(404): Pfam Name: Arabidopsis proteins of unknown function Pfam Description: Arabidopsis proteins of unknown function
  misc_feature (1)..(408): Homolog of NCBI NO: 18405283 NR Description: expressed protein; protein id: At2g40150.1, by cDNA: gi_13877598 [Arabidopsis thaliana] Unknown protein [Arabidopsis thaliana]
  misc_feature (1)..(408): Homolog of NCBI NO: 25366731 NR Description: hypothetical protein At2g40150 [imported] -
  misc_feature (48)..(407): Homolog of NCBI NO: 15228789 NR Description: putative protein; protein id: At3g55990.1
  misc_feature (48)..(407): Homolog of NCBI NO: 26452343 NR Description: unknown protein [Arabidopsis thaliana]
  misc_feature (1)..(46): Homolog of NCBI NO: 15228789 NR Description: putative protein; protein id: At3g55990.1
  misc_feature (1)..(46): Homolog of NCBI NO: 26452343 NR Description: unknown protein [Arabidopsis thaliana]
  misc_feature (52)..(407): Homolog of NCBI NO: 34907966 NR Description: P0446G04.14 [Oryza sativa (japonica
  misc_feature (7)..(405): Homolog of NCBI NO: 18405285 NR Description: expressed protein; protein id: At2g40160.1, by cDNA: gi_15983770 [Arabidopsis thaliana]
  misc_feature (55)..(406): Homolog of NCBI NO: 34898234 NR Description: P0034A04.28 [Oryza sativa (japonica
  misc_feature (181)..(333): Homolog of NCBI NO: 4587990 NR Description: hypothetical protein [Arabidopsis thaliana]
MKQRKKSYLSIFVIFFSLFFFGIFMYNDNLKSSIADFTSSNPFSSSFVELPPDECDLFTGQWVFDNKTYPLYKEEECEFLTEQVTCLRNGRKDSLFQNWRWQPRDCSLPKFNARVLLEKLRNKRLMFVGDSLNRNQWESMVCLVQSVIPPGRKSLNQTGSLTVFKIQDYNATVEFYWAPFLVESNSDDPEKHSIIDRIIMPESIEKHGVNWIGVDFLVFNSYIWWMNTVSIKVLRGSFDDGDTEYDEIKRPIAYERVLRTLGDWVDHNIDPLSTTVFFMSMSPLHIKSSDWANPEGIRCALETTPILNMSFNVAYGQFSAVGTDYRLFPVAENVTQSLKVPIHFLNITALSEYRKDAHTSVYTIKQGKLLTREQQNDPANFADCIHWCLPGLPDTWNEFLYTHIISRR

SEQ ID NO: 96696 - protein, 384 aa, Arabidopsis thaliana
  peptide (1)..(384): Ceres Seq. ID no. 12734385
  misc_feature (201)..(380): Pfam Name: Arabidopsis proteins of unknown function Pfam Description: Arabidopsis proteins of unknown function
  misc_feature (1)..(384): Homolog of NCBI NO: 18405283 NR Description: expressed protein; protein id: At2g40150.1, by cDNA: gi_13877598 [Arabidopsis thaliana] Unknown protein [Arabidopsis thaliana]
  misc_feature (1)..(384): Homolog of NCBI NO: 25366731 NR Description: hypothetical protein At2g40150 [imported] -
  misc_feature (24)..(383): Homolog of NCBI NO: 15228789 NR Description: putative protein; protein id: At3g55990.1
  misc_feature (24)..(383): Homolog of NCBI NO: 26452343 NR Description: unknown protein [Arabidopsis thaliana]
  misc_feature (1)..(22): Homolog of NCBI NO: 15228789 NR Description: putative protein; protein id: At3g55990.1
  misc_feature (1)..(22): Homolog of NCBI NO: 26452343 NR Description: unknown protein [Arabidopsis thaliana]
  misc_feature (28)..(383): Homolog of NCBI NO: 34907966 NR Description: P0446G04.14 [Oryza sativa (japonica
  misc_feature (1)..(381): Homolog of NCBI NO: 18405285 NR Description: expressed protein; protein id: At2g40160.1, by cDNA: gi_15983770 [Arabidopsis thaliana]
  misc_feature (31)..(382): Homolog of NCBI NO: 34898234 NR Description: P0034A04.28 [Oryza sativa (japonica
  misc_feature (157)..(309): Homolog of NCBI NO: 4587990 NR Description: hypothetical protein [Arabidopsis thaliana]
MYNDNLKSSIADFTSSNPFSSSFVELPPDECDLFTGQWVFDNKTYPLYKEEECEFLTEQVTCLRNGRKDSLFQNWRWQPRDCSLPKFNARVLLEKLRNKRLMFVGDSLNRNQWESMVCLVQSVIPPGRKSLNQTGSLTVFKIQDYNATVEFYWAPFLVESNSDDPEKHSIIDRIIMPESIEKHGVNWIGVDFLVFNSYIWWMNTVSIKVLRGSFDDGDTEYDEIKRPIAYERVLRTLGDWVDHNIDPLSTTVFFMSMSPLHIKSSDWANPEGIRCALETTPILNMSFNVAYGQFSAVGTDYRLFPVAENVTQSLKVPIHFLNITALSEYRKDAHTSVYTIKQGKLLTREQQNDPANFADCIHWCLPGLPDTWNEFLYTHIISRR

SEQ ID NO: 96697 - DNA, 1449 bp, Arabidopsis thaliana
  misc_feature (1)..(1449): Ceres Seq. ID no. 12734434
  misc_feature: MA Experiment ID: 20000184 Result: Up-regulated in Transcription
  misc_feature: MA Experiment 20000184 PARAMETER Experiment Name: At_Shoots__P Parameter: Age (day) Value: 7
  misc_feature: MA Experiment 20000184 PARAMETER Experiment Name: At_Shoots__P Parameter: Tissue Value: Shoots vs. Whole Plant
  misc_feature: MA Experiment ID: 20000185 Result: Up-regulated in Transcription
  misc_feature: MA Experiment 20000185 PARAMETER Experiment Name: At_Roots__P Parameter: Age (day) Value: 7 vs. 21
  misc_feature: MA Experiment 20000185 PARAMETER Experiment Name: At_Roots__P Parameter: Organism Value: A. thaliana
  misc_feature: MA Experiment 20000185 PARAMETER Experiment Name: At_Roots__P Parameter: Tissue Value: Roots vs. Whole Plant
  misc_feature: MA Experiment ID: 20000227 Result: Up-regulated in Transcription
  misc_feature: MA Experiment 20000227 PARAMETER Experiment Name: At_Root-Tips-vs-Tops_P Parameter: Tissue Value: Root Tips vs. Root Tops
  misc_feature: MA Experiment ID: 20000439 Result: Up-regulated in Transcription
  misc_feature: MA Experiment 20000439 PARAMETER Experiment Name: At_Roots__P Parameter: Age (day) Value: 14 vs. 21
  misc_feature: MA Experiment 20000439 PARAMETER Experiment Name: At_Roots__P Parameter: Organism Value: A. thaliana
  misc_feature: MA Experiment 20000439 PARAMETER Experiment Name: At_Roots__P Parameter: Tissue Value: Roots vs. Whole Plant
  misc_feature: MA Experiment ID: 20001247 Result: Up-regulated in Transcription
  misc_feature: MA Experiment 20001247 PARAMETER Experiment Name: At_Far-red-induction_P Parameter: Age (day) Value: 7
  misc_feature: MA Experiment 20001247 PARAMETER Experiment Name: At_Far-red-induction_P Parameter: Light Value: Far-red vs. White
  misc_feature: MA Experiment 20001247 PARAMETER Experiment Name: At_Far-red-induction_P Parameter: Organism Value: A. thaliana
  misc_feature: MA Experiment 20001247 PARAMETER Experiment Name: At_Far-red-induction_P Parameter: Plant Line Value: Columbia
  misc_feature: MA Experiment 20001247 PARAMETER Experiment Name: At_Far-red-induction_P Parameter: Timepoint (hr) Value: 1
  misc_feature: MA Experiment 20001247 PARAMETER Experiment Name: At_Far-red-induction_P Parameter: Tissue Value: Whole Plant
  misc_feature: MA Experiment ID: 20001910 Result: Up-regulated in Transcription
  misc_feature: MA Experiment 20001910 PARAMETER Experiment Name: At_Drought_Reproduction_P Parameter: Age (day) Value: 37
  misc_feature: MA Experiment 20001910 PARAMETER Experiment Name: At_Drought_Reproduction_P Parameter: Organism Value: A. thaliana
  misc_feature: MA Experiment 20001910 PARAMETER Experiment Name: At_Drought_Reproduction_P Parameter: Plant Line Value: WS
  misc_feature: MA Experiment 20001910 PARAMETER Experiment Name: At_Drought_Reproduction_P Parameter: Timepoint (day) Value: 7
  misc_feature: MA Experiment 20001910 PARAMETER Experiment Name: At_Drought_Reproduction_P Parameter: Tissue Value: Flowers
  misc_feature: MA Experiment 20001910 PARAMETER Experiment Name: At_Drought_Reproduction_P Parameter: Treatment Value: Drought vs. No Drought
tctctctttcgctgtccgattccgacagatagacagagggcgcgaaacagagagaaaataagaagaagaaggacgatccagatatggaggatccttctaacccacaaccaaaccagagcaatctctcgcaatgcccgcctttagccacagctccgacacctgcgccagttcgtggtccgtaccaccggagagcacattcggaggtccaattccgtctccctgaagatctggatctctctgaaccattcggaggattcgatgagcttggatccgaagatgatctcttttgctcatacatggacattgagaaacttggatccggatccggatccgcatccgattcggctggtccttctgctcctaggtctgataacccgttttccgctgagaatggaggtgcggaggctgggaattcgagacctcgacacaggcatagcctctccgttgatggctcttcgactttggagtcaattgaggctaagaaagctatggctcctgataagctcgctgagctttgggtcgtcgaccctaaaagagctaaaaggataattgctaatcgacagtctgctgctcgttcgaaagagaggaaggctcggtatatcttggagctcgagaggaaagttcagaccttgcaaactgaagctactaccctttcagcacagttgtctttgttccagagagacacaactggtttgtcatctgagaatacagagctcaagcttcgtttacaggtcatggaacaacaagctaagttgcgagatgcactgaacgagcaactgaaaaaggaagttgagaggctgaaattcgccacgggagaagtctcacccgcggatgcttataacctcggaatggcacacatgcaatatcagcaacaaccacaacaatccttctttcaacatcatcatcagcaacaaaccgatgctcaaaacctgcaacaaatgactcatcagtttcatctcttccagcctaacaacaaccagaaccaatcttctcgcacaaaccctcccaccgctcatcagcttatgcatcacgctacttctaatgccccggctcaatctcattcctattcagaggcaatgcatgaagaccatcttggccggttacaggggcttgacattagcagctgtggcagaggctcaaactttggtaggtctgacaccgtcagtgaaagcagcagcactatgtgaggctgcctttcccagattcccctttgtcgataaacctattctttcgccctcccttgaaatctttagctaaaaagtaacatcttcgtgacagtcggattcattttttattctgtaaaactggttttttggggggttttggggtttcaactttagagaccacagttgttttaacttgtctgatttctcatttcctgattcatcttgttctcctggggagctactgaattataaacagatcatatttctgtttctttatgttgtc

SEQ ID NO: 96698 - protein, 367 aa, Arabidopsis thaliana
  peptide (1)..(367): Ceres Seq. ID no. 12734435
  misc_feature (146)..(210): Pfam Name: bZIP transcription factor Pfam Description: bZIP transcription factor
  misc_feature (1)..(367): Homolog of NCBI NO: 15226727 NR Description: bZip DNA binding protein; protein id: supported by cDNA: gi_18377631, supported by cDNA: gi_20465782 thaliana] >gi|25408715|pir||G84831 probable bZIP transcription
  misc_feature (1)..(367): Homolog of NCBI NO: 25453519 NR Description: b-Zip DNA binding protein [imported] -
  misc_feature (26)..(306): Homolog of NCBI NO: 39579226 NR Description: bZIP transcription factor RF2b [Oryza sativa
  misc_feature (1)..(302): Homolog of NCBI NO: 15222213 NR Description: bZIP protein; protein id: At1g06850.1, supported cDNA: gi_17064795 [Arabidopsis thaliana] Similar to bZIP transcription factors [Arabidopsis thaliana]
  misc_feature (1)..(302): Homolog of NCBI NO: 25406943 NR Description: hypothetical protein [imported] - Arabidopsis >gi|7523698|gb|AAF63137.1|AC011001_7 Similar to bZIP
  misc_feature (1)..(317): Homolog of NCBI NO: 7489564 NR Description: probable transcription activator RF2a - rice
  misc_feature (1)..(249): Homolog of NCBI NO: 17065884 NR Description: AtbZIP transcription factor [Arabidopsis thaliana]
  misc_feature (72)..(314): Homolog of NCBI NO: 34394739 NR Description: putative transcription activator RF2a [Oryza
  misc_feature (1)..(291): Homolog of NCBI NO: 21740783 NR Description: OSJNBa0067K08.24 [Oryza sativa (japonica
  misc_feature (102)..(300): Homolog of NCBI NO: 2921823 NR Description: shoot-forming PKSF1 [Paulownia kawakamii]
MEDPSNPQPNQSNLSQCPPLATAPTPAPVRGPYHRRAHSEVQFRLPEDLDLSEPFGGFDELGSEDDLFCSYMDIEKLGSGSGSASDSAGPSAPRSDNPFSAENGGAEAGNSRPRHRHSLSVDGSSTLESIEAKKAMAPDKLAELWVVDPKRAKRIIANRQSAARSKERKARYILELERKVQTLQTEATTLSAQLSLFQRDTTGLSSENTELKLRLQVMEQQAKLRDALNEQLKKEVERLKFATGEVSPADAYNLGMAHMQYQQQPQQSFFQHHHQQQTDAQNLQQMTHQFHLFQPNNNQNQSSRTNPPTAHQLMHHATSNAPAQSHSYSEAMHEDHLGRLQGLDISSCGRGSNFGRSDTVSESSSTM

SEQ ID NO: 96699 - protein, 296 aa, Arabidopsis thaliana
  peptide (1)..(296): Ceres Seq. ID no. 12734436
  misc_feature (75)..(139): Pfam Name: bZIP transcription factor Pfam Description: bZIP transcription factor
  misc_feature (1)..(296): Homolog of NCBI NO: 15226727 NR Description: bZip DNA binding protein; protein id: supported by cDNA: gi_18377631, supported by cDNA: gi_20465782 thaliana] >gi|25408715|pir||G84831 probable bZIP transcription
  misc_feature (1)..(296): Homolog of NCBI NO: 25453519 NR Description: b-Zip DNA binding protein [imported] -
  misc_feature (1)..(235): Homolog of NCBI NO: 39579226 NR Description: bZIP transcription factor RF2b [Oryza sativa
  misc_feature (1)..(231): Homolog of NCBI NO: 15222213 NR Description: bZIP protein; protein id: At1g06850.1, supported cDNA: gi_17064795 [Arabidopsis thaliana] Similar to bZIP transcription factors [Arabidopsis thaliana]
  misc_feature (1)..(231): Homolog of NCBI NO: 25406943 NR Description: hypothetical protein [imported] - Arabidopsis >gi|7523698|gb|AAF63137.1|AC011001_7 Similar to bZIP
  misc_feature (1)..(246): Homolog of NCBI NO: 7489564 NR Description: probable transcription activator RF2a - rice
  misc_feature (1)..(178): Homolog of NCBI NO: 17065884 NR Description: AtbZIP transcription factor [Arabidopsis thaliana]
  misc_feature (1)..(243): Homolog of NCBI NO: 34394739 NR Description: putative transcription activator RF2a [Oryza
  misc_feature (1)..(220): Homolog of NCBI NO: 21740783 NR Description: OSJNBa0067K08.24 [Oryza sativa (japonica
  misc_feature (31)..(229): Homolog of NCBI NO: 2921823 NR Description: shoot-forming PKSF1 [Paulownia kawakamii]
MDIEKLGSGSGSASDSAGPSAPRSDNPFSAENGGAEAGNSRPRHRHSLSVDGSSTLESIEAKKAMAPDKLAELWVVDPKRAKRIIANRQSAARSKERKARYILELERKVQTLQTEATTLSAQLSLFQRDTTGLSSENTELKLRLQVMEQQAKLRDALNEQLKKEVERLKFATGEVSPADAYNLGMAHMQYQQQPQQSFFQHHHQQQTDAQNLQQMTHQFHLFQPNNNQNQSSRTNPPTAHQLMHHATSNAPAQSHSYSEAMHEDHLGRLQGLDISSCGRGSNFGRSDTVSESSSTM

SEQ ID NO: 96700 - protein, 232 aa, Arabidopsis thaliana
  peptide (1)..(232): Ceres Seq. ID no. 12734437
  misc_feature (11)..(75): Pfam Name: bZIP transcription factor Pfam Description: bZIP transcription factor
  misc_feature (1)..(232): Homolog of NCBI NO: 15226727 NR Description: bZip DNA binding protein; protein id: supported by cDNA: gi_18377631, supported by cDNA: gi_20465782 thaliana] >gi|25408715|pir||G84831 probable bZIP transcription
  misc_feature (1)..(232): Homolog of NCBI NO: 25453519 NR Description: b-Zip DNA binding protein [imported] -
  misc_feature (1)..(171): Homolog of NCBI NO: 39579226 NR Description: bZIP transcription factor RF2b [Oryza sativa
  misc_feature (1)..(167): Homolog of NCBI NO: 15222213 NR Description: bZIP protein; protein id: At1g06850.1, supported cDNA: gi_17064795 [Arabidopsis thaliana] Similar to bZIP transcription factors [Arabidopsis thaliana]
  misc_feature (1)..(167): Homolog of NCBI NO: 25406943 NR Description: hypothetical protein [imported] - Arabidopsis >gi|7523698|gb|AAF63137.1|AC011001_7 Similar to bZIP
  misc_feature (1)..(182): Homolog of NCBI NO: 7489564 NR Description: probable transcription activator RF2a - rice
  misc_feature (1)..(114): Homolog of NCBI NO: 17065884 NR Description: AtbZIP transcription factor [Arabidopsis thaliana]
  misc_feature (1)..(179): Homolog of NCBI NO: 34394739 NR Description: putative transcription activator RF2a [Oryza
  misc_feature (1)..(156): Homolog of NCBI NO: 21740783 NR Description: OSJNBa0067K08.24 [Oryza sativa (japonica
  misc_feature (1)..(165): Homolog of NCBI NO: 2921823 NR Description: shoot-forming PKSF1 [Paulownia kawakamii]
MAPDKLAELWVVDPKRAKRIIANRQSAARSKERKARYILELERKVQTLQTEATTLSAQLSLFQRDTTGLSSENTELKLRLQVMEQQAKLRDALNEQLKKEVERLKFATGEVSPADAYNLGMAHMQYQQQPQQSFFQHHHQQQTDAQNLQQMTHQFHLFQPNNNQNQSSRTNPPTAHQLMHHATSNAPAQSHSYSEAMHEDHLGRLQGLDISSCGRGSNFGRSDTVSESSSTM

SEQ ID NO: 96701 - DNA, 1996 bp, Arabidopsis thaliana
  misc_feature (1)..(1996): Ceres Seq. ID no. 12734441
  misc_feature: MA Experiment ID: 20000173 Result: Down-regulated in Transcription
  misc_feature: MA Experiment 20000173 PARAMETER Experiment Name: At_42deg_Heat_P Parameter: Age (day) Value: 14
  misc_feature: MA Experiment 20000173 PARAMETER Experiment Name: At_42deg_Heat_P Parameter: Organism Value: A. thaliana
  misc_feature: MA Experiment 20000173 PARAMETER Experiment Name: At_42deg_Heat_P Parameter: Plant Line Value: WS
  misc_feature: MA Experiment 20000173 PARAMETER Experiment Name: At_42deg_Heat_P Parameter: Temperature (deg C) Value: 42 vs. 22
  misc_feature: MA Experiment 20000173 PARAMETER Experiment Name: At_42deg_Heat_P Parameter: Timepoint (hr) Value: 6
  misc_feature: MA Experiment 20000173 PARAMETER Experiment Name: At_42deg_Heat_P Parameter: Tissue Value: Aerial
  misc_feature: MA Experiment ID: 20000179 Result: Down-regulated in Transcription
  misc_feature: MA Experiment 20000179 PARAMETER Experiment Name: At_Germinating_Seeds_P Parameter: Age (hr) Value: 6 vs. 0
  misc_feature: MA Experiment 20000179 PARAMETER Experiment Name: At_Germinating_Seeds_P Parameter: Tissue Value: Germinating Seeds
  misc_feature: MA Experiment ID: 20000180 Result: Down-regulated in Transcription
  misc_feature: MA Experiment 20000180 PARAMETER Experiment Name: At_Germinating_Seeds_P Parameter: Age (hr) Value: 24 vs. 0
  misc_feature: MA Experiment 20000180 PARAMETER Experiment Name: At_Germinating_Seeds_P Parameter: Tissue Value: Germinating Seeds
  misc_feature: MA Experiment ID: 20000184 Result: Down-regulated in Transcription
  misc_feature: MA Experiment 20000184 PARAMETER Experiment Name: At_Shoots__P Parameter: Age (day) Value: 7
  misc_feature: MA Experiment 20000184 PARAMETER Experiment Name: At_Shoots__P Parameter: Tissue Value: Shoots vs. Whole Plant
  misc_feature: MA Experiment ID: 20001555 Result: Up-regulated in Transcription
  misc_feature: MA Experiment 20001555 PARAMETER Experiment Name: At_Drought_Soil_Dry_P Parameter: Age (day) Value: 24
  misc_feature: MA Experiment 20001555 PARAMETER Experiment Name: At_Drought_Soil_Dry_P Parameter: Organism Value: A. thaliana
  misc_feature: MA Experiment 20001555 PARAMETER Experiment Name: At_Drought_Soil_Dry_P Parameter: Plant Line Value: WS
  misc_feature: MA Experiment 20001555 PARAMETER Experiment Name: At_Drought_Soil_Dry_P Parameter: Post Timepoint (hr) Value: None
  misc_feature: MA Experiment 20001555 PARAMETER Experiment Name: At_Drought_Soil_Dry_P Parameter: Post-Treatment Value: None
  misc_feature: MA Experiment 20001555 PARAMETER Experiment Name: At_Drought_Soil_Dry_P Parameter: Timepoint (day) Value: 10
  misc_feature: MA Experiment 20001555 PARAMETER Experiment Name: At_Drought_Soil_Dry_P Parameter: Treatment Value: Drought vs. No Drought
  misc_feature: MA Experiment ID: 20001556 Result: Up-regulated in Transcription
  misc_feature: MA Experiment 20001556 PARAMETER Experiment Name: At_Drought_Soil_Dry_P Parameter: Age (day) Value: 26
  misc_feature: MA Experiment 20001556 PARAMETER Experiment Name: At_Drought_Soil_Dry_P Parameter: Organism Value: A. thaliana
  misc_feature: MA Experiment 20001556 PARAMETER Experiment Name: At_Drought_Soil_Dry_P Parameter: Plant Line Value: WS
  misc_feature: MA Experiment 20001556 PARAMETER Experiment Name: At_Drought_Soil_Dry_P Parameter: Post Timepoint (hr) Value: None
  misc_feature: MA Experiment 20001556 PARAMETER Experiment Name: At_Drought_Soil_Dry_P Parameter: Post-Treatment Value: None
  misc_feature: MA Experiment 20001556 PARAMETER Experiment Name: At_Drought_Soil_Dry_P Parameter: Timepoint (day) Value: 12
  misc_feature: MA Experiment 20001556 PARAMETER Experiment Name: At_Drought_Soil_Dry_P Parameter: Treatment Value: Drought vs. No Drought
  misc_feature: MA Experiment ID: 20001557 Result: Up-regulated in Transcription
  misc_feature: MA Experiment 20001557 PARAMETER Experiment Name: At_Drought_Soil_Dry_P Parameter: Age (day) Value: 27
  misc_feature: MA Experiment 20001557 PARAMETER Experiment Name: At_Drought_Soil_Dry_P Parameter: Organism Value: A. thaliana
  misc_feature: MA Experiment 20001557 PARAMETER Experiment Name: At_Drought_Soil_Dry_P Parameter: Plant Line Value: WS
  misc_feature: MA Experiment 20001557 PARAMETER Experiment Name: At_Drought_Soil_Dry_P Parameter: Post Timepoint (hr) Value: 3
  misc_feature: MA Experiment 20001557 PARAMETER Experiment Name: At_Drought_Soil_Dry_P Parameter: Post-Treatment Value: Re-Water vs. No Drought
  misc_feature: MA Experiment 20001557 PARAMETER Experiment Name: At_Drought_Soil_Dry_P Parameter: Timepoint (day) Value: 13
  misc_feature: MA Experiment 20001557 PARAMETER Experiment Name: At_Drought_Soil_Dry_P Parameter: Treatment Value: Drought vs. No Drought
  misc_feature: MA Experiment ID: 20001558 Result: Up-regulated in Transcription
  misc_feature: MA Experiment 20001558 PARAMETER Experiment Name: At_Drought_Soil_Dry_P Parameter: Age (day) Value: 27
  misc_feature: MA Experiment 20001558 PARAMETER Experiment Name: At_Drought_Soil_Dry_P Parameter: Organism Value: A. thaliana
  misc_feature: MA Experiment 20001558 PARAMETER Experiment Name: At_Drought_Soil_Dry_P Parameter: Plant Line Value: WS
  misc_feature: MA Experiment 20001558 PARAMETER Experiment Name: At_Drought_Soil_Dry_P Parameter: Post Timepoint (hr) Value: 6
  misc_feature: MA Experiment 20001558 PARAMETER Experiment Name: At_Drought_Soil_Dry_P Parameter: Post-Treatment Value: Re-Water vs. No Drought
  misc_feature: MA Experiment 20001558 PARAMETER Experiment Name: At_Drought_Soil_Dry_P Parameter: Timepoint (day) Value: 13
  misc_feature: MA Experiment 20001558 PARAMETER Experiment Name: At_Drought_Soil_Dry_P Parameter: Treatment Value: Drought vs. No Drought
atgaagagagcccaacaatcggcaagagaaacaaagcaagaagctaaagatgctagcaaagcgaagagcggtttgttcgcttcttgttccttctcttcacttggtttagataccaagctctctgaccagctcaaagaaaggatgggttttgaagctcctactcttgtacaagctcaagcaattcctgttattctctctggtcgagatgtacttgttaatgctccaaccggtactggaaagactatagcgtatttggcacccctcatccatcacttgcagggtcattctcctaaggttgatcgttctcatggaacttttgctttggtgattgtgcctacacgggaactatgccttcaggtgtatgaaaccttggagaagttactgcatcggttccattggatagtccctggctatgttatgggaggagagaaaaaggctaaagaaaaggctagattaaggaaaggaatatccattctaattgcaaccccgggacgccttcttgaccatttgaagaacacagcttcatttgtgcacaaaaatctgcgttgggtcatctttgatgaagctgatagcattctcgaattaggttatgggaaggagatagaacagataattaagcttctaggttcagggcaaaacgagcaaggggaagaagatgatattgttccaaagggtattcagaagcagaacttgttattgtcagcaacattgaatgataaagttaacgatcttgcaaaacttagtttggacgatccggtaatgattggtcttgacaacaccaaattgcaacaaaatctatcaatagagtctcctgcggctcctgactctgatgcggaagatatggtaattcatgttaacaaatccgcaaaccctttatctgaggactatggaataccatcacagctggtacagagatatcttagagtgccatgtggtgcacggcttgtggcacttctttctgttctcaagaacctttttgaaagagaagcttctcaaaaggtggtcgtcttcttttcgacacgtgatgctgtagattttcattactcacttctgagtgaattccagtggccaccgaattctgagacagaagaggaggggactaaagagttgtttctcaagtgcaaaacgttccggttacatggaagtatggagcaggaggatagaagatctgcgtttgggacctttaaaacagagaagcaggctgttctgttgagtacagatgttgctgctagaggcttggatttcccaaaagtaagatgtattatacaatatgactgtcccggggaagctaccgagtatgtgcatagagttggtagaacagctcgtattggtgaaaaaggagaagccttgttatttctacaaccgattgaaatagactatcttaaggagctgaagaaacatggtgcatcacttacagagtaccctcttatgaaagtacttgataaatttcccatacccggcaatatgccccgaatcaaaaaggtcctatctctagaatcccatccatgggtcatatctctgcagagagctcttgaatcccttacttacgccgagccaaagatgaagagcctggccaagaatgcatttgtctcttgggttaggggatatgcagctcacaagggagagctcaagagtattttcgtggtgaagaagcttcacttgggtcatgtcgccaagagttttgctctgagagaacaaccgtctttagttgggaaatcacatcacaaggaaacaatgaagagaaagagagacgaacgtcaaaaagggcaacaaggtaagaagagaaagaagatgagtggtactggcaatagaagtacacaaaaaacttgatcaaatcggtttcgccaccataaaccgtggcgtaagttttgtagttaaggagctggtttgctcatcgaatattttgaaatatcgaaaagaagttgggagctttatcatgtttgttaacaatattacttgtattggccagaaagctaaagattcacaaaatttgctt

SEQ ID NO: 96702 - protein, 609 aa, Arabidopsis thaliana
  peptide (1)..(609): Ceres Seq. ID no. 12734442
  misc_feature (48)..(284): Pfam Name: DEAD/DEAH box helicase Pfam Description: DEAD/DEAH box helicase
  misc_feature (22)..(598): Homolog of NCBI NO: 14719335 NR Description: putative ATP-dependent RNA helicase [Oryza sativa]
  misc_feature (312)..(609): Homolog of NCBI NO: 11358799 NR Description: RNA helicase RH17 [imported] - Arabidopsis (fragment) >gi|3776009|emb|CAA09207.1| RNA helicase [Arabidopsis
  misc_feature (227)..(593): Homolog of NCBI NO: 39645219 NR Description: DDX31 protein [Homo sapiens]
  misc_feature (25)..(265): Homolog of NCBI NO: 39645219 NR Description: DDX31 protein [Homo sapiens]
  misc_feature (227)..(593): Homolog of NCBI NO: 17505907 NR Description: DEAD/H (Asp-Glu-Ala-Asp/His) box polypeptide 31
  misc_feature (25)..(265): Homolog of NCBI NO: 17505907 NR Description: DEAD/H (Asp-Glu-Ala-Asp/His) box polypeptide 31
  misc_feature (216)..(593): Homolog of NCBI NO: 10440004 NR Description: unnamed protein product [Homo sapiens]
  misc_feature (25)..(265): Homolog of NCBI NO: 10440004 NR Description: unnamed protein product [Homo sapiens]
  misc_feature (22)..(355): Homolog of NCBI NO: 28828187 NR Description: similar to Homo sapiens (Human). DEAD/DEXH
  misc_feature (377)..(572): Homolog of NCBI NO: 28828187 NR Description: similar to Homo sapiens (Human). DEAD/DEXH
MKRAQQSARETKQEAKDASKAKSGLFASCSFSSLGLDTKLSDQLKERMGFEAPTLVQAQAIPVILSGRDVLVNAPTGTGKTIAYLAPLIHHLQGHSPKVDRSHGTFALVIVPTRELCLQVYETLEKLLHRFHWIVPGYVMGGEKKAKEKARLRKGISILIATPGRLLDHLKNTASFVHKNLRWVIFDEADSILELGYGKEIEQIIKLLGSGQNEQGEEDDIVPKGIQKQNLLLSATLNDKVNDLAKLSLDDPVMIGLDNTKLQQNLSIESPAAPDSDAEDMVIHVNKSANPLSEDYGIPSQLVQRYLRVPCGARLVALLSVLKNLFEREASQKVVVFFSTRDAVDFHYSLLSEFQWPPNSETEEEGTKELFLKCKTFRLHGSMEQEDRRSAFGTFKTEKQAVLLSTDVAARGLDFPKVRCIIQYDCPGEATEYVHRVGRTARIGEKGEALLFLQPIEIDYLKELKKHGASLTEYPLMKVLDKFPIPGNMPRIKKVLSLESHPWVISLQRALESLTYAEPKMKSLAKNAFVSWVRGYAAHKGELKSIFVVKKLHLGHVAKSFALREQPSLVGKSHHKETMKRKRDERQKGQQGKKRKKMSGTGNRSTQKT

SEQ ID NO: 96703 - protein, 562 aa, Arabidopsis thaliana
  peptide (1)..(562): Ceres Seq. ID no. 12734443
  misc_feature (1)..(237): Pfam Name: DEAD/DEAH box helicase Pfam Description: DEAD/DEAH box helicase
  misc_feature (1)..(551): Homolog of NCBI NO: 14719335 NR Description: putative ATP-dependent RNA helicase [Oryza sativa]
  misc_feature (265)..(562): Homolog of NCBI NO: 11358799 NR Description: RNA helicase RH17 [imported] - Arabidopsis (fragment) >gi|3776009|emb|CAA09207.1| RNA helicase [Arabidopsis
  misc_feature (180)..(546): Homolog of NCBI NO: 39645219 NR Description: DDX31 protein [Homo sapiens]
  misc_feature (1)..(218): Homolog of NCBI NO: 39645219 NR Description: DDX31 protein [Homo sapiens]
  misc_feature (180)..(546): Homolog of NCBI NO: 17505907 NR Description: DEAD/H (Asp-Glu-Ala-Asp/His) box polypeptide 31
  misc_feature (1)..(218): Homolog of NCBI NO: 17505907 NR Description: DEAD/H (Asp-Glu-Ala-Asp/His) box polypeptide 31
  misc_feature (169)..(546): Homolog of NCBI NO: 10440004 NR Description: unnamed protein product [Homo sapiens]
  misc_feature (1)..(218): Homolog of NCBI NO: 10440004 NR Description: unnamed protein product [Homo sapiens]
  misc_feature (1)..(308): Homolog of NCBI NO: 28828187 NR Description: similar to Homo sapiens (Human). DEAD/DEXH
  misc_feature (330)..(525): Homolog of NCBI NO: 28828187 NR Description: similar to Homo sapiens (Human). DEAD/DEXH
MGFEAPTLVQAQAIPVILSGRDVLVNAPTGTGKTIAYLAPLIHHLQGHSPKVDRSHGTFALVIVPTRELCLQVYETLEKLLHRFHWIVPGYVMGGEKKAKEKARLRKGISILIATPGRLLDHLKNTASFVHKNLRWVIFDEADSILELGYGKEIEQIIKLLGSGQNEQGEEDDIVPKGIQKQNLLLSATLNDKVNDLAKLSLDDPVMIGLDNTKLQQNLSIESPAAPDSDAEDMVIHVNKSANPLSEDYGIPSQLVQRYLRVPCGARLVALLSVLKNLFEREASQKVVVFFSTRDAVDFHYSLLSEFQWPPNSETEEEGTKELFLKCKTFRLHGSMEQEDRRSAFGTFKTEKQAVLLSTDVAARGLDFPKVRCIIQYDCPGEATEYVHRVGRTARIGEKGEALLFLQPIEIDYLKELKKHGASLTEYPLMKVLDKFPIPGNMPRIKKVLSLESHPWVISLQRALESLTYAEPKMKSLAKNAFVSWVRGYAAHKGELKSIFVVKKLHLGHVAKSFALREQPSLVGKSHHKETMKRKRDERQKGQQGKKRKKMSGTGNRSTQKT

SEQ ID NO: 96704 - protein, 470 aa, Arabidopsis thaliana
  peptide (1)..(470): Ceres Seq. ID no. 12734444
  misc_feature (1)..(145): Pfam Name: DEAD/DEAH box helicase Pfam Description: DEAD/DEAH box helicase
  misc_feature (1)..(459): Homolog of NCBI NO: 14719335 NR Description: putative ATP-dependent RNA helicase [Oryza sativa]
  misc_feature (173)..(470): Homolog of NCBI NO: 11358799 NR Description: RNA helicase RH17 [imported] - Arabidopsis (fragment) >gi|3776009|emb|CAA09207.1| RNA helicase [Arabidopsis
  misc_feature (88)..(454): Homolog of NCBI NO: 39645219 NR Description: DDX31 protein [Homo sapiens]
  misc_feature (1)..(126): Homolog of NCBI NO: 39645219 NR Description: DDX31 protein [Homo sapiens]
  misc_feature (88)..(454): Homolog of NCBI NO: 17505907 NR Description: DEAD/H (Asp-Glu-Ala-Asp/His) box polypeptide 31
  misc_feature (1)..(126): Homolog of NCBI NO: 17505907 NR Description: DEAD/H (Asp-Glu-Ala-Asp/His) box polypeptide 31
  misc_feature (77)..(454): Homolog of NCBI NO: 10440004 NR Description: unnamed protein product [Homo sapiens]
  misc_feature (1)..(126): Homolog of NCBI NO: 10440004 NR Description: unnamed protein product [Homo sapiens]
  misc_feature (1)..(216): Homolog of NCBI NO: 28828187 NR Description: similar to Homo sapiens (Human). DEAD/DEXH
  misc_feature (238)..(433): Homolog of NCBI NO: 28828187 NR Description: similar to Homo sapiens (Human). DEAD/DEXH
MGGEKKAKEKARLRKGISILIATPGRLLDHLKNTASFVHKNLRWVIFDEADSILELGYGKEIEQIIKLLGSGQNEQGEEDDIVPKGIQKQNLLLSATLNDKVNDLAKLSLDDPVMIGLDNTKLQQNLSIESPAAPDSDAEDMVIHVNKSANPLSEDYGIPSQLVQRYLRVPCGARLVALLSVLKNLFEREASQKVVVFFSTRDAVDFHYSLLSEFQWPPNSETEEEGTKELFLKCKTFRLHGSMEQEDRRSAFGTFKTEKQAVLLSTDVAARGLDFPKVRCIIQYDCPGEATEYVHRVGRTARIGEKGEALLFLQPIEIDYLKELKKHGASLTEYPLMKVLDKFPIPGNMPRIKKVLSLESHPWVISLQRALESLTYAEPKMKSLAKNAFVSWVRGYAAHKGELKSIFVVKKLHLGHVAKSFALREQPSLVGKSHHKETMKRKRDERQKGQQGKKRKKMSGTGNRSTQKT

SEQ ID NO: 96705 - DNA, 1745 bp, Arabidopsis thaliana
  misc_feature (1)..(1745): Ceres Seq. ID no. 12734466
  misc_feature: MA Experiment ID: 20000234 Result: Up-regulated in Transcription
  misc_feature: MA Experiment 20000234 PARAMETER Experiment Name: At_Siliques_P Parameter: Age (day) Value: 21
  misc_feature: MA Experiment 20000234 PARAMETER Experiment Name: At_Siliques_P Parameter: Organism Value: A. thaliana
  misc_feature: MA Experiment 20000234 PARAMETER Experiment Name: At_Siliques_P Parameter: Plant Line Value: WS
  misc_feature: MA Experiment 20000234 PARAMETER Experiment Name: At_Siliques_P Parameter: Tissue Value: Less Than 5mm Siliques vs. Whole Plant
  misc_feature: MA Experiment ID: 20000264 Result: Up-regulated in Transcription
  misc_feature: MA Experiment 20000264 PARAMETER Experiment Name: At_Open_Flower_P Parameter: Age (day) Value: 21
  misc_feature: MA Experiment 20000264 PARAMETER Experiment Name: At_Open_Flower_P Parameter: Plant Line Value: WS
  misc_feature: MA Experiment 20000264 PARAMETER Experiment Name: At_Open_Flower_P Parameter: Tissue Value: Open Flower vs. Whole Plant
  misc_feature: MA Experiment ID: 20000265 Result: Up-regulated in Transcription
  misc_feature: MA Experiment 20000265 PARAMETER Experiment Name: At_Open_Flower_P Parameter: Age (day) Value: 21
  misc_feature: MA Experiment 20000265 PARAMETER Experiment Name: At_Open_Flower_P Parameter: Plant Line Value: WS
  misc_feature: MA Experiment 20000265 PARAMETER Experiment Name: At_Open_Flower_P Parameter: Tissue Value: Closed Flower vs. Whole Plant
  misc_feature: MA Experiment ID: 20000286 Result: Up-regulated in Transcription
  misc_feature: MA Experiment 20000286 PARAMETER Experiment Name: At_Open_Flower_P Parameter: Age (day) Value: 21
  misc_feature: MA Experiment 20000286 PARAMETER Experiment Name: At_Open_Flower_P Parameter: Plant Line Value: WS
  misc_feature: MA Experiment 20000286 PARAMETER Experiment Name: At_Open_Flower_P Parameter: Tissue Value: Half Open vs. Whole Plant
  misc_feature: MA Experiment ID: 20000794 Result: Up-regulated in Transcription
  misc_feature: MA Experiment 20000794 PARAMETER Experiment Name: At_Petals_P Parameter: Age (day) Value: 23-25 days
  misc_feature: MA Experiment 20000794 PARAMETER Experiment Name: At_Petals_P Parameter: Plant Line Value: WS
  misc_feature: MA Experiment 20000794 PARAMETER Experiment Name: At_Petals_P Parameter: Tissue Value: Petals vs. Whole plant
  misc_feature: MA Experiment ID: 20001757 Result: Down-regulated in Transcription
  misc_feature: MA Experiment 20001757 PARAMETER Experiment Name: At_50mM_NH4NO3_L-to-H_P Parameter: Timepoint (hr) Value: 6
  misc_feature: MA Experiment 20001757 PARAMETER Experiment Name: At_50mM_NH4NO3_L-to-H_P Parameter: Tissue Value: Leaf
  misc_feature: MA Experiment 20001757 PARAMETER Experiment Name: At_50mM_NH4NO3_L-to-H_P Parameter: Treatment Value: 50mM NH4NO3 vs 100mM Mannitol
  misc_feature: MA Experiment ID: 20001910 Result: Up-regulated in Transcription
  misc_feature: MA Experiment 20001910 PARAMETER Experiment Name: At_Drought_Reproduction_P Parameter: Age (day) Value: 37
  misc_feature: MA Experiment 20001910 PARAMETER Experiment Name: At_Drought_Reproduction_P Parameter: Organism Value: A. thaliana
  misc_feature: MA Experiment 20001910 PARAMETER Experiment Name: At_Drought_Reproduction_P Parameter: Plant Line Value: WS
  misc_feature: MA Experiment 20001910 PARAMETER Experiment Name: At_Drought_Reproduction_P Parameter: Timepoint (day) Value: 7
  misc_feature: MA Experiment 20001910 PARAMETER Experiment Name: At_Drought_Reproduction_P Parameter: Tissue Value: Flowers
  misc_feature: MA Experiment 20001910 PARAMETER Experiment Name: At_Drought_Reproduction_P Parameter: Treatment Value: Drought vs. No Drought
taaataggagtgccaaagagttttggcatgaattgcttggctacgaccataatcatcacctgcaagcccacattgatctcggatatggccgtggctattgatcctttcagtgacaagttcccttactttaaccgatcctctcaaagatgcagacttcaatcccttaccaaccttgacttcaacttcctcgcgcaatcctttaatcatacgtttgaagatgacaacatccatcgtagtgtttcctctccttgcttttccatagctgcgtctgctaatatggaggaagatctcaaagcaaccacggctccacggattgagattcttggtggacagagagtgcccaccgttcgtgctcttgtggctgaggtgaccatggctatggtttctggagctcagcctttgcttttaccaagtggcatgggaggtgcttatctcttgcaaaccggaaagggacataacattgctgtggctaaaccggttgatgaagagcctctagctttcaataatcctaaaaagtctggaaatttgatgctcgggcaaccgggaatgaaacattcaattcctgttggcgagacgggtatcagagaactagctgcctaccttttggattaccaaggcttttctggtgttccaccaacagcattggttagtatctcacatgtcccattccatgtcagtgatgccttctctttctcctccatgccctataaggttgcttccttgcagcgatttgtgggtcatgattttgatgcaggagaattgggtccaggaagcttcacggctacttcggttcataggattggaatacttgatgtgagactcctgaaccttgacagacatgctggaaatatgctagtgaagagatgtgacaaaaaggaagcttataatcgacttgggaccgctgagcttgtgcctattgatcatggtctctgcctccctgaatgcctagatgatccttactttgaatggctaaactggcctcaagctttggttccattctctgacactgaactggattatatatccaatcttgaccctttcaaagacgcagaacttctgagaactgaactacactctctgccggaatctgccataagggtcctcgtcgtctgcacagttttcttaaaacaagcagcagctgcagggctctgtctcgcggagataggcgagaagatgactcgggatttctccaagggtgaagagagtttcagtctgttagagaccctctgcaccaaagcgaaagcaagtgtctttggcaaaacaagcgaagacagtgactatagtcatgaaggaaatgaagtgaacacagagttacagtgtggaatgtttaagtttgacggtggagatacaccatgtgaagcggagatttcagaggtatttcatgtatctaaaccacctttggttccaagagggccacgtgcaaacaccatccctaacgatgtaactgcttccatgtcgtcatcacaaaaccagcggattactcatcaagagaaaagtgcaaaagaaaagaagagaggaggcaagcaagaaagatgcaccgtgaggagcaagagcccaccgatcagtccaaaccatgatgaatcaaaaggagtttccttcgtggacatgacaacagttgaatgggatacgttcctgcagagcttccagacacttttgcaagatgcactgagcaaagggtcaacgccaagattaggatgctcctgcgaaatttgaggaaatcgattaatagaagacaggaaaacgac

SEQ ID NO: 96706 - protein, 561 aa, Arabidopsis thaliana
  peptide (1)..(561): Ceres Seq. ID no. 12734467
  misc_feature (130)..(386): Pfam Name: Phosphatidylinositol 3- and 4-kinase Pfam Description: Phosphatidylinositol 3- and 4-kinase
  misc_feature (1)..(561): Homolog of NCBI NO: 15226765 NR Description: hypothetical protein; protein id: At2g40850.1, by cDNA: gi_19310380 [Arabidopsis thaliana]
  misc_feature (1)..(561): Homolog of NCBI NO: 19310381 NR Description: At2g40850/T20B5.5 [Arabidopsis thaliana]
  misc_feature (185)..(442): Homolog of NCBI NO: 34903186 NR Description: unnamed protein product [Oryza sativa (japonica group)] >gi|6721557|dbj|BAA89587.1| unnamed protein product
  misc_feature (39)..(210): Homolog of NCBI NO: 34903186 NR Description: unnamed protein product [Oryza sativa (japonica group)] >gi|6721557|dbj|BAA89587.1| unnamed protein product
  misc_feature (53)..(292): Homolog of NCBI NO: 18395629 NR Description: null
  misc_feature (1)..(47): Homolog of NCBI NO: 18395629 NR Description: null
  misc_feature (47)..(386): Homolog of NCBI NO: 34904388 NR Description: unnamed protein product [Oryza sativa (japonica group)] >gi|8468000|dbj|BAA96601.1| unnamed protein product
  misc_feature (91)..(288): Homolog of NCBI NO: 25363315 NR Description: null
  misc_feature (49)..(325): Homolog of NCBI NO: 18395825 NR Description: null
  misc_feature (3)..(256): Homolog of NCBI NO: 18394020 NR Description: null
MNCLATTIIITCKPTLISDMAVAIDPFSDKFPYFNRSSQRCRLQSLTNLDFNFLAQSFNHTFEDDNIHRSVSSPCFSIAASANMEEDLKATTAPRIEILGGQRVPTVRALVAEVTMAMVSGAQPLLLPSGMGGAYLLQTGKGHNIAVAKPVDEEPLAFNNPKKSGNLMLGQPGMKHSIPVGETGIRELAAYLLDYQGFSGVPPTALVSISHVPFHVSDAFSFSSMPYKVASLQRFVGHDFDAGELGPGSFTATSVHRIGILDVRLLNLDRHAGNMLVKRCDKKEAYNRLGTAELVPIDHGLCLPECLDDPYFEWLNWPQALVPFSDTELDYISNLDPFKDAELLRTELHSLPESAIRVLVVCTVFLKQAAAAGLCLAEIGEKMTRDFSKGEESFSLLETLCTKAKASVFGKTSEDSDYSHEGNEVNTELQCGMFKFDGGDTPCEAEISEVFHVSKPPLVPRGPRANTIPNDVTASMSSSQNQRITHQEKSAKEKKRGGKQERCTVRSKSPPISPNHDESKGVSFVDMTTVEWDTFLQSFQTLLQDALSKGSTPRLGCSCEI

SEQ ID NO: 96707 - protein, 542 aa, Arabidopsis thaliana
  peptide (1)..(542): Ceres Seq. ID no. 12734468
  misc_feature (111)..(367): Pfam Name: Phosphatidylinositol 3- and 4-kinase Pfam Description: Phosphatidylinositol 3- and 4-kinase
  misc_feature (1)..(542): Homolog of NCBI NO: 15226765 NR Description: hypothetical protein; protein id: At2g40850.1, by cDNA: gi_19310380 [Arabidopsis thaliana]
  misc_feature (1)..(542): Homolog of NCBI NO: 19310381 NR Description: At2g40850/T20B5.5 [Arabidopsis thaliana]
  misc_feature (166)..(423): Homolog of NCBI NO: 34903186 NR Description: unnamed protein product [Oryza sativa (japonica group)] >gi|6721557|dbj|BAA89587.1| unnamed protein product
  misc_feature (20)..(191): Homolog of NCBI NO: 34903186 NR Description: unnamed protein product [Oryza sativa (japonica group)] >gi|6721557|dbj|BAA89587.1| unnamed protein product
  misc_feature (34)..(273): Homolog of NCBI NO: 18395629 NR Description: null
  misc_feature (1)..(28): Homolog of NCBI NO: 18395629 NR Description: null
  misc_feature (28)..(367): Homolog of NCBI NO: 34904388 NR Description: unnamed protein product [Oryza sativa (japonica group)] >gi|8468000|dbj|BAA96601.1| unnamed protein product
  misc_feature (72)..(269): Homolog of NCBI NO: 25363315 NR Description: null
  misc_feature (30)..(306): Homolog of NCBI NO: 18395825 NR Description: null
  misc_feature (1)..(237): Homolog of NCBI NO: 18394020 NR Description: null
MAVAIDPFSDKFPYFNRSSQRCRLQSLTNLDFNFLAQSFNHTFEDDNIHRSVSSPCFSIAASANMEEDLKATTAPRIEILGGQRVPTVRALVAEVTMAMVSGAQPLLLPSGMGGAYLLQTGKGHNIAVAKPVDEEPLAFNNPKKSGNLMLGQPGMKHSIPVGETGIRELAAYLLDYQGFSGVPPTALVSISHVPFHVSDAFSFSSMPYKVASLQRFVGHDFDAGELGPGSFTATSVHRIGILDVRLLNLDRHAGNMLVKRCDKKEAYNRLGTAELVPIDHGLCLPECLDDPYFEWLNWPQALVPFSDTELDYISNLDPFKDAELLRTELHSLPESAIRVLVVCTVFLKQAAAAGLCLAEIGEKMTRDFSKGEESFSLLETLCTKAKASVFGKTSEDSDYSHEGNEVNTELQCGMFKFDGGDTPCEAEISEVFHVSKPPLVPRGPRANTIPNDVTASMSSSQNQRITHQEKSAKEKKRGGKQERCTVRSKSPPISPNHDESKGVSFVDMTTVEWDTFLQSFQTLLQDALSKGSTPRLGCSCEI

SEQ ID NO: 96708 - protein, 478 aa, Arabidopsis thaliana
  peptide (1)..(478): Ceres Seq. ID no. 12734469
  misc_feature (47)..(303): Pfam Name: Phosphatidylinositol 3- and 4-kinase Pfam Description: Phosphatidylinositol 3- and 4-kinase
  misc_feature (1)..(478): Homolog of NCBI NO: 15226765 NR Description: hypothetical protein; protein id: At2g40850.1, by cDNA: gi_19310380 [Arabidopsis thaliana]
  misc_feature (1)..(478): Homolog of NCBI NO: 19310381 NR Description: At2g40850/T20B5.5 [Arabidopsis thaliana]
  misc_feature (102)..(359): Homolog of NCBI NO: 34903186 NR Description: unnamed protein product [Oryza sativa (japonica group)] >gi|6721557|dbj|BAA89587.1| unnamed protein product
  misc_feature (1)..(127): Homolog of NCBI NO: 34903186 NR Description: unnamed protein product [Oryza sativa (japonica group)] >gi|6721557|dbj|BAA89587.1| unnamed protein product
  misc_feature (1)..(209): Homolog of NCBI NO: 18395629 NR Description: null
  misc_feature (1)..(303): Homolog of NCBI NO: 34904388 NR Description: unnamed protein product [Oryza sativa (japonica group)] >gi|8468000|dbj|BAA96601.1| unnamed protein product
  misc_feature (8)..(205): Homolog of NCBI NO: 25363315 NR Description: null
  misc_feature (1)..(242): Homolog of NCBI NO: 18395825 NR Description: null
  misc_feature (1)..(173): Homolog of NCBI NO: 18394020 NR Description: null
  misc_feature (25)..(152): Homolog of NCBI NO: 25363319 NR Description: null
MEEDLKATTAPRIEILGGQRVPTVRALVAEVTMAMVSGAQPLLLPSGMGGAYLLQTGKGHNIAVAKPVDEEPLAFNNPKKSGNLMLGQPGMKHSIPVGETGIRELAAYLLDYQGFSGVPPTALVSISHVPFHVSDAFSFSSMPYKVASLQRFVGHDFDAGELGPGSFTATSVHRIGILDVRLLNLDRHAGNMLVKRCDKKEAYNRLGTAELVPIDHGLCLPECLDDPYFEWLNWPQALVPFSDTELDYISNLDPFKDAELLRTELHSLPESAIRVLVVCTVFLKQAAAAGLCLAEIGEKMTRDFSKGEESFSLLETLCTKAKASVFGKTSEDSDYSHEGNEVNTELQCGMFKFDGGDTPCEAEISEVFHVSKPPLVPRGPRANTIPNDVTASMSSSQNQRITHQEKSAKEKKRGGKQERCTVRSKSPPISPNHDESKGVSFVDMTTVEWDTFLQSFQTLLQDALSKGSTPRLGCSCEI

SEQ ID NO: 96709 - DNA, 2118 bp, Arabidopsis thaliana
  misc_feature (1)..(2118): Ceres Seq. ID no. 12734470
  misc_feature: MA Experiment ID: 20000180 Result: Up-regulated in Transcription
  misc_feature: MA Experiment 20000180 PARAMETER Experiment Name: At_Germinating_Seeds_P Parameter: Age (hr) Value: 24 vs. 0
  misc_feature: MA Experiment 20000180 PARAMETER Experiment Name: At_Germinating_Seeds_P Parameter: Tissue Value: Germinating Seeds
  misc_feature: MA Experiment ID: 20001451 Result: Down-regulated in Transcription
  misc_feature: MA Experiment 20001451 PARAMETER Experiment Name: At_Far-red-induction_P Parameter: Age (day) Value: 7
  misc_feature: MA Experiment 20001451 PARAMETER Experiment Name: At_Far-red-induction_P Parameter: Light Value: Far-red vs. White
  misc_feature: MA Experiment 20001451 PARAMETER Experiment Name: At_Far-red-induction_P Parameter: Organism Value: A. thaliana
  misc_feature: MA Experiment 20001451 PARAMETER Experiment Name: At_Far-red-induction_P Parameter: Plant Line Value: Columbia
  misc_feature: MA Experiment 20001451 PARAMETER Experiment Name: At_Far-red-induction_P Parameter: Timepoint (hr) Value: 24
  misc_feature: MA Experiment 20001451 PARAMETER Experiment Name: At_Far-red-induction_P Parameter: Tissue Value: Whole Plant
gtttttccggtggagaaaaatggtgatggaaattgtgaaaccaaacacatgcattagaggatgttgcaccagtgaatcgatccctcttcatctcccttcttcttccttcactcttctctccccaatcgctaaaggatcagagagtgttgtttatgaagcgattctcgatggccgaagagtagcagcgaagaagcctatcttgtctacttccgatgaccttgacaagttccacaggaatttgcagctctcatgcaatctcaatcatcctggtgtggctaagttactagcagcacatgcgaagcctccaaattacatgtttttctttgacttctacgagtctgggactttagctgagaagttacacgtcgaggagtggtctccgagtattgatcaagtgttactgatcacgcttcacttggcaaaggcattgcaatatcttcacaacaacgggattgttcatagggatgtgaaaccagcaaatgttcttcttgacgagaagtttttcccatatctggctgactttggtttagctgaatacaagaagaatttgcgcgaagttaatctgcagaattggagatcgtctgggaagccaactggtggattccacaaaaagaatatggtcggaacacttatttacatggcccctgaaatactgaggaaagacatgtatactgagaaagcagatatttatagctttgggattttgatcaatgagcttttaactggagttgttccatatactgatcgtcgtgcagaagctcaggctcacactgttttagagatgaattacacagaacagcaacttacagttgccattgtgtcttctggtctgcgaccagctcttgctgaaattggattgcaccttccaaagagtttgctatctctgatacaaaactgctgggaatctgatccgtctaaacgaccttcttcggacaatgtggttttggaactagaatcaatttgggaacaagtgagaggaaaacagcaaggtcatctccttgagaaaacttctaattcccagagtgatacggatggggcggacatcattaaaaattcaggagattacagggacaccgttaattggtttagtcaaggggagtgtttatccaagaaatcgtctgtttccactgtctttgatgtgaaattatggtctagttcaacagatgaaccttcaagatatgtcccagtaatttcttgtgggtcttttgcaacatgtggaagaagagaatccatggaagatacacacttcatcataccgcacatgtgtaatgaggaaagcatccacttatttgccatcttcgatggtcatagaggcgctgcagctgctgaattttctgctcaagttttgccaggactagttcaaagcttatgttccacaagcgctggcgaggcattgtcacaagcatttgttaggacagatttagctttcagacaagaactggattcccatcgtcagtcaaaaagggtgagtcagaaagactggcatcctggttgtactgctatagcctctctcctagtagagaataagcttttcgttgcgaatgttggtgactccagggcaattttatgccgcgccggtcacccttttgctctaagtaaggcacatcttgcaacttgtattgatgaaagaaatcgtgtgattggagaaggtggacgtattgaatggttggttgacacatggagagttgctcctgctggacttcaggttactcggtcaataggtgatgatgacctgaagccagctgtaacagcagaaccagagattagtgagacaattctatcagctgacgatgagttcttggtaatggcaagcgacgggctctgggatgttatgaacgatgaagaagttattggtataatcagggatactgtaaaagaaccttcaatgtgttcaaagagattagcaactgaagctgcagcacgtggtagtggtgacaacatcacagtcattgtagtcttcctgcggccagtgtctacagccgaaaggatctactagtagtatccaattcttgcacattattattcaacattcaacttctttacatataaattaattcatgtgtgttatcaaaatgaaccttatgttatcgtcccacagtattatatttgctctcaacc

SEQ ID NO: 96710 - protein, 664 aa, Arabidopsis thaliana
  peptide (1)..(664): Ceres Seq. ID no. 12734471
  misc_feature (397)..(647): Pfam Name: Protein phosphatase 2C Pfam Description: Protein phosphatase 2C
  misc_feature (15)..(664): Homolog of NCBI NO: 34913678 NR Description: OSJNBa0062A24.10 [Oryza sativa (japonica
  misc_feature (261)..(664): Homolog of NCBI NO: 7487243 NR Description: probable protein phosphatase 2C [imported] - thaliana >gi|2623300|gb|AAB86446.1| putative protein phosphatase
  misc_feature (28)..(236): Homolog of NCBI NO: 7487244 NR Description: probable protein kinase [imported] - Arabidopsis >gi|2623301|gb|AAB86447.1| putative protein kinase [Arabidopsis
  misc_feature (398)..(652): Homolog of NCBI NO: 30689144 NR Description: protein phosphatase 2C (PP2C), putative thaliana] >gi|19347765|gb|AAL86334.1| unknown protein thaliana] >gi|22136752|gb|AAM91695.1| unknown protein
  misc_feature (398)..(663): Homolog of NCBI NO: 20146110 NR Description: protein phosphatase 2C [Mesembryanthemum
  misc_feature (398)..(658): Homolog of NCBI NO: 15238651 NR Description: Protein phosphatase 2C-like protein; protein id:
  misc_feature (397)..(655): Homolog of NCBI NO: 18086420 NR Description: AT5g53140/MFH8_8 [Arabidopsis thaliana]
  misc_feature (397)..(655): Homolog of NCBI NO: 18423476 NR Description: protein phosphatase 2C (PP2C); protein id: supported by cDNA: gi_15027924, supported by cDNA: gi_18086419, by cDNA: gi_20259166 [Arabidopsis thaliana]
  misc_feature (398)..(654): Homolog of NCBI NO: 38345197 NR Description: OSJNBa0015K02.7 [Oryza sativa (japonica
  misc_feature (398)..(660): Homolog of NCBI NO: 18416366 NR Description: protein phosphatase 2C -like protein; protein id:
FFRWRKMVMEIVKPNTCIRGCCTSESIPLHLPSSSFTLLSPIAKGSESVVYEAILDGRRVAAKKPILSTSDDLDKFHRNLQLSCNLNHPGVAKLLAAHAKPPNYMFFFDFYESGTLAEKLHVEEWSPSIDQVLLITLHLAKALQYLHNNGIVHRDVKPANVLLDEKFFPYLADFGLAEYKKNLREVNLQNWRSSGKPTGGFHKKNMVGTLIYMAPEILRKDMYTEKADIYSFGILINELLTGVVPYTDRRAEAQAHTVLEMNYTEQQLTVAIVSSGLRPALAEIGLHLPKSLLSLIQNCWESDPSKRPSSDNVVLELESIWEQVRGKQQGHLLEKTSNSQSDTDGADIIKNSGDYRDTVNWFSQGECLSKKSSVSTVFDVKLWSSSTDEPSRYVPVISCGSFATCGRRESMEDTHFIIPHMCNEESIHLFAIFDGHRGAAAAEFSAQVLPGLVQSLCSTSAGEALSQAFVRTDLAFRQELDSHRQSKRVSQKDWHPGCTAIASLLVENKLFVANVGDSRAILCRAGHPFALSKAHLATCIDERNRVIGEGGRIEWLVDTWRVAPAGLQVTRSIGDDDLKPAVTAEPEISETILSADDEFLVMASDGLWDVMNDEEVIGIIRDTVKEPSMCSKRLATEAAARGSGDNITVIVVFLRPVSTAERIY

SEQ ID NO: 96711 - protein, 658 aa, Arabidopsis thaliana
  peptide (1)..(658): Ceres Seq. ID no. 12734472
  misc_feature (391)..(641): Pfam Name: Protein phosphatase 2C Pfam Description: Protein phosphatase 2C
  misc_feature (9)..(658): Homolog of NCBI NO: 34913678 NR Description: OSJNBa0062A24.10 [Oryza sativa (japonica
  misc_feature (255)..(658): Homolog of NCBI NO: 7487243 NR Description: probable protein phosphatase 2C [imported] - thaliana >gi|2623300|gb|AAB86446.1| putative protein phosphatase
  misc_feature (22)..(230): Homolog of NCBI NO: 7487244 NR Description: probable protein kinase [imported] - Arabidopsis >gi|2623301|gb|AAB86447.1| putative protein kinase [Arabidopsis
  misc_feature (392)..(646): Homolog of NCBI NO: 30689144 NR Description: protein phosphatase 2C (PP2C), putative thaliana] >gi|19347765|gb|AAL86334.1| unknown protein thaliana] >gi|22136752|gb|AAM91695.1| unknown protein
  misc_feature (392)..(657): Homolog of NCBI NO: 20146110 NR Description: protein phosphatase 2C [Mesembryanthemum
  misc_feature (392)..(652): Homolog of NCBI NO: 15238651 NR Description: Protein phosphatase 2C-like protein; protein id:
  misc_feature (391)..(649): Homolog of NCBI NO: 18086420 NR Description: AT5g53140/MFH8_8 [Arabidopsis thaliana]
  misc_feature (391)..(649): Homolog of NCBI NO: 18423476 NR Description: protein phosphatase 2C (PP2C); protein id: supported by cDNA: gi_15027924, supported by cDNA: gi_18086419, by cDNA: gi_20259166 [Arabidopsis thaliana]
  misc_feature (392)..(648): Homolog of NCBI NO: 38345197 NR Description: OSJNBa0015K02.7 [Oryza sativa (japonica
  misc_feature (392)..(654): Homolog of NCBI NO: 18416366 NR Description: protein phosphatase 2C -like protein; protein id:
MVMEIVKPNTCIRGCCTSESIPLHLPSSSFTLLSPIAKGSESVVYEAILDGRRVAAKKPILSTSDDLDKFHRNLQLSCNLNHPGVAKLLAAHAKPPNYMFFFDFYESGTLAEKLHVEEWSPSIDQVLLITLHLAKALQYLHNNGIVHRDVKPANVLLDEKFFPYLADFGLAEYKKNLREVNLQNWRSSGKPTGGFHKKNMVGTLIYMAPEILRKDMYTEKADIYSFGILINELLTGVVPYTDRRAEAQAHTVLEMNYTEQQLTVAIVSSGLRPALAEIGLHLPKSLLSLIQNCWESDPSKRPSSDNVVLELESIWEQVRGKQQGHLLEKTSNSQSDTDGADIIKNSGDYRDTVNWFSQGECLSKKSSVSTVFDVKLWSSSTDEPSRYVPVISCGSFATCGRRESMEDTHFIIPHMCNEESIHLFAIFDGHRGAAAAEFSAQVLPGLVQSLCSTSAGEALSQAFVRTDLAFRQELDSHRQSKRVSQKDWHPGCTAIASLLVENKLFVANVGDSRAILCRAGHPFALSKAHLATCIDERNRVIGEGGRIEWLVDTWRVAPAGLQVTRSIGDDDLKPAVTAEPEISETILSADDEFLVMASDGLWDVMNDEEVIGIIRDTVKEPSMCSKRLATEAAARGSGDNITVIVVFLRPVSTAERIY

SEQ ID NO: 96712 - protein, 656 aa, Arabidopsis thaliana
  peptide (1)..(656): Ceres Seq. ID no. 12734473
  misc_feature (389)..(639): Pfam Name: Protein phosphatase 2C Pfam Description: Protein phosphatase 2C
  misc_feature (7)..(656): Homolog of NCBI NO: 34913678 NR Description: OSJNBa0062A24.10 [Oryza sativa (japonica
  misc_feature (253)..(656): Homolog of NCBI NO: 7487243 NR Description: probable protein phosphatase 2C [imported] - thaliana >gi|2623300|gb|AAB86446.1| putative protein phosphatase
  misc_feature (20)..(228): Homolog of NCBI NO: 7487244 NR Description: probable protein kinase [imported] - Arabidopsis >gi|2623301|gb|AAB86447.1| putative protein kinase [Arabidopsis
  misc_feature (390)..(644): Homolog of NCBI NO: 30689144 NR Description: protein phosphatase 2C (PP2C), putative thaliana] >gi|19347765|gb|AAL86334.1| unknown protein thaliana] >gi|22136752|gb|AAM91695.1| unknown protein
  misc_feature (390)..(655): Homolog of NCBI NO: 20146110 NR Description: protein phosphatase 2C [Mesembryanthemum
  misc_feature (390)..(650): Homolog of NCBI NO: 15238651 NR Description: Protein phosphatase 2C-like protein; protein id:
  misc_feature (389)..(647): Homolog of NCBI NO: 18086420 NR Description: AT5g53140/MFH8_8 [Arabidopsis thaliana]
  misc_feature (389)..(647): Homolog of NCBI NO: 18423476 NR Description: protein phosphatase 2C (PP2C); protein id: supported by cDNA: gi_15027924, supported by cDNA: gi_18086419, by cDNA: gi_20259166 [Arabidopsis thaliana]
  misc_feature (390)..(646): Homolog of NCBI NO: 38345197 NR Description: OSJNBa0015K02.7 [Oryza sativa (japonica
  misc_feature (390)..(652): Homolog of NCBI NO: 18416366 NR Description: protein phosphatase 2C -like protein; protein id:
MEIVKPNTCIRGCCTSESIPLHLPSSSFTLLSPIAKGSESVVYEAILDGRRVAAKKPILSTSDDLDKFHRNLQLSCNLNHPGVAKLLAAHAKPPNYMFFFDFYESGTLAEKLHVEEWSPSIDQVLLITLHLAKALQYLHNNGIVHRDVKPANVLLDEKFFPYLADFGLAEYKKNLREVNLQNWRSSGKPTGGFHKKNMVGTLIYMAPEILRKDMYTEKADIYSFGILINELLTGVVPYTDRRAEAQAHTVLEMNYTEQQLTVAIVSSGLRPALAEIGLHLPKSLLSLIQNCWESDPSKRPSSDNVVLELESIWEQVRGKQQGHLLEKTSNSQSDTDGADIIKNSGDYRDTVNWFSQGECLSKKSSVSTVFDVKLWSSSTDEPSRYVPVISCGSFATCGRRESMEDTHFIIPHMCNEESIHLFAIFDGHRGAAAAEFSAQVLPGLVQSLCSTSAGEALSQAFVRTDLAFRQELDSHRQSKRVSQKDWHPGCTAIASLLVENKLFVANVGDSRAILCRAGHPFALSKAHLATCIDERNRVIGEGGRIEWLVDTWRVAPAGLQVTRSIGDDDLKPAVTAEPEISETILSADDEFLVMASDGLWDVMNDEEVIGIIRDTVKEPSMCSKRLATEAAARGSGDNITVIVVFLRPVSTAERIY

SEQ ID NO: 96713 - DNA, 2301 bp, Arabidopsis thaliana
  misc_feature (1)..(2301): Ceres Seq. ID no. 12734518
  misc_feature: MA Experiment ID: 20000355 Result: Up-regulated in Transcription
  misc_feature: MA Experiment 20000355 PARAMETER Experiment Name: At_Siliques_Sub_P Parameter: Age (day) Value: 21
  misc_feature: MA Experiment 20000355 PARAMETER Experiment Name: At_Siliques_Sub_P Parameter: Organism Value: A. thaliana
  misc_feature: MA Experiment 20000355 PARAMETER Experiment Name: At_Siliques_Sub_P Parameter: Plant Line Value: WS
  misc_feature: MA Experiment 20000355 PARAMETER Experiment Name: At_Siliques_Sub_P Parameter: Tissue Value: Less Than 5mm Siliques vs. Whole Plant
aaatctgagttaagcgaaaaaaaataaaagagcagaagtctctaaacatgcacgaggaagctctgaatctccagatatgaaatcgtagaaacagactctcgcatttatcgaatcctattgcagaagaatctgaaaaccctaatctgctcatcgttttcttcaattgcttgttgaagaagcagagaatctccgagatctgtgttcttccctctgggaatgtgcttcttcttcttcgtggagaacgattaaagcgcaacggagataaaatatatgaagcgttctctgagaagttacgcacattgatgaatcaagttcgtcgttggcagaggattctgatcctctcgctgctattgttatctgttttagctccgattgttttcgtttcgaatcggctcaagagcatcacttccgtcgatagaggagaattcattgaagaattatccgacattacagataagaccgaggatgaacttagacttactgctattgaacaggacgaagaaggcttgaaggagcctaaacgtattctgcaggatcgagattttaattctgtggttttgtcaaattcctctgataaaagtaatgatactgtgcagtctaatgagggagaccaaaaaaactttctctcagaagttgataagggaaataatcacaaaccaaaggaggaacaagcagtttcacagaaaaccacagtaagctcgaatgcggaggtgaaaatttcagcaagagatattcaacttaatcataaaacggaattccgacccccttcaagtaagagtgaaaagaatacaagggttcaacttgaaagagcaacagatgagagggtaaaggagatcagagacaaaattatccaagcgaaagcctatctgaatttggccctacctgggaataactcccaaatcgtaaaggagttgagagttcgaacgaaagagctggaacgggctactggtgatactaccaaggataaatatttgccaaagagctctcctaacagattgaaggccatggaagttgcgttatacaaggtcagccgtgcctttcacaactgccctgccattgctaccaaactccaagccatgacttataaaaccgaagaacaagctcgggcgcagaagaaacaagcagcatatttaatgcagcttgcagcaaggactaccccaaaagggcttcattgtctctcaatgcggttgacaacagaatattttaccctggatcacgaaaaaaggcagcttttgcaacaaagttataatgatcctgatctctaccattacgtagtcttctctgacaatgttttggcctcttcggttgttgttaactctacaatctcctcatcaaaggaaccggataaaatagtattccatgtggtgacagattcactcaattacccagcaatctcaatgtggtttttactaaacccaagtggcagagcttcaatccaaatcctaaacattgatgaaatgaatgtcctgccattgtaccatgctgaattgctgatgaagcaaaattcaagtgacccaagaatcatttcagcgctcaaccatgcacgcttctatctcccagatatcttcccaggtctaaacaagatcgtactcttcgatcatgatgtagtagtgcaaagggatctaactagactgtggagccttgatatgacggggaaagttgttggagctgtagagacttgtcttgaaggtgatccttcatatcgttcgatggactcattcattaatttctcagatgcatgggtttctcagaaatttgatcccaaggcttgcacttgggcattcgggatgaatctatttgatctcgaagaatggagaagacaggagttgacttctgtatacctgaaatacttcgacctgggagtaaaaggacatctgtggaaagcagggggattgccagtaggttggttgacttttttcgggcaaacgtttccgttggaaaagagatggaacgtgggtgggttaggtcacgaatcaggactcagggcaagcgacatcgaacaagcagcggttatacactacgacgggatcatgaaaccatggctggacatcggtatagacaagtacaagcgctactggaacatacatgtaccttaccatcaccctcacttacaacggtgcaacattcacgattgattttttgaaacaagttaccacaaaacttagattcaattcgattcttttcttctttccaaaatgttataattagcttcattctttaaacgatttcttgtgtaaatctttgttctttttgacacaacacacaaaattctcagagcagaatatcagatatagttcacag

SEQ ID NO: 96714 - protein, 610 aa, Arabidopsis thaliana
  peptide (1)..(610): Ceres Seq. ID no. 12734519
  misc_feature (106)..(608): Homolog of NCBI NO: 18390688 NR Description: expressed protein; protein id: At1g06780.1, by cDNA: gi_15028086, supported by cDNA: gi_20259310 [Arabidopsis
  misc_feature (9)..(403): Homolog of NCBI NO: 10177914 NR Description: emb|CAB71043.1~gene_id:MCA23.10~strong similarity
  misc_feature (9)..(403): Homolog of NCBI NO: 18422837 NR Description: putative protein; protein id: At5g47780.1, by cDNA: gi_15810326, supported by cDNA: gi_20259234 [Arabidopsis >gi|15810327|gb|AAL07051.1| unknown protein [Arabidopsis
  misc_feature (404)..(609): Homolog of NCBI NO: 10177914 NR Description: emb|CAB71043.1~gene_id:MCA23.10~strong similarity
  misc_feature (404)..(609): Homolog of NCBI NO: 18422837 NR Description: putative protein; protein id: At5g47780.1, by cDNA: gi_15810326, supported by cDNA: gi_20259234 [Arabidopsis >gi|15810327|gb|AAL07051.1| unknown protein [Arabidopsis
  misc_feature (4)..(407): Homolog of NCBI NO: 38423965 NR Description: putative glycosyltransferase [Oryza sativa
  misc_feature (404)..(609): Homolog of NCBI NO: 38423965 NR Description: putative glycosyltransferase [Oryza sativa
  misc_feature (85)..(406): Homolog of NCBI NO: 15233046 NR Description: putative protein; protein id: At3g61130.1, by cDNA: gi_14517361 [Arabidopsis thaliana]
  misc_feature (404)..(610): Homolog of NCBI NO: 15233046 NR Description: putative protein; protein id: At3g61130.1, by cDNA: gi_14517361 [Arabidopsis thaliana]
  misc_feature (172)..(403): Homolog of NCBI NO: 7271113 NR Description: 68 kDa protein [Cicer arietinum]
MNQVRRWQRILILSLLLLSVLAPIVFVSNRLKSITSVDRGEFIEELSDITDKTEDELRLTAIEQDEEGLKEPKRILQDRDFNSVVLSNSSDKSNDTVQSNEGDQKNFLSEVDKGNNHKPKEEQAVSQKTTVSSNAEVKISARDIQLNHKTEFRPPSSKSEKNTRVQLERATDERVKEIRDKIIQAKAYLNLALPGNNSQIVKELRVRTKELERATGDTTKDKYLPKSSPNRLKAMEVALYKVSRAFHNCPAIATKLQAMTYKTEEQARAQKKQAAYLMQLAARTTPKGLHCLSMRLTTEYFTLDHEKRQLLQQSYNDPDLYHYVVFSDNVLASSVVVNSTISSSKEPDKIVFHVVTDSLNYPAISMWFLLNPSGRASIQILNIDEMNVLPLYHAELLMKQNSSDPRIISALNHARFYLPDIFPGLNKIVLFDHDVVVQRDLTRLWSLDMTGKVVGAVETCLEGDPSYRSMDSFINFSDAWVSQKFDPKACTWAFGMNLFDLEEWRRQELTSVYLKYFDLGVKGHLWKAGGLPVGWLTFFGQTFPLEKRWNVGGLGHESGLRASDIEQAAVIHYDGIMKPWLDIGIDKYKRYWNIHVPYHHPHLQRCNIHD

SEQ ID NO: 96715 - protein, 376 aa, Arabidopsis thaliana
  peptide (1)..(376): Ceres Seq. ID no. 12734520
  misc_feature (1)..(374): Homolog of NCBI NO: 18390688 NR Description: expressed protein; protein id: At1g06780.1, by cDNA: gi_15028086, supported by cDNA: gi_20259310 [Arabidopsis
  misc_feature (1)..(169): Homolog of NCBI NO: 10177914 NR Description: emb|CAB71043.1~gene_id:MCA23.10~strong similarity
  misc_feature (1)..(169): Homolog of NCBI NO: 18422837 NR Description: putative protein; protein id: At5g47780.1, by cDNA: gi_15810326, supported by cDNA: gi_20259234 [Arabidopsis >gi|15810327|gb|AAL07051.1| unknown protein [Arabidopsis
  misc_feature (170)..(375): Homolog of NCBI NO: 10177914 NR Description: emb|CAB71043.1~gene_id:MCA23.10~strong similarity
  misc_feature (170)..(375): Homolog of NCBI NO: 18422837 NR Description: putative protein; protein id: At5g47780.1, by cDNA: gi_15810326, supported by cDNA: gi_20259234 [Arabidopsis >gi|15810327|gb|AAL07051.1| unknown protein [Arabidopsis
  misc_feature (1)..(173): Homolog of NCBI NO: 38423965 NR Description: putative glycosyltransferase [Oryza sativa
  misc_feature (170)..(375): Homolog of NCBI NO: 38423965 NR Description: putative glycosyltransferase [Oryza sativa
  misc_feature (1)..(172): Homolog of NCBI NO: 15233046 NR Description: putative protein; protein id: At3g61130.1, by cDNA: gi_14517361 [Arabidopsis thaliana]
  misc_feature (170)..(376): Homolog of NCBI NO: 15233046 NR Description: putative protein; protein id: At3g61130.1, by cDNA: gi_14517361 [Arabidopsis thaliana]
  misc_feature (1)..(169): Homolog of NCBI NO: 7271113 NR Description: 68 kDa protein [Cicer arietinum]
MEVALYKVSRAFHNCPAIATKLQAMTYKTEEQARAQKKQAAYLMQLAARTTPKGLHCLSMRLTTEYFTLDHEKRQLLQQSYNDPDLYHYVVFSDNVLASSVVVNSTISSSKEPDKIVFHVVTDSLNYPAISMWFLLNPSGRASIQILNIDEMNVLPLYHAELLMKQNSSDPRIISALNHARFYLPDIFPGLNKIVLFDHDVVVQRDLTRLWSLDMTGKVVGAVETCLEGDPSYRSMDSFINFSDAWVSQKFDPKACTWAFGMNLFDLEEWRRQELTSVYLKYFDLGVKGHLWKAGGLPVGWLTFFGQTFPLEKRWNVGGLGHESGLRASDIEQAAVIHYDGIMKPWLDIGIDKYKRYWNIHVPYHHPHLQRCNIHD

SEQ ID NO: 96716 - protein, 352 aa, Arabidopsis thaliana
  peptide (1)..(352): Ceres Seq. ID no. 12734521
  misc_feature (1)..(350): Homolog of NCBI NO: 18390688 NR Description: expressed protein; protein id: At1g06780.1, by cDNA: gi_15028086, supported by cDNA: gi_20259310 [Arabidopsis
  misc_feature (1)..(145): Homolog of NCBI NO: 10177914 NR Description: emb|CAB71043.1~gene_id:MCA23.10~strong similarity
  misc_feature (1)..(145): Homolog of NCBI NO: 18422837 NR Description: putative protein; protein id: At5g47780.1, by cDNA: gi_15810326, supported by cDNA: gi_20259234 [Arabidopsis >gi|15810327|gb|AAL07051.1| unknown protein [Arabidopsis
  misc_feature (146)..(351): Homolog of NCBI NO: 10177914 NR Description: emb|CAB71043.1~gene_id:MCA23.10~strong similarity
  misc_feature (146)..(351): Homolog of NCBI NO: 18422837 NR Description: putative protein; protein id: At5g47780.1, by cDNA: gi_15810326, supported by cDNA: gi_20259234 [Arabidopsis >gi|15810327|gb|AAL07051.1| unknown protein [Arabidopsis
  misc_feature (1)..(149): Homolog of NCBI NO: 38423965 NR Description: putative glycosyltransferase [Oryza sativa
  misc_feature (146)..(351): Homolog of NCBI NO: 38423965 NR Description: putative glycosyltransferase [Oryza sativa
  misc_feature (1)..(148): Homolog of NCBI NO: 15233046 NR Description: putative protein; protein id: At3g61130.1, by cDNA: gi_14517361 [Arabidopsis thaliana]
  misc_feature (146)..(352): Homolog of NCBI NO: 15233046 NR Description: putative protein; protein id: At3g61130.1, by cDNA: gi_14517361 [Arabidopsis thaliana]
  misc_feature (1)..(145): Homolog of NCBI NO: 7271113 NR Description: 68 kDa protein [Cicer arietinum]
MTYKTEEQARAQKKQAAYLMQLAARTTPKGLHCLSMRLTTEYFTLDHEKRQLLQQSYNDPDLYHYVVFSDNVLASSVVVNSTISSSKEPDKIVFHVVTDSLNYPAISMWFLLNPSGRASIQILNIDEMNVLPLYHAELLMKQNSSDPRIISALNHARFYLPDIFPGLNKIVLFDHDVVVQRDLTRLWSLDMTGKVVGAVETCLEGDPSYRSMDSFINFSDAWVSQKFDPKACTWAFGMNLFDLEEWRRQELTSVYLKYFDLGVKGHLWKAGGLPVGWLTFFGQTFPLEKRWNVGGLGHESGLRASDIEQAAVIHYDGIMKPWLDIGIDKYKRYWNIHVPYHHPHLQRCNIHD

SEQ ID NO: 96717 - DNA, 1233 bp, Arabidopsis thaliana
  misc_feature (1)..(1233): Ceres Seq. ID no. 12734536
  misc_feature: MA Experiment ID: 20000315 Result: Down-regulated in Transcription
  misc_feature: MA Experiment 20000315 PARAMETER Experiment Name: At_14day_Shoots-Roots_Sub_P Parameter: Age (day) Value: 14
  misc_feature: MA Experiment 20000315 PARAMETER Experiment Name: At_14day_Shoots-Roots_Sub_P Parameter: Organism Value: A. thaliana
  misc_feature: MA Experiment 20000315 PARAMETER Experiment Name: At_14day_Shoots-Roots_Sub_P Parameter: Plant Line Value: WS
  misc_feature: MA Experiment 20000315 PARAMETER Experiment Name: At_14day_Shoots-Roots_Sub_P Parameter: Tissue Value: Shoots vs. Whole Plant
atgcatgtccgggaggatacaaaggcgaaggaaaactgtaagaaaaaaaaaaggagaagaagaagatggcatctcactctcaggtttgttttctcttcttttctccaaatcttaaacggtcacttcttctctaatttagttcgatcacaggttttggtggaagagaaatcgagcgttagaatcttgacatttaacagacccaagcagcttaatgctctgtccttccacatggtctctcggttgttgcaactgttccttgcatatgaagaagaccctagtgtgaaacttgtcgtcctaaagggtcagggaagagccttttctgctggtggggacattccacctattgttcgtgatatcctacaaggcaaactgatacgcggtgcccattacttcaaagttggatacacgctcaactatgttttgtccacgtatagaaaacctcaggtttcaattttgaatggtattgtcatgggaggtggagctggtctctctaccaatggtcgatttcgtattgcaactgagaacacggttttcgcaatgcctgagacagctctagggctctttccagatgtaggggcctcttacttcttgtcaagactccctggattttttggagagtatgttggccttacaggagctaggttagatggcgccgaaatgcttgcatgtggtcttgcaactcattttgtgccttcaataagtttgactgcattagaagcagagctttacaaagttggttcaagtaatcaaacctttatctcaacaattctcgatgcatacgctgagttagatgttattgataggtgcttctcgaaaagaacagtggaggaaattttctctgcacttgagagagaggtcacacaaaaaccaaacgattggctcttagctaccattcaagcattggagaaggcttcaccatcatgccttaaaatctcgctaagatcgataagagaaggaagattgcaaggggtggggcagtgtcttatccgtgagtatagaatggtgtgtcatgtgatgaagggagacataagcaaagactttgtggaggggtgcagagcagtattgatagacaaagataggaatccaaagtggcagccaaggcgactcgaggacgtgacggatagcatggtagatcagtactttgagagagtggaggatgaggagggatgggaggatcttaagtttccgccaaggaacaacttgcctgctttagcaatcgcagcaaagctttga

SEQ ID NO: 96718 - protein, 410 aa, Arabidopsis thaliana
  peptide (1)..(410): Ceres Seq. ID no. 12734537
  misc_feature (60)..(231): Pfam Name: Enoyl-CoA hydratase/isomerase family Pfam Description: Enoyl-CoA hydratase/isomerase family
  misc_feature (1)..(410): Homolog of NCBI NO: 15224539 NR Description: 3-hydroxyisobutyryl-coenzyme A hydrolase; protein
  misc_feature (48)..(410): Homolog of NCBI NO: 15224549 NR Description: 3-hydroxyisobutyryl-coenzyme A hydrolase; protein
  misc_feature (48)..(407): Homolog of NCBI NO: 15239206 NR Description: 3-hydroxyisobutyryl-coenzyme A hydrolase; protein
  misc_feature (77)..(407): Homolog of NCBI NO: 6014701 NR Description: enoyl-CoA-hydratase [Avicennia marina]
  misc_feature (50)..(282): Homolog of NCBI NO: 30695218 NR Description: enoyl-CoA hydratase/isomerase family [Arabidopsis
  misc_feature (248)..(396): Homolog of NCBI NO: 30695218 NR Description: enoyl-CoA hydratase/isomerase family [Arabidopsis
  misc_feature (50)..(402): Homolog of NCBI NO: 22329062 NR Description: enoyl-CoA hydratase - like protein; protein id: supported by cDNA: gi_19424018, supported by cDNA: gi_21281144
  misc_feature (50)..(381): Homolog of NCBI NO: 37536724 NR Description: putative enoyl-CoA-hydratase [Oryza sativa
  misc_feature (45)..(388): Homolog of NCBI NO: 30679729 NR Description: 3-hydroxyisobutyryl-coenzyme A hydrolase
  misc_feature (44)..(381): Homolog of NCBI NO: 39579598 NR Description: Hypothetical protein CBG24044 [Caenorhabditis
MHVREDTKAKENCKKKKRRRRRWHLTLRFVFSSFLQILNGHFFSNLVRSQVLVEEKSSVRILTFNRPKQLNALSFHMVSRLLQLFLAYEEDPSVKLVVLKGQGRAFSAGGDIPPIVRDILQGKLIRGAHYFKVGYTLNYVLSTYRKPQVSILNGIVMGGGAGLSTNGRFRIATENTVFAMPETALGLFPDVGASYFLSRLPGFFGEYVGLTGARLDGAEMLACGLATHFVPSISLTALEAELYKVGSSNQTFISTILDAYAELDVIDRCFSKRTVEEIFSALEREVTQKPNDWLLATIQALEKASPSCLKISLRSIREGRLQGVGQCLIREYRMVCHVMKGDISKDFVEGCRAVLIDKDRNPKWQPRRLEDVTDSMVDQYFERVEDEEGWEDLKFPPRNNLPALAIAAKL

SEQ ID NO: 96719 - protein, 334 aa, Arabidopsis thaliana
  peptide (1)..(334): Ceres Seq. ID no. 12734538
  misc_feature (1)..(155): Pfam Name: Enoyl-CoA hydratase/isomerase family Pfam Description: Enoyl-CoA hydratase/isomerase family
  misc_feature (1)..(334): Homolog of NCBI NO: 15224539 NR Description: 3-hydroxyisobutyryl-coenzyme A hydrolase; protein
  misc_feature (1)..(334): Homolog of NCBI NO: 15224549 NR Description: 3-hydroxyisobutyryl-coenzyme A hydrolase; protein
  misc_feature (1)..(331): Homolog of NCBI NO: 15239206 NR Description: 3-hydroxyisobutyryl-coenzyme A hydrolase; protein
  misc_feature (1)..(331): Homolog of NCBI NO: 6014701 NR Description: enoyl-CoA-hydratase [Avicennia marina]
  misc_feature (1)..(206): Homolog of NCBI NO: 30695218 NR Description: enoyl-CoA hydratase/isomerase family [Arabidopsis
  misc_feature (172)..(320): Homolog of NCBI NO: 30695218 NR Description: enoyl-CoA hydratase/isomerase family [Arabidopsis
  misc_feature (1)..(326): Homolog of NCBI NO: 22329062 NR Description: enoyl-CoA hydratase - like protein; protein id: supported by cDNA: gi_19424018, supported by cDNA: gi_21281144
  misc_feature (1)..(305): Homolog of NCBI NO: 37536724 NR Description: putative enoyl-CoA-hydratase [Oryza sativa
  misc_feature (1)..(312): Homolog of NCBI NO: 30679729 NR Description: 3-hydroxyisobutyryl-coenzyme A hydrolase
  misc_feature (1)..(305): Homolog of NCBI NO: 39579598 NR Description: Hypothetical protein CBG24044 [Caenorhabditis
MVSRLLQLFLAYEEDPSVKLVVLKGQGRAFSAGGDIPPIVRDILQGKLIRGAHYFKVGYTLNYVLSTYRKPQVSILNGIVMGGGAGLSTNGRFRIATENTVFAMPETALGLFPDVGASYFLSRLPGFFGEYVGLTGARLDGAEMLACGLATHFVPSISLTALEAELYKVGSSNQTFISTILDAYAELDVIDRCFSKRTVEEIFSALEREVTQKPNDWLLATIQALEKASPSCLKISLRSIREGRLQGVGQCLIREYRMVCHVMKGDISKDFVEGCRAVLIDKDRNPKWQPRRLEDVTDSMVDQYFERVEDEEGWEDLKFPPRNNLPALAIAAKL

SEQ ID NO: 96720 - protein, 254 aa, Arabidopsis thaliana
  peptide (1)..(254): Ceres Seq. ID no. 12734539
  misc_feature (1)..(75): Pfam Name: Enoyl-CoA hydratase/isomerase family Pfam Description: Enoyl-CoA hydratase/isomerase family
  misc_feature (1)..(254): Homolog of NCBI NO: 15224539 NR Description: 3-hydroxyisobutyryl-coenzyme A hydrolase; protein
  misc_feature (1)..(254): Homolog of NCBI NO: 15224549 NR Description: 3-hydroxyisobutyryl-coenzyme A hydrolase; protein
  misc_feature (1)..(251): Homolog of NCBI NO: 15239206 NR Description: 3-hydroxyisobutyryl-coenzyme A hydrolase; protein
  misc_feature (1)..(251): Homolog of NCBI NO: 6014701 NR Description: enoyl-CoA-hydratase [Avicennia marina]
  misc_feature (1)..(126): Homolog of NCBI NO: 30695218 NR Description: enoyl-CoA hydratase/isomerase family [Arabidopsis
  misc_feature (92)..(240): Homolog of NCBI NO: 30695218 NR Description: enoyl-CoA hydratase/isomerase family [Arabidopsis
  misc_feature (1)..(246): Homolog of NCBI NO: 22329062 NR Description: enoyl-CoA hydratase - like protein; protein id: supported by cDNA: gi_19424018, supported by cDNA: gi_21281144
  misc_feature (1)..(225): Homolog of NCBI NO: 37536724 NR Description: putative enoyl-CoA-hydratase [Oryza sativa
  misc_feature (1)..(232): Homolog of NCBI NO: 30679729 NR Description: 3-hydroxyisobutyryl-coenzyme A hydrolase
  misc_feature (1)..(225): Homolog of NCBI NO: 39579598 NR Description: Hypothetical protein CBG24044 [Caenorhabditis
MGGGAGLSTNGRFRIATENTVFAMPETALGLFPDVGASYFLSRLPGFFGEYVGLTGARLDGAEMLACGLATHFVPSISLTALEAELYKVGSSNQTFISTILDAYAELDVIDRCFSKRTVEEIFSALEREVTQKPNDWLLATIQALEKASPSCLKISLRSIREGRLQGVGQCLIREYRMVCHVMKGDISKDFVEGCRAVLIDKDRNPKWQPRRLEDVTDSMVDQYFERVEDEEGWEDLKFPPRNNLPALAIAAKL

SEQ ID NO: 96721 - DNA, 1131 bp, Arabidopsis thaliana
  misc_feature (1)..(1131): Ceres Seq. ID no. 12734540
  misc_feature: MA Experiment ID: 20000307 Result: Up-regulated in Transcription
  misc_feature: MA Experiment 20000307 PARAMETER Experiment Name: At_Germinating_Seeds_Sub_P Parameter: Age (hr) Value: 24 vs. 0
  misc_feature: MA Experiment 20000307 PARAMETER Experiment Name: At_Germinating_Seeds_Sub_P Parameter: Organism Value: A. thaliana
  misc_feature: MA Experiment 20000307 PARAMETER Experiment Name: At_Germinating_Seeds_Sub_P Parameter: Plant Line Value: WS
  misc_feature: MA Experiment 20000307 PARAMETER Experiment Name: At_Germinating_Seeds_Sub_P Parameter: Tissue Value: Germinating Seeds
atggcatctcaatctcaggttttggtggaagagaaatcaagtgttagaattttgacattaaaccgacccaagcagcttaatgctctgtgcttcaacatgatctctcggttgctgcaactattccgtgcatatgaggaagaccctagtgttaaacttgtcatcctaaagggtcaaggaagagccttttgtgccggtggcgacgttccacctgttgttcaaaacatggtacaaggtaaatggagacttggtgccgatttcttcagagatcaatacacgctcaattatgttatggccacgtatagcaaacctcaggtttcaattttgaatggtattgtcatgggagccggtgctggtgtctccatccatggtcgatttcgcattgcaactgagaacacggtttttgccatgccggagacatctctggggctctttccagatgtaggcgcctcctatttcctgtcacggctccctggattttttggagagtatgttggccttacaggagctaggttagatggcgctgaattgcttgcgtgtggtcttgcaactcattttgttccttcaacgaggttgacagctctagaaacagatctttgcaaagttgggtcaagtgatccaagctttgtctcaacaattcttgatgcatacactcagcatccgcaccttaaacagaagagtgcttaccacaggttagatgttatcgataggtgcttctcgaagagaacaatggaagaaattatatctgcacttgagagagagaccactcaagaactagatgattggagcttaactacgattcgagctttgaagaagtcttcaccctcaagccttaaaatatctcttagatcgataagagaaggaagattgcaaggggtaggacactgtcttacccgcgagtatagaatggtgtgtcatgtgatgaagggagatttaagcaaagacttggggtgcagagccatattgatagacaaagataggaatccaaagtgggagccaaggcgattggaggacatgaaggatagcatggtagatcagttctttgagagagtggaagaagaggagcgatgggaggatcttaagctttcaccaaggaacaacttgcatgctttaagaattgcagcaaagttgtga

SEQ ID NO: 96722 - protein, 376 aa, Arabidopsis thaliana
  peptide (1)..(376): Ceres Seq. ID no. 12734541
  misc_feature (16)..(187): Pfam Name: Enoyl-CoA hydratase/isomerase family Pfam Description: Enoyl-CoA hydratase/isomerase family
  misc_feature (1)..(376): Homolog of NCBI NO: 15224549 NR Description: 3-hydroxyisobutyryl-coenzyme A hydrolase; protein
  misc_feature (1)..(373): Homolog of NCBI NO: 15239206 NR Description: 3-hydroxyisobutyryl-coenzyme A hydrolase; protein
  misc_feature (4)..(376): Homolog of NCBI NO: 15224539 NR Description: 3-hydroxyisobutyryl-coenzyme A hydrolase; protein
  misc_feature (33)..(373): Homolog of NCBI NO: 6014701 NR Description: enoyl-CoA-hydratase [Avicennia marina]
  misc_feature (6)..(268): Homolog of NCBI NO: 30695218 NR Description: enoyl-CoA hydratase/isomerase family [Arabidopsis
  misc_feature (246)..(367): Homolog of NCBI NO: 30695218 NR Description: enoyl-CoA hydratase/isomerase family [Arabidopsis
  misc_feature (103)..(367): Homolog of NCBI NO: 2688820 NR Description: enoyl-CoA hydratase [Prunus armeniaca]
  misc_feature (2)..(354): Homolog of NCBI NO: 37536724 NR Description: putative enoyl-CoA-hydratase [Oryza sativa
  misc_feature (4)..(361): Homolog of NCBI NO: 22329062 NR Description: enoyl-CoA hydratase - like protein; protein id: supported by cDNA: gi_19424018, supported by cDNA: gi_21281144
  misc_feature (133)..(268): Homolog of NCBI NO: 11357284 NR Description: enoyl-CoA-hydratase-like protein - Arabidopsis
MASQSQVLVEEKSSVRILTLNRPKQLNALCFNMISRLLQLFRAYEEDPSVKLVILKGQGRAFCAGGDVPPVVQNMVQGKWRLGADFFRDQYTLNYVMATYSKPQVSILNGIVMGAGAGVSIHGRFRIATENTVFAMPETSLGLFPDVGASYFLSRLPGFFGEYVGLTGARLDGAELLACGLATHFVPSTRLTALETDLCKVGSSDPSFVSTILDAYTQHPHLKQKSAYHRLDVIDRCFSKRTMEEIISALERETTQELDDWSLTTIRALKKSSPSSLKISLRSIREGRLQGVGHCLTREYRMVCHVMKGDLSKDLGCRAILIDKDRNPKWEPRRLEDMKDSMVDQFFERVEEEERWEDLKLSPRNNLHALRIAAKL

SEQ ID NO: 96723 - protein, 344 aa, Arabidopsis thaliana
  peptide (1)..(344): Ceres Seq. ID no. 12734542
  misc_feature (1)..(155): Pfam Name: Enoyl-CoA hydratase/isomerase family Pfam Description: Enoyl-CoA hydratase/isomerase family
  misc_feature (1)..(344): Homolog of NCBI NO: 15224549 NR Description: 3-hydroxyisobutyryl-coenzyme A hydrolase; protein
  misc_feature (1)..(341): Homolog of NCBI NO: 15239206 NR Description: 3-hydroxyisobutyryl-coenzyme A hydrolase; protein
  misc_feature (1)..(344): Homolog of NCBI NO: 15224539 NR Description: 3-hydroxyisobutyryl-coenzyme A hydrolase; protein
  misc_feature (1)..(341): Homolog of NCBI NO: 6014701 NR Description: enoyl-CoA-hydratase [Avicennia marina]
  misc_feature (1)..(236): Homolog of NCBI NO: 30695218 NR Description: enoyl-CoA hydratase/isomerase family [Arabidopsis
  misc_feature (214)..(335): Homolog of NCBI NO: 30695218 NR Description: enoyl-CoA hydratase/isomerase family [Arabidopsis
  misc_feature (71)..(335): Homolog of NCBI NO: 2688820 NR Description: enoyl-CoA hydratase [Prunus armeniaca]
  misc_feature (1)..(322): Homolog of NCBI NO: 37536724 NR Description: putative enoyl-CoA-hydratase [Oryza sativa
  misc_feature (1)..(329): Homolog of NCBI NO: 22329062 NR Description: enoyl-CoA hydratase - like protein; protein id: supported by cDNA: gi_19424018, supported by cDNA: gi_21281144
  misc_feature (101)..(236): Homolog of NCBI NO: 11357284 NR Description: enoyl-CoA-hydratase-like protein - Arabidopsis
MISRLLQLFRAYEEDPSVKLVILKGQGRAFCAGGDVPPVVQNMVQGKWRLGADFFRDQYTLNYVMATYSKPQVSILNGIVMGAGAGVSIHGRFRIATENTVFAMPETSLGLFPDVGASYFLSRLPGFFGEYVGLTGARLDGAELLACGLATHFVPSTRLTALETDLCKVGSSDPSFVSTILDAYTQHPHLKQKSAYHRLDVIDRCFSKRTMEEIISALERETTQELDDWSLTTIRALKKSSPSSLKISLRSIREGRLQGVGHCLTREYRMVCHVMKGDLSKDLGCRAILIDKDRNPKWEPRRLEDMKDSMVDQFFERVEEEERWEDLKLSPRNNLHALRIAAKL

SEQ ID NO: 96724 - protein, 302 aa, Arabidopsis thaliana
  peptide (1)..(302): Ceres Seq. ID no. 12734543
  misc_feature (1)..(113): Pfam Name: Enoyl-CoA hydratase/isomerase family Pfam Description: Enoyl-CoA hydratase/isomerase family
  misc_feature (1)..(302): Homolog of NCBI NO: 15224549 NR Description: 3-hydroxyisobutyryl-coenzyme A hydrolase; protein
  misc_feature (1)..(299): Homolog of NCBI NO: 15239206 NR Description: 3-hydroxyisobutyryl-coenzyme A hydrolase; protein
  misc_feature (1)..(302): Homolog of NCBI NO: 15224539 NR Description: 3-hydroxyisobutyryl-coenzyme A hydrolase; protein
  misc_feature (1)..(299): Homolog of NCBI NO: 6014701 NR Description: enoyl-CoA-hydratase [Avicennia marina]
  misc_feature (1)..(194): Homolog of NCBI NO: 30695218 NR Description: enoyl-CoA hydratase/isomerase family [Arabidopsis
  misc_feature (172)..(293): Homolog of NCBI NO: 30695218 NR Description: enoyl-CoA hydratase/isomerase family [Arabidopsis
  misc_feature (29)..(293): Homolog of NCBI NO: 2688820 NR Description: enoyl-CoA hydratase [Prunus armeniaca]
  misc_feature (1)..(280): Homolog of NCBI NO: 37536724 NR Description: putative enoyl-CoA-hydratase [Oryza sativa
  misc_feature (1)..(287): Homolog of NCBI NO: 22329062 NR Description: enoyl-CoA hydratase - like protein; protein id: supported by cDNA: gi_19424018, supported by cDNA: gi_21281144
  misc_feature (59)..(194): Homolog of NCBI NO: 11357284 NR Description: enoyl-CoA-hydratase-like protein - Arabidopsis
MVQGKWRLGADFFRDQYTLNYVMATYSKPQVSILNGIVMGAGAGVSIHGRFRIATENTVFAMPETSLGLFPDVGASYFLSRLPGFFGEYVGLTGARLDGAELLACGLATHFVPSTRLTALETDLCKVGSSDPSFVSTILDAYTQHPHLKQKSAYHRLDVIDRCFSKRTMEEIISALERETTQELDDWSLTTIRALKKSSPSSLKISLRSIREGRLQGVGHCLTREYRMVCHVMKGDLSKDLGCRAILIDKDRNPKWEPRRLEDMKDSMVDQFFERVEEEERWEDLKLSPRNNLHALRIAAKL

SEQ ID NO: 96725 - DNA, 789 bp, Arabidopsis thaliana
  misc_feature (1)..(789): Ceres Seq. ID no. 12734544
  misc_feature: MA Experiment ID: 20000436 Result: Down-regulated in Transcription
  misc_feature: MA Experiment 20000436 PARAMETER Experiment Name: At_Drought_P Parameter: Age (day) Value: 7
  misc_feature: MA Experiment 20000436 PARAMETER Experiment Name: At_Drought_P Parameter: Organism Value: A. thaliana
  misc_feature: MA Experiment 20000436 PARAMETER Experiment Name: At_Drought_P Parameter: Plant Line Value: WS
  misc_feature: MA Experiment 20000436 PARAMETER Experiment Name: At_Drought_P Parameter: Timepoint (hr) Value: 12
  misc_feature: MA Experiment 20000436 PARAMETER Experiment Name: At_Drought_P Parameter: Tissue Value: Whole Plant
  misc_feature: MA Experiment 20000436 PARAMETER Experiment Name: At_Drought_P Parameter: Treatment Value: Drought vs. No Drought
  misc_feature: MA Experiment ID: 20000451 Result: Up-regulated in Transcription
  misc_feature: MA Experiment 20000451 PARAMETER Experiment Name: At_CS6879_Shoots-Roots_P Parameter: Age (day) Value: 14
  misc_feature: MA Experiment 20000451 PARAMETER Experiment Name: At_CS6879_Shoots-Roots_P Parameter: Organism Value: A. thaliana
  misc_feature: MA Experiment 20000451 PARAMETER Experiment Name: At_CS6879_Shoots-Roots_P Parameter: Plant Line Value: CS6879 vs. WS
  misc_feature: MA Experiment 20000451 PARAMETER Experiment Name: At_CS6879_Shoots-Roots_P Parameter: Tissue Value: Roots
  misc_feature: MA Experiment ID: 20000460 Result: Down-regulated in Transcription
  misc_feature: MA Experiment 20000460 PARAMETER Experiment Name: At_10percent_PEG_P Parameter: Age (day) Value: 12
  misc_feature: MA Experiment 20000460 PARAMETER Experiment Name: At_10percent_PEG_P Parameter: Organism Value: A. thaliana
  misc_feature: MA Experiment 20000460 PARAMETER Experiment Name: At_10percent_PEG_P Parameter: Plant Line Value: WS
  misc_feature: MA Experiment 20000460 PARAMETER Experiment Name: At_10percent_PEG_P Parameter: Timepoint (day) Value: 12
  misc_feature: MA Experiment 20000460 PARAMETER Experiment Name: At_10percent_PEG_P Parameter: Tissue Value: Whole Plant
  misc_feature: MA Experiment 20000460 PARAMETER Experiment Name: At_10percent_PEG_P Parameter: Treatment Value: 10percent PEG vs. No Treatment
atggataaaagatggagtcttcagggtatgaccgctcttgtaactggtggagccagcggaatcgggcatgctatagtagaggagctagccggtcttggagctagaatctatgtatgcgatatatctgaaacactgctcaatcaaagtttaagtgaatgggaaaagaaagggtttcaagtaagtggttcaatatgtgatgtatcctctcattccgagagggaaacacttatgcaaacagtctcaaagatgttcgatggcaagctgaacattcttgtgaacaatgttggcgtagttaatccaaagccaacaatagaatatgtggcagccgatttctcgttcagtatttcaacaaacttggaatctgcttatcaccttagccaactttcacatcctctcctaaaagcttcagaatttggaagcatcatcttcatttcttctgttggaggggttgtgtcaatggagtgtggatctatctatagtttaacgaaaggagctttgaatcaactagcaaaaactttggcatgtgaatgggcaagagatggcataagagccaactctgttgctcctaattttatctacactgctatggctcaaccttttttcaaagacgccgattacgagaagagtttggttagtagaactccacttggtcgcgctggagagccaaatgaggtttcatcacttgtggcttttctgtgtctacctgcagcttcatatattactggtcagaccatttgtgttgatggaggtctcactgtcaatggtttctcctataagccacaggcttga

SEQ ID NO: 96726 - protein, 262 aa, Arabidopsis thaliana
  peptide (1)..(262): Ceres Seq. ID no. 12734545
  misc_feature (1)..(262): Homolog of NCBI NO: 15224550 NR Description: putative tropinone reductase; protein id: [Arabidopsis thaliana] >gi|25283135|pir||C84711 probable
  misc_feature (1)..(260): Homolog of NCBI NO: 15227073 NR Description: putative tropinone reductase; protein id: [Arabidopsis thaliana] >gi|25283130|pir||A84695 probable
  misc_feature (1)..(262): Homolog of NCBI NO: 15227072 NR Description: putative tropinone reductase; protein id: supported by cDNA: 1637. [Arabidopsis thaliana]
  misc_feature (1)..(262): Homolog of NCBI NO: 15529236 NR Description: At2g29320/F16P2.30 [Arabidopsis thaliana]
  misc_feature (1)..(262): Homolog of NCBI NO: 21553753 NR Description: putative tropinone reductase [Arabidopsis
  misc_feature (1)..(261): Homolog of NCBI NO: 30684202 NR Description: short-chain dehydrogenase/reductase family [Arabidopsis thaliana] >gi|25283131|pir||B84695 probable
  misc_feature (1)..(262): Homolog of NCBI NO: 15227071 NR Description: putative tropinone reductase; protein id: [Arabidopsis thaliana] >gi|25283128|pir||G84694 probable
  misc_feature (1)..(262): Homolog of NCBI NO: 15227070 NR Description: putative tropinone reductase; protein id: supported by cDNA: gi_18252898 [Arabidopsis thaliana]
  misc_feature (3)..(261): Homolog of NCBI NO: 15222399 NR Description: tropinone reductase-I, putative; protein id: supported by cDNA: gi_13605590, supported by cDNA: gi_15777866 thaliana] >gi|13605591|gb|AAK32789.1|AF361621_1
  misc_feature (3)..(261): Homolog of NCBI NO: 25406975 NR Description: protein F22G5.20 [imported] - Arabidopsis >gi|8778545|gb|AAF79553.1|AC022464_11 F22G5.20 [Arabidopsis
MDKRWSLQGMTALVTGGASGIGHAIVEELAGLGARIYVCDISETLLNQSLSEWEKKGFQVSGSICDVSSHSERETLMQTVSKMFDGKLNILVNNVGVVNPKPTIEYVAADFSFSISTNLESAYHLSQLSHPLLKASEFGSIIFISSVGGVVSMECGSIYSLTKGALNQLAKTLACEWARDGIRANSVAPNFIYTAMAQPFFKDADYEKSLVSRTPLGRAGEPNEVSSLVAFLCLPAASYITGQTICVDGGLTVNGFSYKPQA

SEQ ID NO: 96727 - protein, 253 aa, Arabidopsis thaliana
  peptide (1)..(253): Ceres Seq. ID no. 12734546
  misc_feature (1)..(253): Homolog of NCBI NO: 15224550 NR Description: putative tropinone reductase; protein id: [Arabidopsis thaliana] >gi|25283135|pir||C84711 probable
  misc_feature (1)..(251): Homolog of NCBI NO: 15227073 NR Description: putative tropinone reductase; protein id: [Arabidopsis thaliana] >gi|25283130|pir||A84695 probable
  misc_feature (1)..(253): Homolog of NCBI NO: 15227072 NR Description: putative tropinone reductase; protein id: supported by cDNA: 1637. [Arabidopsis thaliana]
  misc_feature (1)..(253): Homolog of NCBI NO: 15529236 NR Description: At2g29320/F16P2.30 [Arabidopsis thaliana]
  misc_feature (1)..(253): Homolog of NCBI NO: 21553753 NR Description: putative tropinone reductase [Arabidopsis
  misc_feature (1)..(252): Homolog of NCBI NO: 30684202 NR Description: short-chain dehydrogenase/reductase family [Arabidopsis thaliana] >gi|25283131|pir||B84695 probable
  misc_feature (1)..(253): Homolog of NCBI NO: 15227071 NR Description: putative tropinone reductase; protein id: [Arabidopsis thaliana] >gi|25283128|pir||G84694 probable
  misc_feature (1)..(253): Homolog of NCBI NO: 15227070 NR Description: putative tropinone reductase; protein id: supported by cDNA: gi_18252898 [Arabidopsis thaliana]
  misc_feature (1)..(252): Homolog of NCBI NO: 15222399 NR Description: tropinone reductase-I, putative; protein id: supported by cDNA: gi_13605590, supported by cDNA: gi_15777866 thaliana] >gi|13605591|gb|AAK32789.1|AF361621_1
  misc_feature (1)..(252): Homolog of NCBI NO: 25406975 NR Description: protein F22G5.20 [imported] - Arabidopsis >gi|8778545|gb|AAF79553.1|AC022464_11 F22G5.20 [Arabidopsis
MTALVTGGASGIGHAIVEELAGLGARIYVCDISETLLNQSLSEWEKKGFQVSGSICDVSSHSERETLMQTVSKMFDGKLNILVNNVGVVNPKPTIEYVAADFSFSISTNLESAYHLSQLSHPLLKASEFGSIIFISSVGGVVSMECGSIYSLTKGALNQLAKTLACEWARDGIRANSVAPNFIYTAMAQPFFKDADYEKSLVSRTPLGRAGEPNEVSSLVAFLCLPAASYITGQTICVDGGLTVNGFSYKPQA

SEQ ID NO: 96728 - protein, 186 aa, Arabidopsis thaliana
  peptide (1)..(186): Ceres Seq. ID no. 12734547
  misc_feature (1)..(186): Homolog of NCBI NO: 15224550 NR Description: putative tropinone reductase; protein id: [Arabidopsis thaliana] >gi|25283135|pir||C84711 probable
  misc_feature (1)..(184): Homolog of NCBI NO: 15227073 NR Description: putative tropinone reductase; protein id: [Arabidopsis thaliana] >gi|25283130|pir||A84695 probable
  misc_feature (1)..(186): Homolog of NCBI NO: 15227072 NR Description: putative tropinone reductase; protein id: supported by cDNA: 1637. [Arabidopsis thaliana]
  misc_feature (1)..(186): Homolog of NCBI NO: 15529236 NR Description: At2g29320/F16P2.30 [Arabidopsis thaliana]
  misc_feature (1)..(186): Homolog of NCBI NO: 21553753 NR Description: putative tropinone reductase [Arabidopsis
  misc_feature (1)..(185): Homolog of NCBI NO: 30684202 NR Description: short-chain dehydrogenase/reductase family [Arabidopsis thaliana] >gi|25283131|pir||B84695 probable
  misc_feature (1)..(186): Homolog of NCBI NO: 15227071 NR Description: putative tropinone reductase; protein id: [Arabidopsis thaliana] >gi|25283128|pir||G84694 probable
  misc_feature (1)..(186): Homolog of NCBI NO: 15227070 NR Description: putative tropinone reductase; protein id: supported by cDNA: gi_18252898 [Arabidopsis thaliana]
  misc_feature (1)..(185): Homolog of NCBI NO: 15222399 NR Description: tropinone reductase-I, putative; protein id: supported by cDNA: gi_13605590, supported by cDNA: gi_15777866 thaliana] >gi|13605591|gb|AAK32789.1|AF361621_1
  misc_feature (1)..(185): Homolog of NCBI NO: 25406975 NR Description: protein F22G5.20 [imported] - Arabidopsis >gi|8778545|gb|AAF79553.1|AC022464_11 F22G5.20 [Arabidopsis
MQTVSKMFDGKLNILVNNVGVVNPKPTIEYVAADFSFSISTNLESAYHLSQLSHPLLKASEFGSIIFISSVGGVVSMECGSIYSLTKGALNQLAKTLACEWARDGIRANSVAPNFIYTAMAQPFFKDADYEKSLVSRTPLGRAGEPNEVSSLVAFLCLPAASYITGQTICVDGGLTVNGFSYKPQA

SEQ ID NO: 96729 - DNA, 1494 bp, Arabidopsis thaliana
  misc_feature (1)..(1494): Ceres Seq. ID no. 12734548
  misc_feature: MA Experiment ID: 20000179 Result: Down-regulated in Transcription
  misc_feature: MA Experiment 20000179 PARAMETER Experiment Name: At_Germinating_Seeds_P Parameter: Age (hr) Value: 6 vs. 0
  misc_feature: MA Experiment 20000179 PARAMETER Experiment Name: At_Germinating_Seeds_P Parameter: Tissue Value: Germinating Seeds
  misc_feature: MA Experiment ID: 20000180 Result: Down-regulated in Transcription
  misc_feature: MA Experiment 20000180 PARAMETER Experiment Name: At_Germinating_Seeds_P Parameter: Age (hr) Value: 24 vs. 0
  misc_feature: MA Experiment 20000180 PARAMETER Experiment Name: At_Germinating_Seeds_P Parameter: Tissue Value: Germinating Seeds
  misc_feature: MA Experiment ID: 20000185 Result: Down-regulated in Transcription
  misc_feature: MA Experiment 20000185 PARAMETER Experiment Name: At_Roots__P Parameter: Age (day) Value: 7 vs. 21
  misc_feature: MA Experiment 20000185 PARAMETER Experiment Name: At_Roots__P Parameter: Organism Value: A. thaliana
  misc_feature: MA Experiment 20000185 PARAMETER Experiment Name: At_Roots__P Parameter: Tissue Value: Roots vs. Whole Plant
  misc_feature: MA Experiment ID: 20000227 Result: Down-regulated in Transcription
  misc_feature: MA Experiment 20000227 PARAMETER Experiment Name: At_Root-Tips-vs-Tops_P Parameter: Tissue Value: Root Tips vs. Root Tops
  misc_feature: MA Experiment ID: 20000234 Result: Down-regulated in Transcription
  misc_feature: MA Experiment 20000234 PARAMETER Experiment Name: At_Siliques_P Parameter: Age (day) Value: 21
  misc_feature: MA Experiment 20000234 PARAMETER Experiment Name: At_Siliques_P Parameter: Organism Value: A. thaliana
  misc_feature: MA Experiment 20000234 PARAMETER Experiment Name: At_Siliques_P Parameter: Plant Line Value: WS
  misc_feature: MA Experiment 20000234 PARAMETER Experiment Name: At_Siliques_P Parameter: Tissue Value: Less Than 5mm Siliques vs. Whole Plant
  misc_feature: MA Experiment ID: 20000264 Result: Down-regulated in Transcription
  misc_feature: MA Experiment 20000264 PARAMETER Experiment Name: At_Open_Flower_P Parameter: Age (day) Value: 21
  misc_feature: MA Experiment 20000264 PARAMETER Experiment Name: At_Open_Flower_P Parameter: Plant Line Value: WS
  misc_feature: MA Experiment 20000264 PARAMETER Experiment Name: At_Open_Flower_P Parameter: Tissue Value: Open Flower vs. Whole Plant
  misc_feature: MA Experiment ID: 20000265 Result: Down-regulated in Transcription
  misc_feature: MA Experiment 20000265 PARAMETER Experiment Name: At_Open_Flower_P Parameter: Age (day) Value: 21
  misc_feature: MA Experiment 20000265 PARAMETER Experiment Name: At_Open_Flower_P Parameter: Plant Line Value: WS
  misc_feature: MA Experiment 20000265 PARAMETER Experiment Name: At_Open_Flower_P Parameter: Tissue Value: Closed Flower vs. Whole Plant
  misc_feature: MA Experiment ID: 20000286 Result: Down-regulated in Transcription
  misc_feature: MA Experiment 20000286 PARAMETER Experiment Name: At_Open_Flower_P Parameter: Age (day) Value: 21
  misc_feature: MA Experiment 20000286 PARAMETER Experiment Name: At_Open_Flower_P Parameter: Plant Line Value: WS
  misc_feature: MA Experiment 20000286 PARAMETER Experiment Name: At_Open_Flower_P Parameter: Tissue Value: Half Open vs. Whole Plant
  misc_feature: MA Experiment ID: 20000439 Result: Down-regulated in Transcription
  misc_feature: MA Experiment 20000439 PARAMETER Experiment Name: At_Roots__P Parameter: Age (day) Value: 14 vs. 21
  misc_feature: MA Experiment 20000439 PARAMETER Experiment Name: At_Roots__P Parameter: Organism Value: A. thaliana
  misc_feature: MA Experiment 20000439 PARAMETER Experiment Name: At_Roots__P Parameter: Tissue Value: Roots vs. Whole Plant
  misc_feature: MA Experiment ID: 20000451 Result: Up-regulated in Transcription
  misc_feature: MA Experiment 20000451 PARAMETER Experiment Name: At_CS6879_Shoots-Roots_P Parameter: Age (day) Value: 14
  misc_feature: MA Experiment 20000451 PARAMETER Experiment Name: At_CS6879_Shoots-Roots_P Parameter: Organism Value: A. thaliana
  misc_feature: MA Experiment 20000451 PARAMETER Experiment Name: At_CS6879_Shoots-Roots_P Parameter: Plant Line Value: CS6879 vs. WS
  misc_feature: MA Experiment 20000451 PARAMETER Experiment Name: At_CS6879_Shoots-Roots_P Parameter: Tissue Value: Roots
  misc_feature: MA Experiment ID: 20000527 Result: Down-regulated in Transcription
  misc_feature: MA Experiment 20000527 PARAMETER Experiment Name: At_10percent_PEG_P Parameter: Age (day) Value: 20
  misc_feature: MA Experiment 20000527 PARAMETER Experiment Name: At_10percent_PEG_P Parameter: Organism Value: A. thaliana
  misc_feature: MA Experiment 20000527 PARAMETER Experiment Name: At_10percent_PEG_P Parameter: Plant Line Value: WS
  misc_feature: MA Experiment 20000527 PARAMETER Experiment Name: At_10percent_PEG_P Parameter: Timepoint (day) Value: 20
  misc_feature: MA Experiment 20000527 PARAMETER Experiment Name: At_10percent_PEG_P Parameter: Tissue Value: Whole Plant
  misc_feature: MA Experiment 20000527 PARAMETER Experiment Name: At_10percent_PEG_P Parameter: Treatment Value: 10percent PEG vs. No Treatment
  misc_feature: MA Experiment ID: 20000574 Result: Up-regulated in Transcription
  misc_feature: MA Experiment 20000574 PARAMETER Experiment Name: At_100uM_ABA_Mutants__P Parameter: Organism Value: A. thaliana
  misc_feature: MA Experiment 20000574 PARAMETER Experiment Name: At_100uM_ABA_Mutants__P Parameter: Plant Line Value: CS23 vs. Ler wt
  misc_feature: MA Experiment 20000574 PARAMETER Experiment Name: At_100uM_ABA_Mutants__P Parameter: Timepoint (hr) Value: N/A
  misc_feature: MA Experiment 20000574 PARAMETER Experiment Name: At_100uM_ABA_Mutants__P Parameter: Tissue Value: Whole Plant
  misc_feature: MA Experiment 20000574 PARAMETER Experiment Name: At_100uM_ABA_Mutants__P Parameter: Treatment Value: None
  misc_feature: MA Experiment ID: 20001248 Result: Up-regulated in Transcription
  misc_feature: MA Experiment 20001248 PARAMETER Experiment Name: At_Far-red-induction_P Parameter: Age (day) Value: 7
  misc_feature: MA Experiment 20001248 PARAMETER Experiment Name: At_Far-red-induction_P Parameter: Light Value: Far-red vs. White
  misc_feature: MA Experiment 20001248 PARAMETER Experiment Name: At_Far-red-induction_P Parameter: Organism Value: A. thaliana
  misc_feature: MA Experiment 20001248 PARAMETER Experiment Name: At_Far-red-induction_P Parameter: Plant Line Value: Columbia
  misc_feature: MA Experiment 20001248 PARAMETER Experiment Name: At_Far-red-induction_P Parameter: Timepoint (hr) Value: 4
  misc_feature: MA Experiment 20001248 PARAMETER Experiment Name: At_Far-red-induction_P Parameter: Tissue Value: Whole Plant
  misc_feature: MA Experiment ID: 20001555 Result: Down-regulated in Transcription
  misc_feature: MA Experiment 20001555 PARAMETER Experiment Name: At_Drought_Soil_Dry_P Parameter: Age (day) Value: 24
  misc_feature: MA Experiment 20001555 PARAMETER Experiment Name: At_Drought_Soil_Dry_P Parameter: Organism Value: A. thaliana
  misc_feature: MA Experiment 20001555 PARAMETER Experiment Name: At_Drought_Soil_Dry_P Parameter: Plant Line Value: WS
  misc_feature: MA Experiment 20001555 PARAMETER Experiment Name: At_Drought_Soil_Dry_P Parameter: Post Timepoint (hr) Value: None
  misc_feature: MA Experiment 20001555 PARAMETER Experiment Name: At_Drought_Soil_Dry_P Parameter: Post-Treatment Value: None
  misc_feature: MA Experiment 20001555 PARAMETER Experiment Name: At_Drought_Soil_Dry_P Parameter: Timepoint (day) Value: 10
  misc_feature: MA Experiment 20001555 PARAMETER Experiment Name: At_Drought_Soil_Dry_P Parameter: Treatment Value: Drought vs. No Drought
  misc_feature: MA Experiment ID: 20001557 Result: Up-regulated in Transcription
  misc_feature: MA Experiment 20001557 PARAMETER Experiment Name: At_Drought_Soil_Dry_P Parameter: Age (day) Value: 27
  misc_feature: MA Experiment 20001557 PARAMETER Experiment Name: At_Drought_Soil_Dry_P Parameter: Organism Value: A. thaliana
  misc_feature: MA Experiment 20001557 PARAMETER Experiment Name: At_Drought_Soil_Dry_P Parameter: Plant Line Value: WS
  misc_feature: MA Experiment 20001557 PARAMETER Experiment Name: At_Drought_Soil_Dry_P Parameter: Post Timepoint (hr) Value: 3
  misc_feature: MA Experiment 20001557 PARAMETER Experiment Name: At_Drought_Soil_Dry_P Parameter: Post-Treatment Value: Re-Water vs. No Drought
  misc_feature: MA Experiment 20001557 PARAMETER Experiment Name: At_Drought_Soil_Dry_P Parameter: Timepoint (day) Value: 13
  misc_feature: MA Experiment 20001557 PARAMETER Experiment Name: At_Drought_Soil_Dry_P Parameter: Treatment Value: Drought vs. No Drought
  misc_feature: MA Experiment ID: 20001560 Result: Down-regulated in Transcription
  misc_feature: MA Experiment 20001560 PARAMETER Experiment Name: At_Drought_Soil_Dry_P Parameter: Age (day) Value: 28
  misc_feature: MA Experiment 20001560 PARAMETER Experiment Name: At_Drought_Soil_Dry_P Parameter: Organism Value: A. thaliana
  misc_feature: MA Experiment 20001560 PARAMETER Experiment Name: At_Drought_Soil_Dry_P Parameter: Plant Line Value: WS
  misc_feature: MA Experiment 20001560 PARAMETER Experiment Name: At_Drought_Soil_Dry_P Parameter: Post Timepoint (hr) Value: None
  misc_feature: MA Experiment 20001560 PARAMETER Experiment Name: At_Drought_Soil_Dry_P Parameter: Post-Treatment Value: None
  misc_feature: MA Experiment 20001560 PARAMETER Experiment Name: At_Drought_Soil_Dry_P Parameter: Timepoint (day) Value: 14
  misc_feature: MA Experiment 20001560 PARAMETER Experiment Name: At_Drought_Soil_Dry_P Parameter: Treatment Value: Drought vs. No Drought
  misc_feature: MA Experiment ID: 20001905 Result: Up-regulated in Transcription
  misc_feature: MA Experiment 20001905 PARAMETER Experiment Name: At_Drought_Reproduction_P Parameter: Age (day) Value: 40
  misc_feature: MA Experiment 20001905 PARAMETER Experiment Name: At_Drought_Reproduction_P Parameter: Organism Value: A. thaliana
  misc_feature: MA Experiment 20001905 PARAMETER Experiment Name: At_Drought_Reproduction_P Parameter: Plant Line Value: WS
  misc_feature: MA Experiment 20001905 PARAMETER Experiment Name: At_Drought_Reproduction_P Parameter: Timepoint (day) Value: 10
  misc_feature: MA Experiment 20001905 PARAMETER Experiment Name: At_Drought_Reproduction_P Parameter: Tissue Value: Rosettes
  misc_feature: MA Experiment 20001905 PARAMETER Experiment Name: At_Drought_Reproduction_P Parameter: Treatment Value: Drought vs. No Drought
atggagatgatattgatggtctctttgtgcttaacgaccctcattacccttttcttgcttaaacaattcctcaaacgaaccgccaacaaagtgaacttaccaccatctccatggaggcttccgttgattggtaacctccaccagcttagcctccaccctcaccgttccctccattccctaagccttcggtacggaccactcatgctccttcattttggccgtgtccccatactcgtagtatcctccggggaagcagctcaagaggtattgaaaacacacgatcttaagtttgccaaccgcccgagatcaaaagccgttcatgggcttatgaatggggggcgtgatgtggtgtttggtccctatggagaatattggagacagatgaagagtgtatgcattctcaatctgctcacgaacaaaatggttgcgtcctttgagaagataagagaagaagagctaaatgaaatgatcaagaagctggagaaagcaagttcttcttcttcgtcagaaaatctgagcgaactctttgttactctcccaagcgatgttacgagtagaattgccttgggaagaaaacatagtgaggacgaaaccgcaagggatctcaagaagcgagtgaggcagatcatggagcttttaggcgagttcccaatcggggactatgtcccggctttggcatggatagacaggatcaacggtttcaatgctagaataaaggaagtaagtcaagggtttagcgatcttatggacaaagtggtgcaagaacatttagaggcaggtaatcataaagaggactttgtcgatatactgttatcaatcgaaagcgagaagagtattggattccaagctcaaagagacgacatcaaattcatgatattggatatgtttataggagggacgtcaacaagttcaactctactagaatggataatgacggagctgatcagaaatccaaatgttatgaagaaactccaagacgagattcggtcaaccattaggccacatggttcatacataaaagaaaaagatgttgaaaatatgaaatacttgaaagccgtgattaaagaggtgtttcgggtgcatcctcctcttccactaatacttcccagattattaagtgaagatgtcaaagtaaagggatataacatagccgcaggaaccgaggtgataatcaatgcttgggccatccaaagagaccccgcgatatggggaccggatgcagaagaattcaaaccagaaagacatttagattcaactttggattatcatggaaaagatttaaacttcatcccattcggatcagggagaaggatttgtccagggataaatcttgctttgggtttggtagaggtgacagtggccaaccttgtaggccgatttgactggagggccgaggctggaccaaatggggatcaacctgatctaactgaagcttttggtctcgatgtttgccgaaagttccctctcattgcatttccatcttccgttatttaa

SEQ ID NO: 96730 - protein, 497 aa, Arabidopsis thaliana
  peptide (1)..(497): Ceres Seq. ID no. 12734549
  misc_feature (34)..(462): Pfam Name: Cytochrome P450 Pfam Description: Cytochrome P450
  misc_feature (1)..(497): Homolog of NCBI NO: 13878362 NR Description: Cytochrome P450 71A12 >gi|25282591|pir||C84712
  misc_feature (1)..(497): Homolog of NCBI NO: 30684709 NR Description: cytochrome p450 71A12 [Arabidopsis thaliana] At2g30750/T11J7.14 [Arabidopsis thaliana]
  misc_feature (1)..(497): Homolog of NCBI NO: 15224570 NR Description: cytochrome p450 family; protein id: At2g30770.1
  misc_feature (1)..(496): Homolog of NCBI NO: 22329490 NR Description: cytochrome P450, putative; protein id: [Arabidopsis thaliana] >gi|13878394|sp|Q9SAB6|C71I_ARATH
  misc_feature (56)..(496): Homolog of NCBI NO: 25282567 NR Description: hypothetical protein [imported] - Arabidopsis >gi|4835796|gb|AAD30262.1|AC007296_23 Strong similarity to T11J7.14 putative cytochrome P450 from Arabidopsis thaliana and
  misc_feature (1)..(62): Homolog of NCBI NO: 25282567 NR Description: hypothetical protein [imported] - Arabidopsis >gi|4835796|gb|AAD30262.1|AC007296_23 Strong similarity to T11J7.14 putative cytochrome P450 from Arabidopsis thaliana and
  misc_feature (1)..(413): Homolog of NCBI NO: 26452759 NR Description: putative cytochrome P450 [Arabidopsis thaliana]
  misc_feature (1)..(494): Homolog of NCBI NO: 15238664 NR Description: cytochrome P450-like protein; protein id: [Arabidopsis thaliana] >gi|13878366|sp|P58045|C71E_ARATH
  misc_feature (1)..(495): Homolog of NCBI NO: 15238652 NR Description: cytochrome p450 family; protein id: At5g24950.1
  misc_feature (4)..(495): Homolog of NCBI NO: 13878406 NR Description: Cytochrome P450 71A20 >gi|7430641|pir||T06288
MEMILMVSLCLTTLITLFLLKQFLKRTANKVNLPPSPWRLPLIGNLHQLSLHPHRSLHSLSLRYGPLMLLHFGRVPILVVSSGEAAQEVLKTHDLKFANRPRSKAVHGLMNGGRDVVFGPYGEYWRQMKSVCILNLLTNKMVASFEKIREEELNEMIKKLEKASSSSSSENLSELFVTLPSDVTSRIALGRKHSEDETARDLKKRVRQIMELLGEFPIGDYVPALAWIDRINGFNARIKEVSQGFSDLMDKVVQEHLEAGNHKEDFVDILLSIESEKSIGFQAQRDDIKFMILDMFIGGTSTSSTLLEWIMTELIRNPNVMKKLQDEIRSTIRPHGSYIKEKDVENMKYLKAVIKEVFRVHPPLPLILPRLLSEDVKVKGYNIAAGTEVIINAWAIQRDPAIWGPDAEEFKPERHLDSTLDYHGKDLNFIPFGSGRRICPGINLALGLVEVTVANLVGRFDWRAEAGPNGDQPDLTEAFGLDVCRKFPLIAFPSSVI

SEQ ID NO: 96731 - protein, 495 aa, Arabidopsis thaliana
  peptide (1)..(495): Ceres Seq. ID no. 12734550
  misc_feature (32)..(460): Pfam Name: Cytochrome P450 Pfam Description: Cytochrome P450
  misc_feature (1)..(495): Homolog of NCBI NO: 13878362 NR Description: Cytochrome P450 71A12 >gi|25282591|pir||C84712
  misc_feature (1)..(495): Homolog of NCBI NO: 30684709 NR Description: cytochrome p450 71A12 [Arabidopsis thaliana] At2g30750/T11J7.14 [Arabidopsis thaliana]
  misc_feature (1)..(495): Homolog of NCBI NO: 15224570 NR Description: cytochrome p450 family; protein id: At2g30770.1
  misc_feature (1)..(494): Homolog of NCBI NO: 22329490 NR Description: cytochrome P450, putative; protein id: [Arabidopsis thaliana] >gi|13878394|sp|Q9SAB6|C71I_ARATH
  misc_feature (54)..(494): Homolog of NCBI NO: 25282567 NR Description: hypothetical protein [imported] - Arabidopsis >gi|4835796|gb|AAD30262.1|AC007296_23 Strong similarity to T11J7.14 putative cytochrome P450 from Arabidopsis thaliana and
  misc_feature (1)..(60): Homolog of NCBI NO: 25282567 NR Description: hypothetical protein [imported] - Arabidopsis >gi|4835796|gb|AAD30262.1|AC007296_23 Strong similarity to T11J7.14 putative cytochrome P450 from Arabidopsis thaliana and
  misc_feature (1)..(411): Homolog of NCBI NO: 26452759 NR Description: putative cytochrome P450 [Arabidopsis thaliana]
  misc_feature (1)..(492): Homolog of NCBI NO: 15238664 NR Description: cytochrome P450-like protein; protein id: [Arabidopsis thaliana] >gi|13878366|sp|P58045|C71E_ARATH
  misc_feature (1)..(493): Homolog of NCBI NO: 15238652 NR Description: cytochrome p450 family; protein id: At5g24950.1
  misc_feature (2)..(493): Homolog of NCBI NO: 13878406 NR Description: Cytochrome P450 71A20 >gi|7430641|pir||T06288
MILMVSLCLTTLITLFLLKQFLKRTANKVNLPPSPWRLPLIGNLHQLSLHPHRSLHSLSLRYGPLMLLHFGRVPILVVSSGEAAQEVLKTHDLKFANRPRSKAVHGLMNGGRDVVFGPYGEYWRQMKSVCILNLLTNKMVASFEKIREEELNEMIKKLEKASSSSSSENLSELFVTLPSDVTSRIALGRKHSEDETARDLKKRVRQIMELLGEFPIGDYVPALAWIDRINGFNARIKEVSQGFSDLMDKVVQEHLEAGNHKEDFVDILLSIESEKSIGFQAQRDDIKFMILDMFIGGTSTSSTLLEWIMTELIRNPNVMKKLQDEIRSTIRPHGSYIKEKDVENMKYLKAVIKEVFRVHPPLPLILPRLLSEDVKVKGYNIAAGTEVIINAWAIQRDPAIWGPDAEEFKPERHLDSTLDYHGKDLNFIPFGSGRRICPGINLALGLVEVTVANLVGRFDWRAEAGPNGDQPDLTEAFGLDVCRKFPLIAFPSSVI

SEQ ID NO: 96732 - protein, 492 aa, Arabidopsis thaliana
  peptide (1)..(492): Ceres Seq. ID no. 12734551
  misc_feature (29)..(457): Pfam Name: Cytochrome P450 Pfam Description: Cytochrome P450
  misc_feature (1)..(492): Homolog of NCBI NO: 13878362 NR Description: Cytochrome P450 71A12 >gi|25282591|pir||C84712
  misc_feature (1)..(492): Homolog of NCBI NO: 30684709 NR Description: cytochrome p450 71A12 [Arabidopsis thaliana] At2g30750/T11J7.14 [Arabidopsis thaliana]
  misc_feature (1)..(492): Homolog of NCBI NO: 15224570 NR Description: cytochrome p450 family; protein id: At2g30770.1
  misc_feature (1)..(491): Homolog of NCBI NO: 22329490 NR Description: cytochrome P450, putative; protein id: [Arabidopsis thaliana] >gi|13878394|sp|Q9SAB6|C71I_ARATH
  misc_feature (51)..(491): Homolog of NCBI NO: 25282567 NR Description: hypothetical protein [imported] - Arabidopsis >gi|4835796|gb|AAD30262.1|AC007296_23 Strong similarity to T11J7.14 putative cytochrome P450 from Arabidopsis thaliana and
  misc_feature (1)..(57): Homolog of NCBI NO: 25282567 NR Description: hypothetical protein [imported] - Arabidopsis >gi|4835796|gb|AAD30262.1|AC007296_23 Strong similarity to T11J7.14 putative cytochrome P450 from Arabidopsis thaliana and
  misc_feature (1)..(408): Homolog of NCBI NO: 26452759 NR Description: putative cytochrome P450 [Arabidopsis thaliana]
  misc_feature (1)..(489): Homolog of NCBI NO: 15238664 NR Description: cytochrome P450-like protein; protein id: [Arabidopsis thaliana] >gi|13878366|sp|P58045|C71E_ARATH
  misc_feature (1)..(490): Homolog of NCBI NO: 15238652 NR Description: cytochrome p450 family; protein id: At5g24950.1
  misc_feature (1)..(490): Homolog of NCBI NO: 13878406 NR Description: Cytochrome P450 71A20 >gi|7430641|pir||T06288
MVSLCLTTLITLFLLKQFLKRTANKVNLPPSPWRLPLIGNLHQLSLHPHRSLHSLSLRYGPLMLLHFGRVPILVVSSGEAAQEVLKTHDLKFANRPRSKAVHGLMNGGRDVVFGPYGEYWRQMKSVCILNLLTNKMVASFEKIREEELNEMIKKLEKASSSSSSENLSELFVTLPSDVTSRIALGRKHSEDETARDLKKRVRQIMELLGEFPIGDYVPALAWIDRINGFNARIKEVSQGFSDLMDKVVQEHLEAGNHKEDFVDILLSIESEKSIGFQAQRDDIKFMILDMFIGGTSTSSTLLEWIMTELIRNPNVMKKLQDEIRSTIRPHGSYIKEKDVENMKYLKAVIKEVFRVHPPLPLILPRLLSEDVKVKGYNIAAGTEVIINAWAIQRDPAIWGPDAEEFKPERHLDSTLDYHGKDLNFIPFGSGRRICPGINLALGLVEVTVANLVGRFDWRAEAGPNGDQPDLTEAFGLDVCRKFPLIAFPSSVI

SEQ ID NO: 96733 - DNA, 1494 bp, Arabidopsis thaliana
  misc_feature (1)..(1494): Ceres Seq. ID no. 12734552
  misc_feature: MA Experiment ID: 20000166 Result: Up-regulated in Transcription
  misc_feature: MA Experiment 20000166 PARAMETER Experiment Name: At_100uM_ABA_P Parameter: Age (day) Value: 14
  misc_feature: MA Experiment 20000166 PARAMETER Experiment Name: At_100uM_ABA_P Parameter: Organism Value: A. thaliana
  misc_feature: MA Experiment 20000166 PARAMETER Experiment Name: At_100uM_ABA_P Parameter: Plant Line Value: WS
  misc_feature: MA Experiment 20000166 PARAMETER Experiment Name: At_100uM_ABA_P Parameter: Timepoint (hr) Value: 1
  misc_feature: MA Experiment 20000166 PARAMETER Experiment Name: At_100uM_ABA_P Parameter: Tissue Value: Aerial
  misc_feature: MA Experiment 20000166 PARAMETER Experiment Name: At_100uM_ABA_P Parameter: Treatment Value: 100uM ABA vs. No Treatment
  misc_feature: MA Experiment ID: 20000171 Result: Down-regulated in Transcription
  misc_feature: MA Experiment 20000171 PARAMETER Experiment Name: At_42deg_Heat_P Parameter: Age (day) Value: 14
  misc_feature: MA Experiment 20000171 PARAMETER Experiment Name: At_42deg_Heat_P Parameter: Organism Value: A. thaliana
  misc_feature: MA Experiment 20000171 PARAMETER Experiment Name: At_42deg_Heat_P Parameter: Plant Line Value: WS
  misc_feature: MA Experiment 20000171 PARAMETER Experiment Name: At_42deg_Heat_P Parameter: Temperature (deg C) Value: 42 vs. 22
  misc_feature: MA Experiment 20000171 PARAMETER Experiment Name: At_42deg_Heat_P Parameter: Timepoint (hr) Value: 1
  misc_feature: MA Experiment 20000171 PARAMETER Experiment Name: At_42deg_Heat_P Parameter: Tissue Value: Aerial
  misc_feature: MA Experiment ID: 20000173 Result: Down-regulated in Transcription
  misc_feature: MA Experiment 20000173 PARAMETER Experiment Name: At_42deg_Heat_P Parameter: Age (day) Value: 14
  misc_feature: MA Experiment 20000173 PARAMETER Experiment Name: At_42deg_Heat_P Parameter: Organism Value: A. thaliana
  misc_feature: MA Experiment 20000173 PARAMETER Experiment Name: At_42deg_Heat_P Parameter: Plant Line Value: WS
  misc_feature: MA Experiment 20000173 PARAMETER Experiment Name: At_42deg_Heat_P Parameter: Temperature (deg C) Value: 42 vs. 22
  misc_feature: MA Experiment 20000173 PARAMETER Experiment Name: At_42deg_Heat_P Parameter: Timepoint (hr) Value: 6
  misc_feature: MA Experiment 20000173 PARAMETER Experiment Name: At_42deg_Heat_P Parameter: Tissue Value: Aerial
  misc_feature: MA Experiment ID: 20000182 Result: Up-regulated in Transcription
  misc_feature: MA Experiment 20000182 PARAMETER Experiment Name: At_2mM_SA_P Parameter: Age (day) Value: 14
  misc_feature: MA Experiment 20000182 PARAMETER Experiment Name: At_2mM_SA_P Parameter: Organism Value: A. thaliana
  misc_feature: MA Experiment 20000182 PARAMETER Experiment Name: At_2mM_SA_P Parameter: Plant Line Value: WS
  misc_feature: MA Experiment 20000182 PARAMETER Experiment Name: At_2mM_SA_P Parameter: Timepoint (hr) Value: 6
  misc_feature: MA Experiment 20000182 PARAMETER Experiment Name: At_2mM_SA_P Parameter: Tissue Value: Aerial
  misc_feature: MA Experiment 20000182 PARAMETER Experiment Name: At_2mM_SA_P Parameter: Treatment Value: 2mM SA vs. No Treatment
  misc_feature: MA Experiment ID: 20000445 Result: Up-regulated in Transcription
  misc_feature: MA Experiment 20000445 PARAMETER Experiment Name: At_100uM_NAA__P Parameter: Age (day) Value: 14
  misc_feature: MA Experiment 20000445 PARAMETER Experiment Name: At_100uM_NAA__P Parameter: Organism Value: A. thaliana
  misc_feature: MA Experiment 20000445 PARAMETER Experiment Name: At_100uM_NAA__P Parameter: Plant Line Value: WS
  misc_feature: MA Experiment 20000445 PARAMETER Experiment Name: At_100uM_NAA__P Parameter: Timepoint (hr) Value: 6
  misc_feature: MA Experiment 20000445 PARAMETER Experiment Name: At_100uM_NAA__P Parameter: Tissue Value: Aerial
  misc_feature: MA Experiment 20000445 PARAMETER Experiment Name: At_100uM_NAA__P Parameter: Treatment Value: 100uM NAA vs. No Treatment
  misc_feature: MA Experiment ID: 20000456 Result: Up-regulated in Transcription
  misc_feature: MA Experiment 20000456 PARAMETER Experiment Name: At_100uM_BA_P Parameter: Age (day) Value: 14
  misc_feature: MA Experiment 20000456 PARAMETER Experiment Name: At_100uM_BA_P Parameter: Organism Value: A. thaliana
  misc_feature: MA Experiment 20000456 PARAMETER Experiment Name: At_100uM_BA_P Parameter: Plant Line Value: WS
  misc_feature: MA Experiment 20000456 PARAMETER Experiment Name: At_100uM_BA_P Parameter: Timepoint (hr) Value: 6
  misc_feature: MA Experiment 20000456 PARAMETER Experiment Name: At_100uM_BA_P Parameter: Tissue Value: Aerial
  misc_feature: MA Experiment 20000456 PARAMETER Experiment Name: At_100uM_BA_P Parameter: Treatment Value: 100uM BA vs. No Treatment
  misc_feature: MA Experiment ID: 20000527 Result: Down-regulated in Transcription
  misc_feature: MA Experiment 20000527 PARAMETER Experiment Name: At_10percent_PEG_P Parameter: Age (day) Value: 20
  misc_feature: MA Experiment 20000527 PARAMETER Experiment Name: At_10percent_PEG_P Parameter: Organism Value: A. thaliana
  misc_feature: MA Experiment 20000527 PARAMETER Experiment Name: At_10percent_PEG_P Parameter: Plant Line Value: WS
  misc_feature: MA Experiment 20000527 PARAMETER Experiment Name: At_10percent_PEG_P Parameter: Timepoint (day) Value: 20
  misc_feature: MA Experiment 20000527 PARAMETER Experiment Name: At_10percent_PEG_P Parameter: Tissue Value: Whole Plant
  misc_feature: MA Experiment 20000527 PARAMETER Experiment Name: At_10percent_PEG_P Parameter: Treatment Value: 10percent PEG vs. No Treatment
  misc_feature: MA Experiment ID: 20000573 Result: Up-regulated in Transcription
  misc_feature: MA Experiment 20000573 PARAMETER Experiment Name: At_100uM_ABA_Mutants__P Parameter: Organism Value: A. thaliana
  misc_feature: MA Experiment 20000573 PARAMETER Experiment Name: At_100uM_ABA_Mutants__P Parameter: Plant Line Value: CS22 vs. Ler wt
  misc_feature: MA Experiment 20000573 PARAMETER Experiment Name: At_100uM_ABA_Mutants__P Parameter: Timepoint (hr) Value: N/A
  misc_feature: MA Experiment 20000573 PARAMETER Experiment Name: At_100uM_ABA_Mutants__P Parameter: Tissue Value: Whole Plant
  misc_feature: MA Experiment 20000573 PARAMETER Experiment Name: At_100uM_ABA_Mutants__P Parameter: Treatment Value: None
  misc_feature: MA Experiment ID: 20000574 Result: Up-regulated in Transcription
  misc_feature: MA Experiment 20000574 PARAMETER Experiment Name: At_100uM_ABA_Mutants__P Parameter: Organism Value: A. thaliana
  misc_feature: MA Experiment 20000574 PARAMETER Experiment Name: At_100uM_ABA_Mutants__P Parameter: Plant Line Value: CS23 vs. Ler wt
  misc_feature: MA Experiment 20000574 PARAMETER Experiment Name: At_100uM_ABA_Mutants__P Parameter: Timepoint (hr) Value: N/A
  misc_feature: MA Experiment 20000574 PARAMETER Experiment Name: At_100uM_ABA_Mutants__P Parameter: Tissue Value: Whole Plant
  misc_feature: MA Experiment 20000574 PARAMETER Experiment Name: At_100uM_ABA_Mutants__P Parameter: Treatment Value: None
  misc_feature: MA Experiment ID: 20000709 Result: Down-regulated in Transcription
  misc_feature: MA Experiment 20000709 PARAMETER Experiment Name: At_15mM_NH4NO3_L-to-H_P Parameter: Age (hr) Value: 14
  misc_feature: MA Experiment 20000709 PARAMETER Experiment Name: At_15mM_NH4NO3_L-to-H_P Parameter: Organism Value: A. thaliana
  misc_feature: MA Experiment 20000709 PARAMETER Experiment Name: At_15mM_NH4NO3_L-to-H_P Parameter: Plant Line Value: WS
  misc_feature: MA Experiment 20000709 PARAMETER Experiment Name: At_15mM_NH4NO3_L-to-H_P Parameter: Timepoint (hr) Value: 4
  misc_feature: MA Experiment 20000709 PARAMETER Experiment Name: At_15mM_NH4NO3_L-to-H_P Parameter: Tissue Value: Aerial
  misc_feature: MA Experiment 20000709 PARAMETER Experiment Name: At_15mM_NH4NO3_L-to-H_P Parameter: Treatment Value: 15mM NH4NO3 vs. 30mM Mannitol
  misc_feature: MA Experiment ID: 20001556 Result: Down-regulated in Transcription
  misc_feature: MA Experiment 20001556 PARAMETER Experiment Name: At_Drought_Soil_Dry_P Parameter: Age (day) Value: 26
  misc_feature: MA Experiment 20001556 PARAMETER Experiment Name: At_Drought_Soil_Dry_P Parameter: Organism Value: A. thaliana
  misc_feature: MA Experiment 20001556 PARAMETER Experiment Name: At_Drought_Soil_Dry_P Parameter: Plant Line Value: WS
  misc_feature: MA Experiment 20001556 PARAMETER Experiment Name: At_Drought_Soil_Dry_P Parameter: Post Timepoint (hr) Value: None
  misc_feature: MA Experiment 20001556 PARAMETER Experiment Name: At_Drought_Soil_Dry_P Parameter: Post-Treatment Value: None
  misc_feature: MA Experiment 20001556 PARAMETER Experiment Name: At_Drought_Soil_Dry_P Parameter: Timepoint (day) Value: 12
  misc_feature: MA Experiment 20001556 PARAMETER Experiment Name: At_Drought_Soil_Dry_P Parameter: Treatment Value: Drought vs. No Drought
  misc_feature: MA Experiment ID: 20001558 Result: Down-regulated in Transcription
  misc_feature: MA Experiment 20001558 PARAMETER Experiment Name: At_Drought_Soil_Dry_P Parameter: Age (day) Value: 27
  misc_feature: MA Experiment 20001558 PARAMETER Experiment Name: At_Drought_Soil_Dry_P Parameter: Organism Value: A. thaliana
  misc_feature: MA Experiment 20001558 PARAMETER Experiment Name: At_Drought_Soil_Dry_P Parameter: Plant Line Value: WS
  misc_feature: MA Experiment 20001558 PARAMETER Experiment Name: At_Drought_Soil_Dry_P Parameter: Post Timepoint (hr) Value: 6
  misc_feature: MA Experiment 20001558 PARAMETER Experiment Name: At_Drought_Soil_Dry_P Parameter: Post-Treatment Value: Re-Water vs. No Drought
  misc_feature: MA Experiment 20001558 PARAMETER Experiment Name: At_Drought_Soil_Dry_P Parameter: Timepoint (day) Value: 13
  misc_feature: MA Experiment 20001558 PARAMETER Experiment Name: At_Drought_Soil_Dry_P Parameter: Treatment Value: Drought vs. No Drought
  misc_feature: MA Experiment ID: 20001560 Result: Down-regulated in Transcription
  misc_feature: MA Experiment 20001560 PARAMETER Experiment Name: At_Drought_Soil_Dry_P Parameter: Age (day) Value: 28
  misc_feature: MA Experiment 20001560 PARAMETER Experiment Name: At_Drought_Soil_Dry_P Parameter: Organism Value: A. thaliana
  misc_feature: MA Experiment 20001560 PARAMETER Experiment Name: At_Drought_Soil_Dry_P Parameter: Plant Line Value: WS
  misc_feature: MA Experiment 20001560 PARAMETER Experiment Name: At_Drought_Soil_Dry_P Parameter: Post Timepoint (hr) Value: None
  misc_feature: MA Experiment 20001560 PARAMETER Experiment Name: At_Drought_Soil_Dry_P Parameter: Post-Treatment Value: None
  misc_feature: MA Experiment 20001560 PARAMETER Experiment Name: At_Drought_Soil_Dry_P Parameter: Timepoint (day) Value: 14
  misc_feature: MA Experiment 20001560 PARAMETER Experiment Name: At_Drought_Soil_Dry_P Parameter: Treatment Value: Drought vs. No Drought
  misc_feature: MA Experiment ID: 20001904 Result: Down-regulated in Transcription
  misc_feature: MA Experiment 20001904 PARAMETER Experiment Name: At_Drought_Reproduction_P Parameter: Age (day) Value: 37
  misc_feature: MA Experiment 20001904 PARAMETER Experiment Name: At_Drought_Reproduction_P Parameter: Organism Value: A. thaliana
  misc_feature: MA Experiment 20001904 PARAMETER Experiment Name: At_Drought_Reproduction_P Parameter: Plant Line Value: WS
  misc_feature: MA Experiment 20001904 PARAMETER Experiment Name: At_Drought_Reproduction_P Parameter: Timepoint (day) Value: 7
  misc_feature: MA Experiment 20001904 PARAMETER Experiment Name: At_Drought_Reproduction_P Parameter: Tissue Value: Rosettes
  misc_feature: MA Experiment 20001904 PARAMETER Experiment Name: At_Drought_Reproduction_P Parameter: Treatment Value: Drought vs. No Drought
atggaaatgatattgagtatctctttgtgcttaacgaccctcataacccttctcttgctgaggcgattcctcaaacgaaccgccactaaagtgaacctaccaccatctccatggaggcttccggtgatcggaaacctccaccagctgagcctccatcctcaccgttccctccggtccctcagtctcaggtacggaccactcatgctccttcattttggccgtgtccctatactcgtagtctcctccggtgaagcagctcaagaggtattgaaaacacatgatcataaatttgcgaaccgcccgagatcaaaagccgttcatgggcttatgaatggtggacgtgatgttgtgtttgctccctatggagaatactggagacagatgaagagtgtatgcattctcaatctgctcaccaacaaaatggttgaatcctttgagaaggtaagagaagacgaggtaaatgcaatgatcgagaagctggagaaagcaagttcttcttcttcatcagaaaatctgagcgaactctttataactctaccaagcgatgttacgagtagagttgcgttgggaagaaaacatagcgaggacgagaccgcaagggatctcaagaagcgagtgaggcagatcatggagcttttaggcgagttcccgatcggggaatatgtccccatattggcatggatagatgggatccgtggtttcaataataaaattaaggaagtgagtcgagggtttagcgatcttatggacaaagtggtgcaagaacatttagaggcgagtaacgataaagcggatttcgtggatatattgttatcaatcgaaaaagataagaacagtggattccaagttcaaagaaacgacataaaatttatgatcttggatatgtttatcggaggaacgtcaacaacttcgactctactagaatggacgatgacggaactgatcagaagtccaaagagtatgaagaaactccaagacgagattcggtcaactattaggccacatggttcatacataaaagaaaaagaagtggaaaatatgaaatacttaaaagccgtgattaaagaggtgcttcggttgcatccttctcttccaatgatacttcccagactcttaagtgaagatgtcaaagtaaagggatataacatagccgcagggacagaggtgataatcaatgcttgggcgatccaacgagacactgcgatatggggaccggatgctgaagaattcaaaccggagagacacttagattcaggtttagattatcacggaaaaaatctgaactacatcccattcggatcagggagaaggatatgccccgggataaatcttgctttgggtctggcagaggtgacagtggccaaccttgtaggccgatttgactggagggtagaggctggaccaaatggggatcaacctgatctaactgaagccattggtatcgatgtttgccgcaaattccctctcattgcatttccatcttcggttgtgtaa

SEQ ID NO: 96734 - protein, 497 aa, Arabidopsis thaliana
  peptide (1)..(497): Ceres Seq. ID no. 12734553
  misc_feature (1)..(497): Homolog of NCBI NO: 15224570 NR Description: cytochrome p450 family; protein id: At2g30770.1
  misc_feature (1)..(497): Homolog of NCBI NO: 13878362 NR Description: Cytochrome P450 71A12 >gi|25282591|pir||C84712
  misc_feature (1)..(497): Homolog of NCBI NO: 30684709 NR Description: cytochrome p450 71A12 [Arabidopsis thaliana] At2g30750/T11J7.14 [Arabidopsis thaliana]
  misc_feature (1)..(496): Homolog of NCBI NO: 22329490 NR Description: cytochrome P450, putative; protein id: [Arabidopsis thaliana] >gi|13878394|sp|Q9SAB6|C71I_ARATH
  misc_feature (80)..(496): Homolog of NCBI NO: 25282567 NR Description: hypothetical protein [imported] - Arabidopsis >gi|4835796|gb|AAD30262.1|AC007296_23 Strong similarity to T11J7.14 putative cytochrome P450 from Arabidopsis thaliana and
  misc_feature (1)..(62): Homolog of NCBI NO: 25282567 NR Description: hypothetical protein [imported] - Arabidopsis >gi|4835796|gb|AAD30262.1|AC007296_23 Strong similarity to T11J7.14 putative cytochrome P450 from Arabidopsis thaliana and
  misc_feature (1)..(413): Homolog of NCBI NO: 26452759 NR Description: putative cytochrome P450 [Arabidopsis thaliana]
  misc_feature (1)..(494): Homolog of NCBI NO: 15238664 NR Description: cytochrome P450-like protein; protein id: [Arabidopsis thaliana] >gi|13878366|sp|P58045|C71E_ARATH
  misc_feature (1)..(495): Homolog of NCBI NO: 15238652 NR Description: cytochrome p450 family; protein id: At5g24950.1
  misc_feature (1)..(495): Homolog of NCBI NO: 15239008 NR Description: cytochrome p450, putative; protein id: [Arabidopsis thaliana] >gi|13878374|sp|Q9FH66|C71G_ARATH P450 71A16 >gi|9759017|dbj|BAB09330.1| cytochrome P450
MEMILSISLCLTTLITLLLLRRFLKRTATKVNLPPSPWRLPVIGNLHQLSLHPHRSLRSLSLRYGPLMLLHFGRVPILVVSSGEAAQEVLKTHDHKFANRPRSKAVHGLMNGGRDVVFAPYGEYWRQMKSVCILNLLTNKMVESFEKVREDEVNAMIEKLEKASSSSSSENLSELFITLPSDVTSRVALGRKHSEDETARDLKKRVRQIMELLGEFPIGEYVPILAWIDGIRGFNNKIKEVSRGFSDLMDKVVQEHLEASNDKADFVDILLSIEKDKNSGFQVQRNDIKFMILDMFIGGTSTTSTLLEWTMTELIRSPKSMKKLQDEIRSTIRPHGSYIKEKEVENMKYLKAVIKEVLRLHPSLPMILPRLLSEDVKVKGYNIAAGTEVIINAWAIQRDTAIWGPDAEEFKPERHLDSGLDYHGKNLNYIPFGSGRRICPGINLALGLAEVTVANLVGRFDWRVEAGPNGDQPDLTEAIGIDVCRKFPLIAFPSSVV

SEQ ID NO: 96735 - protein, 495 aa, Arabidopsis thaliana
  peptide (1)..(495): Ceres Seq. ID no. 12734554
  misc_feature (1)..(495): Homolog of NCBI NO: 15224570 NR Description: cytochrome p450 family; protein id: At2g30770.1
  misc_feature (1)..(495): Homolog of NCBI NO: 13878362 NR Description: Cytochrome P450 71A12 >gi|25282591|pir||C84712
  misc_feature (1)..(495): Homolog of NCBI NO: 30684709 NR Description: cytochrome p450 71A12 [Arabidopsis thaliana] At2g30750/T11J7.14 [Arabidopsis thaliana]
  misc_feature (1)..(494): Homolog of NCBI NO: 22329490 NR Description: cytochrome P450, putative; protein id: [Arabidopsis thaliana] >gi|13878394|sp|Q9SAB6|C71I_ARATH
  misc_feature (78)..(494): Homolog of NCBI NO: 25282567 NR Description: hypothetical protein [imported] - Arabidopsis >gi|4835796|gb|AAD30262.1|AC007296_23 Strong similarity to T11J7.14 putative cytochrome P450 from Arabidopsis thaliana and
  misc_feature (1)..(60): Homolog of NCBI NO: 25282567 NR Description: hypothetical protein [imported] - Arabidopsis >gi|4835796|gb|AAD30262.1|AC007296_23 Strong similarity to T11J7.14 putative cytochrome P450 from Arabidopsis thaliana and
  misc_feature (1)..(411): Homolog of NCBI NO: 26452759 NR Description: putative cytochrome P450 [Arabidopsis thaliana]
  misc_feature (1)..(492): Homolog of NCBI NO: 15238664 NR Description: cytochrome P450-like protein; protein id: [Arabidopsis thaliana] >gi|13878366|sp|P58045|C71E_ARATH
  misc_feature (1)..(493): Homolog of NCBI NO: 15238652 NR Description: cytochrome p450 family; protein id: At5g24950.1
  misc_feature (1)..(493): Homolog of NCBI NO: 15239008 NR Description: cytochrome p450, putative; protein id: [Arabidopsis thaliana] >gi|13878374|sp|Q9FH66|C71G_ARATH P450 71A16 >gi|9759017|dbj|BAB09330.1| cytochrome P450
MILSISLCLTTLITLLLLRRFLKRTATKVNLPPSPWRLPVIGNLHQLSLHPHRSLRSLSLRYGPLMLLHFGRVPILVVSSGEAAQEVLKTHDHKFANRPRSKAVHGLMNGGRDVVFAPYGEYWRQMKSVCILNLLTNKMVESFEKVREDEVNAMIEKLEKASSSSSSENLSELFITLPSDVTSRVALGRKHSEDETARDLKKRVRQIMELLGEFPIGEYVPILAWIDGIRGFNNKIKEVSRGFSDLMDKVVQEHLEASNDKADFVDILLSIEKDKNSGFQVQRNDIKFMILDMFIGGTSTTSTLLEWTMTELIRSPKSMKKLQDEIRSTIRPHGSYIKEKEVENMKYLKAVIKEVLRLHPSLPMILPRLLSEDVKVKGYNIAAGTEVIINAWAIQRDTAIWGPDAEEFKPERHLDSGLDYHGKNLNYIPFGSGRRICPGINLALGLAEVTVANLVGRFDWRVEAGPNGDQPDLTEAIGIDVCRKFPLIAFPSSVV

SEQ ID NO: 96736 - protein, 430 aa, Arabidopsis thaliana
  peptide (1)..(430): Ceres Seq. ID no. 12734555
  misc_feature (1)..(430): Homolog of NCBI NO: 15224570 NR Description: cytochrome p450 family; protein id: At2g30770.1
  misc_feature (1)..(430): Homolog of NCBI NO: 13878362 NR Description: Cytochrome P450 71A12 >gi|25282591|pir||C84712
  misc_feature (1)..(430): Homolog of NCBI NO: 30684709 NR Description: cytochrome p450 71A12 [Arabidopsis thaliana] At2g30750/T11J7.14 [Arabidopsis thaliana]
  misc_feature (1)..(429): Homolog of NCBI NO: 22329490 NR Description: cytochrome P450, putative; protein id: [Arabidopsis thaliana] >gi|13878394|sp|Q9SAB6|C71I_ARATH
  misc_feature (13)..(429): Homolog of NCBI NO: 25282567 NR Description: hypothetical protein [imported] - Arabidopsis >gi|4835796|gb|AAD30262.1|AC007296_23 Strong similarity to T11J7.14 putative cytochrome P450 from Arabidopsis thaliana and
  misc_feature (1)..(346): Homolog of NCBI NO: 26452759 NR Description: putative cytochrome P450 [Arabidopsis thaliana]
  misc_feature (1)..(427): Homolog of NCBI NO: 15238664 NR Description: cytochrome P450-like protein; protein id: [Arabidopsis thaliana] >gi|13878366|sp|P58045|C71E_ARATH
  misc_feature (1)..(428): Homolog of NCBI NO: 15238652 NR Description: cytochrome p450 family; protein id: At5g24950.1
  misc_feature (1)..(428): Homolog of NCBI NO: 15239008 NR Description: cytochrome p450, putative; protein id: [Arabidopsis thaliana] >gi|13878374|sp|Q9FH66|C71G_ARATH P450 71A16 >gi|9759017|dbj|BAB09330.1| cytochrome P450
  misc_feature (1)..(428): Homolog of NCBI NO: 13878406 NR Description: Cytochrome P450 71A20 >gi|7430641|pir||T06288
MLLHFGRVPILVVSSGEAAQEVLKTHDHKFANRPRSKAVHGLMNGGRDVVFAPYGEYWRQMKSVCILNLLTNKMVESFEKVREDEVNAMIEKLEKASSSSSSENLSELFITLPSDVTSRVALGRKHSEDETARDLKKRVRQIMELLGEFPIGEYVPILAWIDGIRGFNNKIKEVSRGFSDLMDKVVQEHLEASNDKADFVDILLSIEKDKNSGFQVQRNDIKFMILDMFIGGTSTTSTLLEWTMTELIRSPKSMKKLQDEIRSTIRPHGSYIKEKEVENMKYLKAVIKEVLRLHPSLPMILPRLLSEDVKVKGYNIAAGTEVIINAWAIQRDTAIWGPDAEEFKPERHLDSGLDYHGKNLNYIPFGSGRRICPGINLALGLAEVTVANLVGRFDWRVEAGPNGDQPDLTEAIGIDVCRKFPLIAFPSSVV

SEQ ID NO: 96737 - DNA, 2758 bp, Arabidopsis thaliana
  misc_feature (1)..(2758): Ceres Seq. ID no. 12734565
  misc_feature: MA Experiment ID: 20000166 Result: Up-regulated in Transcription
  misc_feature: MA Experiment 20000166 PARAMETER Experiment Name: At_100uM_ABA_P Parameter: Age (day) Value: 14
  misc_feature: MA Experiment 20000166 PARAMETER Experiment Name: At_100uM_ABA_P Parameter: Organism Value: A. thaliana
  misc_feature: MA Experiment 20000166 PARAMETER Experiment Name: At_100uM_ABA_P Parameter: Plant Line Value: WS
  misc_feature: MA Experiment 20000166 PARAMETER Experiment Name: At_100uM_ABA_P Parameter: Timepoint (hr) Value: 1
  misc_feature: MA Experiment 20000166 PARAMETER Experiment Name: At_100uM_ABA_P Parameter: Tissue Value: Aerial
  misc_feature: MA Experiment 20000166 PARAMETER Experiment Name: At_100uM_ABA_P Parameter: Treatment Value: 100uM ABA vs. No Treatment
  misc_feature: MA Experiment ID: 20000171 Result: Down-regulated in Transcription
  misc_feature: MA Experiment 20000171 PARAMETER Experiment Name: At_42deg_Heat_P Parameter: Age (day) Value: 14
  misc_feature: MA Experiment 20000171 PARAMETER Experiment Name: At_42deg_Heat_P Parameter: Organism Value: A. thaliana
  misc_feature: MA Experiment 20000171 PARAMETER Experiment Name: At_42deg_Heat_P Parameter: Plant Line Value: WS
  misc_feature: MA Experiment 20000171 PARAMETER Experiment Name: At_42deg_Heat_P Parameter: Temperature (deg C) Value: 42 vs. 22
  misc_feature: MA Experiment 20000171 PARAMETER Experiment Name: At_42deg_Heat_P Parameter: Timepoint (hr) Value: 1
  misc_feature: MA Experiment 20000171 PARAMETER Experiment Name: At_42deg_Heat_P Parameter: Tissue Value: Aerial
  misc_feature: MA Experiment ID: 20000173 Result: Down-regulated in Transcription
  misc_feature: MA Experiment 20000173 PARAMETER Experiment Name: At_42deg_Heat_P Parameter: Age (day) Value: 14
  misc_feature: MA Experiment 20000173 PARAMETER Experiment Name: At_42deg_Heat_P Parameter: Organism Value: A. thaliana
  misc_feature: MA Experiment 20000173 PARAMETER Experiment Name: At_42deg_Heat_P Parameter: Plant Line Value: WS
  misc_feature: MA Experiment 20000173 PARAMETER Experiment Name: At_42deg_Heat_P Parameter: Temperature (deg C) Value: 42 vs. 22
  misc_feature: MA Experiment 20000173 PARAMETER Experiment Name: At_42deg_Heat_P Parameter: Timepoint (hr) Value: 6
  misc_feature: MA Experiment 20000173 PARAMETER Experiment Name: At_42deg_Heat_P Parameter: Tissue Value: Aerial
  misc_feature: MA Experiment ID: 20000179 Result: Up-regulated in Transcription
  misc_feature: MA Experiment 20000179 PARAMETER Experiment Name: At_Germinating_Seeds_P Parameter: Age (hr) Value: 6 vs. 0
  misc_feature: MA Experiment 20000179 PARAMETER Experiment Name: At_Germinating_Seeds_P Parameter: Tissue Value: Germinating Seeds
  misc_feature: MA Experiment ID: 20000180 Result: Up-regulated in Transcription
  misc_feature: MA Experiment 20000180 PARAMETER Experiment Name: At_Germinating_Seeds_P Parameter: Age (hr) Value: 24 vs. 0
  misc_feature: MA Experiment 20000180 PARAMETER Experiment Name: At_Germinating_Seeds_P Parameter: Tissue Value: Germinating Seeds
  misc_feature: MA Experiment ID: 20000185 Result: Up-regulated in Transcription
  misc_feature: MA Experiment 20000185 PARAMETER Experiment Name: At_Roots__P Parameter: Age (day) Value: 7 vs. 21
  misc_feature: MA Experiment 20000185 PARAMETER Experiment Name: At_Roots__P Parameter: Organism Value: A. thaliana
  misc_feature: MA Experiment 20000185 PARAMETER Experiment Name: At_Roots__P Parameter: Tissue Value: Roots vs. Whole Plant
  misc_feature: MA Experiment ID: 20000214 Result: Down-regulated in Transcription
  misc_feature: MA Experiment 20000214 PARAMETER Experiment Name: At_4deg_Cold_P Parameter: Timepoint (hr) Value: 6
  misc_feature: MA Experiment ID: 20000234 Result: Up-regulated in Transcription
  misc_feature: MA Experiment 20000234 PARAMETER Experiment Name: At_Siliques_P Parameter: Age (day) Value: 21
  misc_feature: MA Experiment 20000234 PARAMETER Experiment Name: At_Siliques_P Parameter: Organism Value: A. thaliana
  misc_feature: MA Experiment 20000234 PARAMETER Experiment Name: At_Siliques_P Parameter: Plant Line Value: WS
  misc_feature: MA Experiment 20000234 PARAMETER Experiment Name: At_Siliques_P Parameter: Tissue Value: Less Than 5mm Siliques vs. Whole Plant
  misc_feature: MA Experiment ID: 20000264 Result: Up-regulated in Transcription
  misc_feature: MA Experiment 20000264 PARAMETER Experiment Name: At_Open_Flower_P Parameter: Age (day) Value: 21
  misc_feature: MA Experiment 20000264 PARAMETER Experiment Name: At_Open_Flower_P Parameter: Plant Line Value: WS
  misc_feature: MA Experiment 20000264 PARAMETER Experiment Name: At_Open_Flower_P Parameter: Tissue Value: Open Flower vs. Whole Plant
  misc_feature: MA Experiment ID: 20000265 Result: Up-regulated in Transcription
  misc_feature: MA Experiment 20000265 PARAMETER Experiment Name: At_Open_Flower_P Parameter: Age (day) Value: 21
  misc_feature: MA Experiment 20000265 PARAMETER Experiment Name: At_Open_Flower_P Parameter: Plant Line Value: WS
  misc_feature: MA Experiment 20000265 PARAMETER Experiment Name: At_Open_Flower_P Parameter: Tissue Value: Closed Flower vs. Whole Plant
  misc_feature: MA Experiment ID: 20000286 Result: Up-regulated in Transcription
  misc_feature: MA Experiment 20000286 PARAMETER Experiment Name: At_Open_Flower_P Parameter: Age (day) Value: 21
  misc_feature: MA Experiment 20000286 PARAMETER Experiment Name: At_Open_Flower_P Parameter: Plant Line Value: WS
  misc_feature: MA Experiment 20000286 PARAMETER Experiment Name: At_Open_Flower_P Parameter: Tissue Value: Half Open vs. Whole Plant
  misc_feature: MA Experiment ID: 20000438 Result: Up-regulated in Transcription
  misc_feature: MA Experiment 20000438 PARAMETER Experiment Name: At_Shoots__P Parameter: Age (day) Value: 14
  misc_feature: MA Experiment 20000438 PARAMETER Experiment Name: At_Shoots__P Parameter: Tissue Value: Shoots vs. Whole Plant
  misc_feature: MA Experiment ID: 20000439 Result: Up-regulated in Transcription
  misc_feature: MA Experiment 20000439 PARAMETER Experiment Name: At_Roots__P Parameter: Age (day) Value: 14 vs. 21
  misc_feature: MA Experiment 20000439 PARAMETER Experiment Name: At_Roots__P Parameter: Organism Value: A. thaliana
  misc_feature: MA Experiment 20000439 PARAMETER Experiment Name: At_Roots__P Parameter: Tissue Value: Roots vs. Whole Plant
  misc_feature: MA Experiment ID: 20000453 Result: Up-regulated in Transcription
  misc_feature: MA Experiment 20000453 PARAMETER Experiment Name: At_100uM_ABA_P Parameter: Age (day) Value: 15
  misc_feature: MA Experiment 20000453 PARAMETER Experiment Name: At_100uM_ABA_P Parameter: Organism Value: A. thaliana
  misc_feature: MA Experiment 20000453 PARAMETER Experiment Name: At_100uM_ABA_P Parameter: Plant Line Value: WS
  misc_feature: MA Experiment 20000453 PARAMETER Experiment Name: At_100uM_ABA_P Parameter: Timepoint (hr) Value: 24
  misc_feature: MA Experiment 20000453 PARAMETER Experiment Name: At_100uM_ABA_P Parameter: Tissue Value: Aerial
  misc_feature: MA Experiment 20000453 PARAMETER Experiment Name: At_100uM_ABA_P Parameter: Treatment Value: 100uM ABA vs. No Treatment
  misc_feature: MA Experiment ID: 20000794 Result: Up-regulated in Transcription
  misc_feature: MA Experiment 20000794 PARAMETER Experiment Name: At_Petals_P Parameter: Age (day) Value: 23-25 days
  misc_feature: MA Experiment 20000794 PARAMETER Experiment Name: At_Petals_P Parameter: Plant Line Value: WS
  misc_feature: MA Experiment 20000794 PARAMETER Experiment Name: At_Petals_P Parameter: Tissue Value: Petals vs. Whole plant
  misc_feature: MA Experiment ID: 20001248 Result: Down-regulated in Transcription
  misc_feature: MA Experiment 20001248 PARAMETER Experiment Name: At_Far-red-induction_P Parameter: Age (day) Value: 7
  misc_feature: MA Experiment 20001248 PARAMETER Experiment Name: At_Far-red-induction_P Parameter: Light Value: Far-red vs. White
  misc_feature: MA Experiment 20001248 PARAMETER Experiment Name: At_Far-red-induction_P Parameter: Organism Value: A. thaliana
  misc_feature: MA Experiment 20001248 PARAMETER Experiment Name: At_Far-red-induction_P Parameter: Plant Line Value: Columbia
  misc_feature: MA Experiment 20001248 PARAMETER Experiment Name: At_Far-red-induction_P Parameter: Timepoint (hr) Value: 4
  misc_feature: MA Experiment 20001248 PARAMETER Experiment Name: At_Far-red-induction_P Parameter: Tissue Value: Whole Plant
  misc_feature: MA Experiment ID: 20001450 Result: Down-regulated in Transcription
  misc_feature: MA Experiment 20001450 PARAMETER Experiment Name: At_Far-red-induction_P Parameter: Age (day) Value: 7
  misc_feature: MA Experiment 20001450 PARAMETER Experiment Name: At_Far-red-induction_P Parameter: Light Value: Far-red vs. White
  misc_feature: MA Experiment 20001450 PARAMETER Experiment Name: At_Far-red-induction_P Parameter: Organism Value: A. thaliana
  misc_feature: MA Experiment 20001450 PARAMETER Experiment Name: At_Far-red-induction_P Parameter: Plant Line Value: Columbia
  misc_feature: MA Experiment 20001450 PARAMETER Experiment Name: At_Far-red-induction_P Parameter: Timepoint (hr) Value: 8
  misc_feature: MA Experiment 20001450 PARAMETER Experiment Name: At_Far-red-induction_P Parameter: Tissue Value: Whole Plant
  misc_feature: MA Experiment ID: 20001555 Result: Up-regulated in Transcription
  misc_feature: MA Experiment 20001555 PARAMETER Experiment Name: At_Drought_Soil_Dry_P Parameter: Age (day) Value: 24
  misc_feature: MA Experiment 20001555 PARAMETER Experiment Name: At_Drought_Soil_Dry_P Parameter: Organism Value: A. thaliana
  misc_feature: MA Experiment 20001555 PARAMETER Experiment Name: At_Drought_Soil_Dry_P Parameter: Plant Line Value: WS
  misc_feature: MA Experiment 20001555 PARAMETER Experiment Name: At_Drought_Soil_Dry_P Parameter: Post Timepoint (hr) Value: None
  misc_feature: MA Experiment 20001555 PARAMETER Experiment Name: At_Drought_Soil_Dry_P Parameter: Post-Treatment Value: None
  misc_feature: MA Experiment 20001555 PARAMETER Experiment Name: At_Drought_Soil_Dry_P Parameter: Timepoint (day) Value: 10
  misc_feature: MA Experiment 20001555 PARAMETER Experiment Name: At_Drought_Soil_Dry_P Parameter: Treatment Value: Drought vs. No Drought
catatcgatctctcaatcagattagattatggaaattgcagcgaaaatggttaaagtaaggaagatggagatgattttattactaattcttgtgattgtggtggcggcgacggcggcgaatgtgacttatgaccaccgtgcattagtaatcgacgggaaacggaaagttctaatctctggttctattcattatcctcggagtactcctgagatgtggccagagcttatacagaaatctaaagacggtggtttagatgttatagagacgtatgtgttttggagtggtcacgaaccggagaaaaataagtataattttgaaggaagatatgatttagtgaaatttgtgaagcttgcggctaaagctggtctctatgttcatttaagaattggtccttacgtctgtgctgaatggaattacggtggtttcccagtgtggttgcattttgttccaggaattaagtttcgaactgataatgagccatttaaggaagaaatgcagagatttaccacaaagattgttgatttgatgaagcaagaaaagctttatgcatcacaaggaggtccaatcattctctcgcagattgagaatgaatatggaaatattgactcagcttatggtgcggctgctaaaagttatatcaagtggtctgcttctatggctctttcgttagatactggagtaccatggaatatgtgtcaacaaacagatgctcctgatcccatgatcaacacatgcaatggtttctactgtgaccagtttacacctaactcaaataataaaccaaagatgtggaccgagaactggagtggatggttccttggttttggagatccttctccttacagaccagttgaagatcttgcatttgcggtcgcgcggttttaccaacgaggtggaacgttccagaactattacatgtatcacggtggaacaaactttgatagaacaagtggaggaccattaatctctactagttatgattatgatgctccaattgatgagtatggactacttagacaaccaaaatggggacacttacgagatctacacaaggctatcaagctttgtgaagatgcattgattgccacagatccaacaattacttctctaggttcaaatttggaggctgctgtatataaaacagaatctggatcatgtgctgcttttcttgcaaatgttgacacgaagtctgatgcaactgtgactttcaatggaaaatcatataacttgcctgcatggtccgtaagcatcttgccggattgcaaaaatgtagctttcaataccgcaaagataaattctgcaactgagtctaccgcatttgctcgtcaatcattaaagcccgatggtggttcgtctgcggagttaggttcacaatggagttacattaaagaacctattggaatttccaaagctgatgcattcttgaaacctggattgctagagcagattaacacaacagctgataaaagcgattacttgtggtactcactaaggacggatataaaaggcgatgagactttccttgacgagggatctaaagccgtccttcacattgaatctcttggtcaagtggtctatgcttttataaatggaaaacttgcaggaagcggacatggcaaacagaagatttctttggatataccgattaatcttgtaaccgggacgaacacaatcgatctccttagtgttaccgtagggcttgcgaattatggagctttctttgacttagtgggagcaggaataaccggacctgtgacacttaaaagcgctaaaggtggtagctcaattgatttggcttcacagcaatggacttatcaggttggactcaaaggagaagacacaggtttggcaactgtagattcttctgaatgggtttcaaagtctcctttgcctactaaacaaccacttatttggtacaagacgacatttgatgctccttctgggagcgagccagtagctatagacttcacgggtacaggaaagggtattgcatgggtgaatggacagagcataggtaggtactggccaactagtatcgctggaaatggcggttgtacagaatcatgcgactatagaggttcttaccgtgcaaacaaatgcctcaagaactgtggaaaaccttcacagacattgtatcatgtacctcgctcgtggctaaaaccgagcgggaacatacttgttctgtttgaggagatgggaggagatccaacacaaatatcatttgcgacaaaacaaacaggaagcaatctttgtctaacggtgtcacagtctcatccaccaccggtggacacatggacttccgactcaaagatctcaaacagaaacagaaccaggccggttctttcgttgaaatgccctatctctactcaggtgatattttctataaaatttgcaagctttggtacacccaaaggtacttgcggtagcttcacacaaggccattgcaatagctctcgatctctctccctcgtccaaaaggcatgtattggattgaggagttgcaacgttgaagtatcgactagagtgttcggggaaccttgtcgtggcgtcgtcaagagcttagctgttgaagcttcttgttcatgaggagtgcccggttcctaaacctctgctgatttgatattattttaagcatgtaattgttggaaataaagcaaaatgaaatggaaattagtagtatagttttatggtctatccaaataaatttggctggaattaaagttactaaactatgtatgtgtgtggtaagcactttgg

SEQ ID NO: 96738 - protein, 852 aa, Arabidopsis thaliana
  peptide (1)..(852): Ceres Seq. ID no. 12734566
  misc_feature (774)..(851): Pfam Name: Galactose binding lectin domain Pfam Description: Galactose binding lectin domain
  misc_feature (363)..(852): Homolog of NCBI NO: 7488064 NR Description: probable beta-galactosidase (EC 3.2.1.23) F24L7.5
  misc_feature (31)..(446): Homolog of NCBI NO: 7488064 NR Description: probable beta-galactosidase (EC 3.2.1.23) F24L7.5
  misc_feature (13)..(852): Homolog of NCBI NO: 1352077 NR Description: Beta-galactosidase precursor (Lactase) (Acid beta-
  misc_feature (16)..(852): Homolog of NCBI NO: 4138137 NR Description: ss-galactosidase [Lycopersicon esculentum]
  misc_feature (18)..(852): Homolog of NCBI NO: 15231354 NR Description: glycosyl hydrolase family 35 protein id: At3g13750.1, supported by cDNA: gi_20260595
  misc_feature (18)..(852): Homolog of NCBI NO: 20260596 NR Description: galactosidase, putative [Arabidopsis thaliana]
  misc_feature (21)..(852): Homolog of NCBI NO: 30690633 NR Description: glycosyl hydrolase family 35 (beta-galactosidase)
  misc_feature (11)..(737): Homolog of NCBI NO: 30687121 NR Description: glycosyl hydrolase family 35 (beta-galactosidase)
  misc_feature (15)..(666): Homolog of NCBI NO: 30699255 NR Description: glycosyl hydrolase family 35 (beta-galactosidase)
  misc_feature (696)..(852): Homolog of NCBI NO: 30699255 NR Description: glycosyl hydrolase family 35 (beta-galactosidase)
MEIAAKMVKVRKMEMILLLILVIVVAATAANVTYDHRALVIDGKRKVLISGSIHYPRSTPEMWPELIQKSKDGGLDVIETYVFWSGHEPEKNKYNFEGRYDLVKFVKLAAKAGLYVHLRIGPYVCAEWNYGGFPVWLHFVPGIKFRTDNEPFKEEMQRFTTKIVDLMKQEKLYASQGGPIILSQIENEYGNIDSAYGAAAKSYIKWSASMALSLDTGVPWNMCQQTDAPDPMINTCNGFYCDQFTPNSNNKPKMWTENWSGWFLGFGDPSPYRPVEDLAFAVARFYQRGGTFQNYYMYHGGTNFDRTSGGPLISTSYDYDAPIDEYGLLRQPKWGHLRDLHKAIKLCEDALIATDPTITSLGSNLEAAVYKTESGSCAAFLANVDTKSDATVTFNGKSYNLPAWSVSILPDCKNVAFNTAKINSATESTAFARQSLKPDGGSSAELGSQWSYIKEPIGISKADAFLKPGLLEQINTTADKSDYLWYSLRTDIKGDETFLDEGSKAVLHIESLGQVVYAFINGKLAGSGHGKQKISLDIPINLVTGTNTIDLLSVTVGLANYGAFFDLVGAGITGPVTLKSAKGGSSIDLASQQWTYQVGLKGEDTGLATVDSSEWVSKSPLPTKQPLIWYKTTFDAPSGSEPVAIDFTGTGKGIAWVNGQSIGRYWPTSIAGNGGCTESCDYRGSYRANKCLKNCGKPSQTLYHVPRSWLKPSGNILVLFEEMGGDPTQISFATKQTGSNLCLTVSQSHPPPVDTWTSDSKISNRNRTRPVLSLKCPISTQVIFSIKFASFGTPKGTCGSFTQGHCNSSRSLSLVQKACIGLRSCNVEVSTRVFGEPCRGVVKSLAVEASCS

SEQ ID NO: 96739 - protein, 846 aa, Arabidopsis thaliana
  peptide (1)..(846): Ceres Seq. ID no. 12734567
  misc_feature (768)..(845): Pfam Name: Galactose binding lectin domain Pfam Description: Galactose binding lectin domain
  misc_feature (357)..(846): Homolog of NCBI NO: 7488064 NR Description: probable beta-galactosidase (EC 3.2.1.23) F24L7.5
  misc_feature (25)..(440): Homolog of NCBI NO: 7488064 NR Description: probable beta-galactosidase (EC 3.2.1.23) F24L7.5
  misc_feature (7)..(846): Homolog of NCBI NO: 1352077 NR Description: Beta-galactosidase precursor (Lactase) (Acid beta-
  misc_feature (10)..(846): Homolog of NCBI NO: 4138137 NR Description: ss-galactosidase [Lycopersicon esculentum]
  misc_feature (12)..(846): Homolog of NCBI NO: 15231354 NR Description: glycosyl hydrolase family 35 protein id: At3g13750.1, supported by cDNA: gi_20260595
  misc_feature (12)..(846): Homolog of NCBI NO: 20260596 NR Description: galactosidase, putative [Arabidopsis thaliana]
  misc_feature (15)..(846): Homolog of NCBI NO: 30690633 NR Description: glycosyl hydrolase family 35 (beta-galactosidase)
  misc_feature (5)..(731): Homolog of NCBI NO: 30687121 NR Description: glycosyl hydrolase family 35 (beta-galactosidase)
  misc_feature (9)..(660): Homolog of NCBI NO: 30699255 NR Description: glycosyl hydrolase family 35 (beta-galactosidase)
  misc_feature (690)..(846): Homolog of NCBI NO: 30699255 NR Description: glycosyl hydrolase family 35 (beta-galactosidase)
MVKVRKMEMILLLILVIVVAATAANVTYDHRALVIDGKRKVLISGSIHYPRSTPEMWPELIQKSKDGGLDVIETYVFWSGHEPEKNKYNFEGRYDLVKFVKLAAKAGLYVHLRIGPYVCAEWNYGGFPVWLHFVPGIKFRTDNEPFKEEMQRFTTKIVDLMKQEKLYASQGGPIILSQIENEYGNIDSAYGAAAKSYIKWSASMALSLDTGVPWNMCQQTDAPDPMINTCNGFYCDQFTPNSNNKPKMWTENWSGWFLGFGDPSPYRPVEDLAFAVARFYQRGGTFQNYYMYHGGTNFDRTSGGPLISTSYDYDAPIDEYGLLRQPKWGHLRDLHKAIKLCEDALIATDPTITSLGSNLEAAVYKTESGSCAAFLANVDTKSDATVTFNGKSYNLPAWSVSILPDCKNVAFNTAKINSATESTAFARQSLKPDGGSSAELGSQWSYIKEPIGISKADAFLKPGLLEQINTTADKSDYLWYSLRTDIKGDETFLDEGSKAVLHIESLGQVVYAFINGKLAGSGHGKQKISLDIPINLVTGTNTIDLLSVTVGLANYGAFFDLVGAGITGPVTLKSAKGGSSIDLASQQWTYQVGLKGEDTGLATVDSSEWVSKSPLPTKQPLIWYKTTFDAPSGSEPVAIDFTGTGKGIAWVNGQSIGRYWPTSIAGNGGCTESCDYRGSYRANKCLKNCGKPSQTLYHVPRSWLKPSGNILVLFEEMGGDPTQISFATKQTGSNLCLTVSQSHPPPVDTWTSDSKISNRNRTRPVLSLKCPISTQVIFSIKFASFGTPKGTCGSFTQGHCNSSRSLSLVQKACIGLRSCNVEVSTRVFGEPCRGVVKSLAVEASCS

SEQ ID NO: 96740 - protein, 840 aa, Arabidopsis thaliana
  peptide (1)..(840): Ceres Seq. ID no. 12734568
  misc_feature (762)..(839): Pfam Name: Galactose binding lectin domain Pfam Description: Galactose binding lectin domain
  misc_feature (351)..(840): Homolog of NCBI NO: 7488064 NR Description: probable beta-galactosidase (EC 3.2.1.23) F24L7.5
  misc_feature (19)..(434): Homolog of NCBI NO: 7488064 NR Description: probable beta-galactosidase (EC 3.2.1.23) F24L7.5
  misc_feature (1)..(840): Homolog of NCBI NO: 1352077 NR Description: Beta-galactosidase precursor (Lactase) (Acid beta-
  misc_feature (4)..(840): Homolog of NCBI NO: 4138137 NR Description: ss-galactosidase [Lycopersicon esculentum]
  misc_feature (6)..(840): Homolog of NCBI NO: 15231354 NR Description: glycosyl hydrolase family 35 protein id: At3g13750.1, supported by cDNA: gi_20260595
  misc_feature (6)..(840): Homolog of NCBI NO: 20260596 NR Description: galactosidase, putative [Arabidopsis thaliana]
  misc_feature (9)..(840): Homolog of NCBI NO: 30690633 NR Description: glycosyl hydrolase family 35 (beta-galactosidase)
  misc_feature (1)..(725): Homolog of NCBI NO: 30687121 NR Description: glycosyl hydrolase family 35 (beta-galactosidase)
  misc_feature (3)..(654): Homolog of NCBI NO: 30699255 NR Description: glycosyl hydrolase family 35 (beta-galactosidase)
  misc_feature (684)..(840): Homolog of NCBI NO: 30699255 NR Description: glycosyl hydrolase family 35 (beta-galactosidase)
MEMILLLILVIVVAATAANVTYDHRALVIDGKRKVLISGSIHYPRSTPEMWPELIQKSKDGGLDVIETYVFWSGHEPEKNKYNFEGRYDLVKFVKLAAKAGLYVHLRIGPYVCAEWNYGGFPVWLHFVPGIKFRTDNEPFKEEMQRFTTKIVDLMKQEKLYASQGGPIILSQIENEYGNIDSAYGAAAKSYIKWSASMALSLDTGVPWNMCQQTDAPDPMINTCNGFYCDQFTPNSNNKPKMWTENWSGWFLGFGDPSPYRPVEDLAFAVARFYQRGGTFQNYYMYHGGTNFDRTSGGPLISTSYDYDAPIDEYGLLRQPKWGHLRDLHKAIKLCEDALIATDPTITSLGSNLEAAVYKTESGSCAAFLANVDTKSDATVTFNGKSYNLPAWSVSILPDCKNVAFNTAKINSATESTAFARQSLKPDGGSSAELGSQWSYIKEPIGISKADAFLKPGLLEQINTTADKSDYLWYSLRTDIKGDETFLDEGSKAVLHIESLGQVVYAFINGKLAGSGHGKQKISLDIPINLVTGTNTIDLLSVTVGLANYGAFFDLVGAGITGPVTLKSAKGGSSIDLASQQWTYQVGLKGEDTGLATVDSSEWVSKSPLPTKQPLIWYKTTFDAPSGSEPVAIDFTGTGKGIAWVNGQSIGRYWPTSIAGNGGCTESCDYRGSYRANKCLKNCGKPSQTLYHVPRSWLKPSGNILVLFEEMGGDPTQISFATKQTGSNLCLTVSQSHPPPVDTWTSDSKISNRNRTRPVLSLKCPISTQVIFSIKFASFGTPKGTCGSFTQGHCNSSRSLSLVQKACIGLRSCNVEVSTRVFGEPCRGVVKSLAVEASCS

SEQ ID NO: 96741 - DNA, 1753 bp, Arabidopsis thaliana
  misc_feature (1)..(1753): Ceres Seq. ID no. 12734577
  misc_feature: MA Experiment ID: 20000234 Result: Down-regulated in Transcription
  misc_feature: MA Experiment 20000234 PARAMETER Experiment Name: At_Siliques_P Parameter: Age (day) Value: 21
  misc_feature: MA Experiment 20000234 PARAMETER Experiment Name: At_Siliques_P Parameter: Organism Value: A. thaliana
  misc_feature: MA Experiment 20000234 PARAMETER Experiment Name: At_Siliques_P Parameter: Plant Line Value: WS
  misc_feature: MA Experiment 20000234 PARAMETER Experiment Name: At_Siliques_P Parameter: Tissue Value: Less Than 5mm Siliques vs. Whole Plant
  misc_feature: MA Experiment ID: 20000264 Result: Down-regulated in Transcription
  misc_feature: MA Experiment 20000264 PARAMETER Experiment Name: At_Open_Flower_P Parameter: Age (day) Value: 21
  misc_feature: MA Experiment 20000264 PARAMETER Experiment Name: At_Open_Flower_P Parameter: Plant Line Value: WS
  misc_feature: MA Experiment 20000264 PARAMETER Experiment Name: At_Open_Flower_P Parameter: Tissue Value: Open Flower vs. Whole Plant
  misc_feature: MA Experiment ID: 20000265 Result: Down-regulated in Transcription
  misc_feature: MA Experiment 20000265 PARAMETER Experiment Name: At_Open_Flower_P Parameter: Age (day) Value: 21
  misc_feature: MA Experiment 20000265 PARAMETER Experiment Name: At_Open_Flower_P Parameter: Plant Line Value: WS
  misc_feature: MA Experiment 20000265 PARAMETER Experiment Name: At_Open_Flower_P Parameter: Tissue Value: Closed Flower vs. Whole Plant
  misc_feature: MA Experiment ID: 20000286 Result: Down-regulated in Transcription
  misc_feature: MA Experiment 20000286 PARAMETER Experiment Name: At_Open_Flower_P Parameter: Age (day) Value: 21
  misc_feature: MA Experiment 20000286 PARAMETER Experiment Name: At_Open_Flower_P Parameter: Plant Line Value: WS
  misc_feature: MA Experiment 20000286 PARAMETER Experiment Name: At_Open_Flower_P Parameter: Tissue Value: Half Open vs. Whole Plant
  misc_feature: MA Experiment ID: 20000438 Result: Up-regulated in Transcription
  misc_feature: MA Experiment 20000438 PARAMETER Experiment Name: At_Shoots__P Parameter: Age (day) Value: 14
  misc_feature: MA Experiment 20000438 PARAMETER Experiment Name: At_Shoots__P Parameter: Tissue Value: Shoots vs. Whole Plant
  misc_feature: MA Experiment ID: 20001248 Result: Down-regulated in Transcription
  misc_feature: MA Experiment 20001248 PARAMETER Experiment Name: At_Far-red-induction_P Parameter: Age (day) Value: 7
  misc_feature: MA Experiment 20001248 PARAMETER Experiment Name: At_Far-red-induction_P Parameter: Light Value: Far-red vs. White
  misc_feature: MA Experiment 20001248 PARAMETER Experiment Name: At_Far-red-induction_P Parameter: Organism Value: A. thaliana
  misc_feature: MA Experiment 20001248 PARAMETER Experiment Name: At_Far-red-induction_P Parameter: Plant Line Value: Columbia
  misc_feature: MA Experiment 20001248 PARAMETER Experiment Name: At_Far-red-induction_P Parameter: Timepoint (hr) Value: 4
  misc_feature: MA Experiment 20001248 PARAMETER Experiment Name: At_Far-red-induction_P Parameter: Tissue Value: Whole Plant
gttccctcacacgtctccttctatcttcttctccactttaaaaaaaaaaaatatccgtctcactctctcgccgccggtaacatttcccggcgacaaaacttctctactctcaccattcctccatcgtaatctctaaattcttctccattctcttcttcctcccgatcatctcgagctcttcgtgagagattatgtgattatgtaatcgttgttgctgtagaagacgatctctaacaactgattccttcatcatcaccttcgctagatttgtaattttcagagcttgagatgttggatcttaacctcaacgctgattctcccgagtcgactcagtacggtggtgactcatacttagatcggcagacatcagacaactccgccgggaatcgagtggaagagtccggtacatcgacgtcgtcagttatcaatgccgatggagacgaagactcttgctctactcgagctttcactctcagtttcgatattttaaaagtcggaagtagtagcggcggagacgaaagccccgccgcttcagcttccgttactaaagagttttttccggtgagtggagactgtggacatctacgagatgttgaaggatcatcaagctctagaaactggatagatctttcttttgaccgtattggtgacggagaaacgaaattggtaactccggttccgactccggctccggttccggctcaggttaaaaagagtcggagaggaccaaggtctagaagttcacagtatagaggagttactttttatagaagaactggtcgatgggagtcacatatttgggattgtgggaaacaagtttatttaggtggtttcgacactgctcatgctgcagctagagcttatgatcgagctgctattaaatttagaggtgttgatgctgatatcaactttactcttggtgattatgaggaagatatgaaacaggtacaaaacttgagtaaggaagagtttgtgcatatactgcgtagacagagcacggggttttcgcgggggagttcgaagtatcgaggggttacgttacacaaatgtggtagatgggaagctaggatggggcagtttcttggtaaaaaggcttatgacaaggctgcaatcaacactaatggtagagaagcagtcacgaacttcgagatgagttcataccaaaatgagattaactctgagagcaataactctgagattgacctcaacttgggaatctctttatcgaccggtaatgcgccaaagcaaaatgggaggctctttcacttcccttctaatacttatgaaactcagcgtggagttagcttgaggatagataacgaatacatgggaaagccggtgaatacacctcttccttatggatcctcggatcatcgcctttactggaacggagcatgcccgagttataataatcccgccgagggaagagcaacagaaaagagaagtgaagctgaagggatgatgagtaactggggatggcagagaccggggcaaacaagcgccgtgagaccgcagccaccgggaccacaaccaccaccattgttctcagttgcagcagcatcatcaggattctcacatttccggccacaacctcccaatgacaatgcaacacgtggttacttttatccacacccttaacttgtaaggggacatatgagagtttttttaccatctctctctctctcaacactctagtcccctttcaaaaatgtcatttgggttttagatttttcacatacaatgatcaattttt

SEQ ID NO: 96742 - protein, 449 aa, Arabidopsis thaliana
  peptide (1)..(449): Ceres Seq. ID no. 12734578
  misc_feature (151)..(214): Pfam Name: AP2 domain Pfam Description: AP2 domain
  misc_feature (1)..(449): Homolog of NCBI NO: 18401775 NR Description: AP2 domain protein RAP2.7; protein id: supported by cDNA: gi_13272406, supported by cDNA: gi_15292762, by cDNA: gi_20259678 [Arabidopsis thaliana]
  misc_feature (1)..(449): Homolog of NCBI NO: 25354653 NR Description: probable AP2 domain transcription factor
  misc_feature (47)..(449): Homolog of NCBI NO: 2281639 NR Description: AP2 domain containing protein RAP2.7 [Arabidopsis
  misc_feature (1)..(449): Homolog of NCBI NO: 30697332 NR Description: AP2 domain transcription factor, putative
  misc_feature (85)..(429): Homolog of NCBI NO: 5360996 NR Description: APETALA2 protein homolog HAP2 [Hyacinthus
  misc_feature (1)..(368): Homolog of NCBI NO: 5081555 NR Description: PHAP2A protein [Petunia x hybrida]
  misc_feature (29)..(323): Homolog of NCBI NO: 28894445 NR Description: LIPLESS2 [Antirrhinum majus]
  misc_feature (23)..(352): Homolog of NCBI NO: 28894443 NR Description: LIPLESS1 [Antirrhinum majus]
  misc_feature (137)..(449): Homolog of NCBI NO: 34900512 NR Description: putative indeterminate spikelet 1 [Oryza sativa
  misc_feature (34)..(429): Homolog of NCBI NO: 11181610 NR Description: APETALA2-related transcription factor 1 [Picea
MLDLNLNADSPESTQYGGDSYLDRQTSDNSAGNRVEESGTSTSSVINADGDEDSCSTRAFTLSFDILKVGSSSGGDESPAASASVTKEFFPVSGDCGHLRDVEGSSSSRNWIDLSFDRIGDGETKLVTPVPTPAPVPAQVKKSRRGPRSRSSQYRGVTFYRRTGRWESHIWDCGKQVYLGGFDTAHAAARAYDRAAIKFRGVDADINFTLGDYEEDMKQVQNLSKEEFVHILRRQSTGFSRGSSKYRGVTLHKCGRWEARMGQFLGKKAYDKAAINTNGREAVTNFEMSSYQNEINSESNNSEIDLNLGISLSTGNAPKQNGRLFHFPSNTYETQRGVSLRIDNEYMGKPVNTPLPYGSSDHRLYWNGACPSYNNPAEGRATEKRSEAEGMMSNWGWQRPGQTSAVRPQPPGPQPPPLFSVAAASSGFSHFRPQPPNDNATRGYFYPHP

SEQ ID NO: 96743 - protein, 233 aa, Arabidopsis thaliana
  peptide (1)..(233): Ceres Seq. ID no. 12734579
  misc_feature (1)..(233): Homolog of NCBI NO: 18401775 NR Description: AP2 domain protein RAP2.7; protein id: supported by cDNA: gi_13272406, supported by cDNA: gi_15292762, by cDNA: gi_20259678 [Arabidopsis thaliana]
  misc_feature (1)..(233): Homolog of NCBI NO: 25354653 NR Description: probable AP2 domain transcription factor
  misc_feature (1)..(233): Homolog of NCBI NO: 2281639 NR Description: AP2 domain containing protein RAP2.7 [Arabidopsis
  misc_feature (1)..(233): Homolog of NCBI NO: 30697332 NR Description: AP2 domain transcription factor, putative
  misc_feature (1)..(213): Homolog of NCBI NO: 5360996 NR Description: APETALA2 protein homolog HAP2 [Hyacinthus
  misc_feature (1)..(152): Homolog of NCBI NO: 5081555 NR Description: PHAP2A protein [Petunia x hybrida]
  misc_feature (1)..(107): Homolog of NCBI NO: 28894445 NR Description: LIPLESS2 [Antirrhinum majus]
  misc_feature (1)..(136): Homolog of NCBI NO: 28894443 NR Description: LIPLESS1 [Antirrhinum majus]
  misc_feature (1)..(233): Homolog of NCBI NO: 34900512 NR Description: putative indeterminate spikelet 1 [Oryza sativa
  misc_feature (1)..(213): Homolog of NCBI NO: 11181610 NR Description: APETALA2-related transcription factor 1 [Picea
MKQVQNLSKEEFVHILRRQSTGFSRGSSKYRGVTLHKCGRWEARMGQFLGKKAYDKAAINTNGREAVTNFEMSSYQNEINSESNNSEIDLNLGISLSTGNAPKQNGRLFHFPSNTYETQRGVSLRIDNEYMGKPVNTPLPYGSSDHRLYWNGACPSYNNPAEGRATEKRSEAEGMMSNWGWQRPGQTSAVRPQPPGPQPPPLFSVAAASSGFSHFRPQPPNDNATRGYFYPHP

SEQ ID NO: 96744 - DNA, 870 bp, Arabidopsis thaliana
  misc_feature (1)..(870): Ceres Seq. ID no. 12734580
  misc_feature: MA Experiment ID: 20000179 Result: Up-regulated in Transcription
  misc_feature: MA Experiment 20000179 PARAMETER Experiment Name: At_Germinating_Seeds_P Parameter: Age (hr) Value: 6 vs. 0
  misc_feature: MA Experiment 20000179 PARAMETER Experiment Name: At_Germinating_Seeds_P Parameter: Tissue Value: Germinating Seeds
  misc_feature: MA Experiment ID: 20000180 Result: Up-regulated in Transcription
  misc_feature: MA Experiment 20000180 PARAMETER Experiment Name: At_Germinating_Seeds_P Parameter: Age (hr) Value: 24 vs. 0
  misc_feature: MA Experiment 20000180 PARAMETER Experiment Name: At_Germinating_Seeds_P Parameter: Tissue Value: Germinating Seeds
  misc_feature: MA Experiment ID: 20000182 Result: Down-regulated in Transcription
  misc_feature: MA Experiment 20000182 PARAMETER Experiment Name: At_2mM_SA_P Parameter: Age (day) Value: 14
  misc_feature: MA Experiment 20000182 PARAMETER Experiment Name: At_2mM_SA_P Parameter: Organism Value: A. thaliana
  misc_feature: MA Experiment 20000182 PARAMETER Experiment Name: At_2mM_SA_P Parameter: Plant Line Value: WS
  misc_feature: MA Experiment 20000182 PARAMETER Experiment Name: At_2mM_SA_P Parameter: Timepoint (hr) Value: 6
  misc_feature: MA Experiment 20000182 PARAMETER Experiment Name: At_2mM_SA_P Parameter: Tissue Value: Aerial
  misc_feature: MA Experiment 20000182 PARAMETER Experiment Name: At_2mM_SA_P Parameter: Treatment Value: 2mM SA vs. No Treatment
  misc_feature: MA Experiment ID: 20000185 Result: Down-regulated in Transcription
  misc_feature: MA Experiment 20000185 PARAMETER Experiment Name: At_Roots__P Parameter: Age (day) Value: 7 vs. 21
  misc_feature: MA Experiment 20000185 PARAMETER Experiment Name: At_Roots__P Parameter: Organism Value: A. thaliana
  misc_feature: MA Experiment 20000185 PARAMETER Experiment Name: At_Roots__P Parameter: Tissue Value: Roots vs. Whole Plant
  misc_feature: MA Experiment ID: 20000436 Result: Down-regulated in Transcription
  misc_feature: MA Experiment 20000436 PARAMETER Experiment Name: At_Drought_P Parameter: Age (day) Value: 7
  misc_feature: MA Experiment 20000436 PARAMETER Experiment Name: At_Drought_P Parameter: Organism Value: A. thaliana
  misc_feature: MA Experiment 20000436 PARAMETER Experiment Name: At_Drought_P Parameter: Plant Line Value: WS
  misc_feature: MA Experiment 20000436 PARAMETER Experiment Name: At_Drought_P Parameter: Timepoint (hr) Value: 12
  misc_feature: MA Experiment 20000436 PARAMETER Experiment Name: At_Drought_P Parameter: Tissue Value: Whole Plant
  misc_feature: MA Experiment 20000436 PARAMETER Experiment Name: At_Drought_P Parameter: Treatment Value: Drought vs. No Drought
  misc_feature: MA Experiment ID: 20000437 Result: Down-regulated in Transcription
  misc_feature: MA Experiment 20000437 PARAMETER Experiment Name: At_Drought_P Parameter: Age (day) Value: 8
  misc_feature: MA Experiment 20000437 PARAMETER Experiment Name: At_Drought_P Parameter: Organism Value: A. thaliana
  misc_feature: MA Experiment 20000437 PARAMETER Experiment Name: At_Drought_P Parameter: Plant Line Value: WS
  misc_feature: MA Experiment 20000437 PARAMETER Experiment Name: At_Drought_P Parameter: Timepoint (hr) Value: 24
  misc_feature: MA Experiment 20000437 PARAMETER Experiment Name: At_Drought_P Parameter: Tissue Value: Whole Plant
  misc_feature: MA Experiment 20000437 PARAMETER Experiment Name: At_Drought_P Parameter: Treatment Value: Drought vs. No Drought
  misc_feature: MA Experiment ID: 20000439 Result: Down-regulated in Transcription
  misc_feature: MA Experiment 20000439 PARAMETER Experiment Name: At_Roots__P Parameter: Age (day) Value: 14 vs. 21
  misc_feature: MA Experiment 20000439 PARAMETER Experiment Name: At_Roots__P Parameter: Organism Value: A. thaliana
  misc_feature: MA Experiment 20000439 PARAMETER Experiment Name: At_Roots__P Parameter: Tissue Value: Roots vs. Whole Plant
  misc_feature: MA Experiment ID: 20000794 Result: Down-regulated in Transcription
  misc_feature: MA Experiment 20000794 PARAMETER Experiment Name: At_Petals_P Parameter: Age (day) Value: 23-25 days
  misc_feature: MA Experiment 20000794 PARAMETER Experiment Name: At_Petals_P Parameter: Plant Line Value: WS
  misc_feature: MA Experiment 20000794 PARAMETER Experiment Name: At_Petals_P Parameter: Tissue Value: Petals vs. Whole plant
  misc_feature: MA Experiment ID: 20001248 Result: Down-regulated in Transcription
  misc_feature: MA Experiment 20001248 PARAMETER Experiment Name: At_Far-red-induction_P Parameter: Age (day) Value: 7
  misc_feature: MA Experiment 20001248 PARAMETER Experiment Name: At_Far-red-induction_P Parameter: Light Value: Far-red vs. White
  misc_feature: MA Experiment 20001248 PARAMETER Experiment Name: At_Far-red-induction_P Parameter: Organism Value: A. thaliana
  misc_feature: MA Experiment 20001248 PARAMETER Experiment Name: At_Far-red-induction_P Parameter: Plant Line Value: Columbia
  misc_feature: MA Experiment 20001248 PARAMETER Experiment Name: At_Far-red-induction_P Parameter: Timepoint (hr) Value: 4
  misc_feature: MA Experiment 20001248 PARAMETER Experiment Name: At_Far-red-induction_P Parameter: Tissue Value: Whole Plant
  misc_feature: MA Experiment ID: 20001450 Result: Down-regulated in Transcription
  misc_feature: MA Experiment 20001450 PARAMETER Experiment Name: At_Far-red-induction_P Parameter: Age (day) Value: 7
  misc_feature: MA Experiment 20001450 PARAMETER Experiment Name: At_Far-red-induction_P Parameter: Light Value: Far-red vs. White
  misc_feature: MA Experiment 20001450 PARAMETER Experiment Name: At_Far-red-induction_P Parameter: Organism Value: A. thaliana
  misc_feature: MA Experiment 20001450 PARAMETER Experiment Name: At_Far-red-induction_P Parameter: Plant Line Value: Columbia
  misc_feature: MA Experiment 20001450 PARAMETER Experiment Name: At_Far-red-induction_P Parameter: Timepoint (hr) Value: 8
  misc_feature: MA Experiment 20001450 PARAMETER Experiment Name: At_Far-red-induction_P Parameter: Tissue Value: Whole Plant
  misc_feature: MA Experiment ID: 20001560 Result: Up-regulated in Transcription
  misc_feature: MA Experiment 20001560 PARAMETER Experiment Name: At_Drought_Soil_Dry_P Parameter: Age (day) Value: 28
  misc_feature: MA Experiment 20001560 PARAMETER Experiment Name: At_Drought_Soil_Dry_P Parameter: Organism Value: A. thaliana
  misc_feature: MA Experiment 20001560 PARAMETER Experiment Name: At_Drought_Soil_Dry_P Parameter: Plant Line Value: WS
  misc_feature: MA Experiment 20001560 PARAMETER Experiment Name: At_Drought_Soil_Dry_P Parameter: Post Timepoint (hr) Value: None
  misc_feature: MA Experiment 20001560 PARAMETER Experiment Name: At_Drought_Soil_Dry_P Parameter: Post-Treatment Value: None
  misc_feature: MA Experiment 20001560 PARAMETER Experiment Name: At_Drought_Soil_Dry_P Parameter: Timepoint (day) Value: 14
  misc_feature: MA Experiment 20001560 PARAMETER Experiment Name: At_Drought_Soil_Dry_P Parameter: Treatment Value: Drought vs. No Drought
  misc_feature: MA Experiment ID: 20001905 Result: Down-regulated in Transcription
  misc_feature: MA Experiment 20001905 PARAMETER Experiment Name: At_Drought_Reproduction_P Parameter: Age (day) Value: 40
  misc_feature: MA Experiment 20001905 PARAMETER Experiment Name: At_Drought_Reproduction_P Parameter: Organism Value: A. thaliana
  misc_feature: MA Experiment 20001905 PARAMETER Experiment Name: At_Drought_Reproduction_P Parameter: Plant Line Value: WS
  misc_feature: MA Experiment 20001905 PARAMETER Experiment Name: At_Drought_Reproduction_P Parameter: Timepoint (day) Value: 10
  misc_feature: MA Experiment 20001905 PARAMETER Experiment Name: At_Drought_Reproduction_P Parameter: Tissue Value: Rosettes
  misc_feature: MA Experiment 20001905 PARAMETER Experiment Name: At_Drought_Reproduction_P Parameter: Treatment Value: Drought vs. No Drought
  misc_feature: MA Experiment ID: 20001906 Result: Down-regulated in Transcription
  misc_feature: MA Experiment 20001906 PARAMETER Experiment Name: At_Drought_Reproduction_P Parameter: Age (day) Value: 35
  misc_feature: MA Experiment 20001906 PARAMETER Experiment Name: At_Drought_Reproduction_P Parameter: Organism Value: A. thaliana
  misc_feature: MA Experiment 20001906 PARAMETER Experiment Name: At_Drought_Reproduction_P Parameter: Plant Line Value: WS
  misc_feature: MA Experiment 20001906 PARAMETER Experiment Name: At_Drought_Reproduction_P Parameter: Timepoint (day) Value: 5
  misc_feature: MA Experiment 20001906 PARAMETER Experiment Name: At_Drought_Reproduction_P Parameter: Tissue Value: Siliques
  misc_feature: MA Experiment 20001906 PARAMETER Experiment Name: At_Drought_Reproduction_P Parameter: Treatment Value: Drought vs. No Drought
  misc_feature: MA Experiment ID: 20001911 Result: Down-regulated in Transcription
  misc_feature: MA Experiment 20001911 PARAMETER Experiment Name: At_Drought_Reproduction_P Parameter: Age (day) Value: 40
  misc_feature: MA Experiment 20001911 PARAMETER Experiment Name: At_Drought_Reproduction_P Parameter: Organism Value: A. thaliana
  misc_feature: MA Experiment 20001911 PARAMETER Experiment Name: At_Drought_Reproduction_P Parameter: Plant Line Value: WS
  misc_feature: MA Experiment 20001911 PARAMETER Experiment Name: At_Drought_Reproduction_P Parameter: Timepoint (day) Value: 10
  misc_feature: MA Experiment 20001911 PARAMETER Experiment Name: At_Drought_Reproduction_P Parameter: Tissue Value: Flowers
  misc_feature: MA Experiment 20001911 PARAMETER Experiment Name: At_Drought_Reproduction_P Parameter: Treatment Value: Drought vs. No Drought
gttgataaggagaaagaagcaaaatgtggtcgcaaagcttcttaggttctgctcccaaattatgtctcttctcatcttctcttcctcctttctctcatcacaagatccataaattcttctgctttgcccaaaatccatcatccactgttagcatcaatctcagcaaaagacatttgaatctctcaattctcacactcttcttcaatgggttcttgttggataataaagccaaatccatggaagaacttcaaagatacactgattccaacaatggcttcactcttctcataccctcttcttatacaaaggtagagaaagcaggagctaatgctctgtttgaagaactaaacaatggaagcaacaatattggtgttgttgttagtcctgtccgtataaagagccttgaccaatttggttctcctcaatttgttgctgataagcttatcaacgcagagaaacgaaaggaaagcacaaaggaagcagaagttgtatcagtgggagagagagcaggattaggacaacaagtgtatgagtttgaatacaaaattgatagtacaagaggaggaatcaagagggttttctcagctgcgtttgtgagttctaacaagctttatctattgaatgttgttcattcagataaaccagagaatccattggattcaagtacgagaatgtcgttggaacaagttcttcactcctttgatgctctgcctcttacatgaccaccaaacccaataatctgtttccttgttgagcttgtttgatgggcttattcttgagttaatgggcttttgtagtcatttattgagcccaataaatctgagatttcttttgttacaaatactgttgcctagttaacattctttgtgg

SEQ ID NO: 96745 - protein, 232 aa, Arabidopsis thaliana
  peptide (1)..(232): Ceres Seq. ID no. 12734581
  misc_feature (48)..(175): Pfam Name: PsbP Pfam Description: PsbP
  misc_feature (1)..(232): Homolog of NCBI NO: 30683953 NR Description: expressed protein [Arabidopsis thaliana] unknown protein [Arabidopsis thaliana]
  misc_feature (72)..(232): Homolog of NCBI NO: 20198164 NR Description: hypothetical protein [Arabidopsis thaliana]
  misc_feature (74)..(147): Homolog of NCBI NO: 21741209 NR Description: OSJNBb0086G13.4 [Oryza sativa (japonica
  misc_feature (76)..(226): Homolog of NCBI NO: 23041129 NR Description: hypothetical protein [Trichodesmium erythraeum
MWSQSFLGSAPKLCLFSSSLPPFSHHKIHKFFCFAQNPSSTVSINLSKRHLNLSILTLFFNGFLLDNKAKSMEELQRYTDSNNGFTLLIPSSYTKVEKAGANALFEELNNGSNNIGVVVSPVRIKSLDQFGSPQFVADKLINAEKRKESTKEAEVVSVGERAGLGQQVYEFEYKIDSTRGGIKRVFSAAFVSSNKLYLLNVVHSDKPENPLDSSTRMSLEQVLHSFDALPLT

SEQ ID NO: 96746 - protein, 161 aa, Arabidopsis thaliana; identical to SEQ ID NO: 87798
  peptide (1)..(161): Ceres Seq. ID no. 12734582
  misc_feature (1)..(104): Pfam Name: PsbP Pfam Description: PsbP
  misc_feature (1)..(161): Homolog of NCBI NO: 30683953 NR Description: expressed protein [Arabidopsis thaliana] unknown protein [Arabidopsis thaliana]
  misc_feature (1)..(161): Homolog of NCBI NO: 20198164 NR Description: hypothetical protein [Arabidopsis thaliana]
  misc_feature (3)..(76): Homolog of NCBI NO: 21741209 NR Description: OSJNBb0086G13.4 [Oryza sativa (japonica
  misc_feature (5)..(155): Homolog of NCBI NO: 23041129 NR Description: hypothetical protein [Trichodesmium erythraeum

SEQ ID NO: 96747 - DNA, 1071 bp, Arabidopsis thaliana
  misc_feature (1)..(1071): Ceres Seq. ID no. 12734591
  misc_feature: MA Experiment ID: 20000355 Result: Up-regulated in Transcription
  misc_feature: MA Experiment 20000355 PARAMETER Experiment Name: At_Siliques_Sub_P Parameter: Age (day) Value: 21
  misc_feature: MA Experiment 20000355 PARAMETER Experiment Name: At_Siliques_Sub_P Parameter: Organism Value: A. thaliana
  misc_feature: MA Experiment 20000355 PARAMETER Experiment Name: At_Siliques_Sub_P Parameter: Plant Line Value: WS
  misc_feature: MA Experiment 20000355 PARAMETER Experiment Name: At_Siliques_Sub_P Parameter: Tissue Value: Less Than 5mm Siliques vs. Whole Plant
  misc_feature: MA Experiment ID: 20000440 Result: Up-regulated in Transcription
  misc_feature: MA Experiment 20000440 PARAMETER Experiment Name: At_Closed-Flower__Sub_P Parameter: Tissue Value: Closed Flower vs. Whole Plant
atggaattggatctatcaccaaggctcccgaaaaaggtgtacggaggagacggtggttcgtactttgcatggtgccctgaagagttgccaatgctccgagatggtaacattggagcctctaagctcgctcttgagaagtatggcttggctcttcctcgctactctgactcccccaaggtcgcttatgttcttcaaggagctggaacagctggaatcgtgctccctgagaaggaggagaaagtgatagcaatcaagaaaggagactccatagctttaccttttggtgtagtgacatggtggttcaacaatgaggacactgagctagtcgttctcttccttggtgagactcacaagggtcacaaagctggacagttcaccgacttttacctaaccggatccaatggaatcttcaccggtttctctactgagtttgttggcagagcttgggatctcgatgagaccaccgtgaagaagcttgtcggatctcagacaggtaacggtatcgtgaaggttgatgcgagcttgaagatgcctgaaccaaagaaaggtgaccgaaaagggtttgttttgaactgtttggaggctcctcttgatgttgacattaaggatggaggaagagttgttgtgttgaacacaaagaatcttcctttggttggtgaagttggatttggagctgatcttgtgagaatcgatggacactctatgtgttctcctggattctcttgtgactcggctcttcaagttacttacattgttggtggaagtggtcgtgttcagattgttggtgctgatgggaagagagttcttgagactcatgtgaaagctggtgttttgttcattgttcctaggttctttgttgtctccaagattgctgattctgatggcttgtcttggttctccattgtgaccactcctgatccaatattcactcatttggccgggaggacttcggtgtggaaggctttgtcgccggaggttttgcaggcagcgttcaaggtggatcccgaggttgagaaggctttccgatctaagaggacctctgatgccattttcttctctccttccaactag

SEQ ID NO: 96748 - protein, 356 aa, Arabidopsis thaliana
  peptide (1)..(356): Ceres Seq. ID no. 12734592
  misc_feature (5)..(157): Pfam Name: Cupin Pfam Description: Cupin
  misc_feature (1)..(356): Homolog of NCBI NO: 15226926 NR Description: legumin-like protein; protein id: At2g28680.1
  misc_feature (1)..(356): Homolog of NCBI NO: 21593610 NR Description: globulin-like protein [Arabidopsis thaliana]
  misc_feature (1)..(356): Homolog of NCBI NO: 15223000 NR Description: globulin-like protein; protein id: At1g07750.1, by cDNA: 40551., supported by cDNA: gi_12248028, supported by gi_15294233 [Arabidopsis thaliana] >gi|25407006|pir||A86213
  misc_feature (1)..(356): Homolog of NCBI NO: 34906084 NR Description: putative legumin-like protein [Oryza sativa
  misc_feature (1)..(356): Homolog of NCBI NO: 37730876 NR Description: legumin-like protein [Zea mays]
  misc_feature (3)..(354): Homolog of NCBI NO: 28950670 NR Description: legumin-like protein [Zea mays]
  misc_feature (3)..(356): Homolog of NCBI NO: 28950668 NR Description: legumin-like protein [Zea mays]
  misc_feature (132)..(355): Homolog of NCBI NO: 949869 NR Description: legumin; 11S-globulin [Ginkgo biloba]
  misc_feature (26)..(133): Homolog of NCBI NO: 949869 NR Description: legumin; 11S-globulin [Ginkgo biloba]
  misc_feature (1)..(180): Homolog of NCBI NO: 7595348 NR Description: globulin-like protein [Cucumis melo]
MELDLSPRLPKKVYGGDGGSYFAWCPEELPMLRDGNIGASKLALEKYGLALPRYSDSPKVAYVLQGAGTAGIVLPEKEEKVIAIKKGDSIALPFGVVTWWFNNEDTELVVLFLGETHKGHKAGQFTDFYLTGSNGIFTGFSTEFVGRAWDLDETTVKKLVGSQTGNGIVKVDASLKMPEPKKGDRKGFVLNCLEAPLDVDIKDGGRVVVLNTKNLPLVGEVGFGADLVRIDGHSMCSPGFSCDSALQVTYIVGGSGRVQIVGADGKRVLETHVKAGVLFIVPRFFVVSKIADSDGLSWFSIVTTPDPIFTHLAGRTSVWKALSPEVLQAAFKVDPEVEKAFRSKRTSDAIFFSPSN

SEQ ID NO: 96749 - protein, 326 aa, Arabidopsis thaliana
  peptide (1)..(326): Ceres Seq. ID no. 12734593
  misc_feature (1)..(127): Pfam Name: Cupin Pfam Description: Cupin
  misc_feature (1)..(326): Homolog of NCBI NO: 15226926 NR Description: legumin-like protein; protein id: At2g28680.1
  misc_feature (1)..(326): Homolog of NCBI NO: 21593610 NR Description: globulin-like protein [Arabidopsis thaliana]
  misc_feature (1)..(326): Homolog of NCBI NO: 15223000 NR Description: globulin-like protein; protein id: At1g07750.1, by cDNA: 40551., supported by cDNA: gi_12248028, supported by gi_15294233 [Arabidopsis thaliana] >gi|25407006|pir||A86213
  misc_feature (1)..(326): Homolog of NCBI NO: 34906084 NR Description: putative legumin-like protein [Oryza sativa
  misc_feature (1)..(326): Homolog of NCBI NO: 37730876 NR Description: legumin-like protein [Zea mays]
  misc_feature (1)..(324): Homolog of NCBI NO: 28950670 NR Description: legumin-like protein [Zea mays]
  misc_feature (1)..(326): Homolog of NCBI NO: 28950668 NR Description: legumin-like protein [Zea mays]
  misc_feature (102)..(325): Homolog of NCBI NO: 949869 NR Description: legumin; 11S-globulin [Ginkgo biloba]
  misc_feature (1)..(103): Homolog of NCBI NO: 949869 NR Description: legumin; 11S-globulin [Ginkgo biloba]
  misc_feature (1)..(150): Homolog of NCBI NO: 7595348 NR Description: globulin-like protein [Cucumis melo]
MLRDGNIGASKLALEKYGLALPRYSDSPKVAYVLQGAGTAGIVLPEKEEKVIAIKKGDSIALPFGVVTWWFNNEDTELVVLFLGETHKGHKAGQFTDFYLTGSNGIFTGFSTEFVGRAWDLDETTVKKLVGSQTGNGIVKVDASLKMPEPKKGDRKGFVLNCLEAPLDVDIKDGGRVVVLNTKNLPLVGEVGFGADLVRIDGHSMCSPGFSCDSALQVTYIVGGSGRVQIVGADGKRVLETHVKAGVLFIVPRFFVVSKIADSDGLSWFSIVTTPDPIFTHLAGRTSVWKALSPEVLQAAFKVDPEVEKAFRSKRTSDAIFFSPSN

SEQ ID NO: 96750 - protein, 180 aa, Arabidopsis thaliana
  peptide (1)..(180): Ceres Seq. ID no. 12734594
  misc_feature (1)..(180): Homolog of NCBI NO: 15226926 NR Description: legumin-like protein; protein id: At2g28680.1
  misc_feature (1)..(180): Homolog of NCBI NO: 21593610 NR Description: globulin-like protein [Arabidopsis thaliana]
  misc_feature (1)..(180): Homolog of NCBI NO: 15223000 NR Description: globulin-like protein; protein id: At1g07750.1, by cDNA: 40551., supported by cDNA: gi_12248028, supported by gi_15294233 [Arabidopsis thaliana] >gi|25407006|pir||A86213
  misc_feature (1)..(180): Homolog of NCBI NO: 34906084 NR Description: putative legumin-like protein [Oryza sativa
  misc_feature (1)..(180): Homolog of NCBI NO: 37730876 NR Description: legumin-like protein [Zea mays]
  misc_feature (1)..(178): Homolog of NCBI NO: 28950670 NR Description: legumin-like protein [Zea mays]
  misc_feature (1)..(180): Homolog of NCBI NO: 28950668 NR Description: legumin-like protein [Zea mays]
  misc_feature (1)..(179): Homolog of NCBI NO: 949869 NR Description: legumin; 11S-globulin [Ginkgo biloba]
  misc_feature (22)..(179): Homolog of NCBI NO: 1084298 NR Description: legumin-like storage protein - Douglas fir
  misc_feature (17)..(178): Homolog of NCBI NO: 629767 NR Description: 11S globulin - oat >gi|472867|emb|CAA52764.1| 11S
MPEPKKGDRKGFVLNCLEAPLDVDIKDGGRVVVLNTKNLPLVGEVGFGADLVRIDGHSMCSPGFSCDSALQVTYIVGGSGRVQIVGADGKRVLETHVKAGVLFIVPRFFVVSKIADSDGLSWFSIVTTPDPIFTHLAGRTSVWKALSPEVLQAAFKVDPEVEKAFRSKRTSDAIFFSPSN

SEQ ID NO: 96751 - DNA, 1591 bp, Arabidopsis thaliana
  misc_feature (1)..(1591): Ceres Seq. ID no. 12734633
  misc_feature: MA Experiment ID: 20000173 Result: Down-regulated in Transcription
  misc_feature: MA Experiment 20000173 PARAMETER Experiment Name: At_42deg_Heat_P Parameter: Age (day) Value: 14
  misc_feature: MA Experiment 20000173 PARAMETER Experiment Name: At_42deg_Heat_P Parameter: Organism Value: A. thaliana
  misc_feature: MA Experiment 20000173 PARAMETER Experiment Name: At_42deg_Heat_P Parameter: Plant Line Value: WS
  misc_feature: MA Experiment 20000173 PARAMETER Experiment Name: At_42deg_Heat_P Parameter: Temperature (deg C) Value: 42 vs. 22
  misc_feature: MA Experiment 20000173 PARAMETER Experiment Name: At_42deg_Heat_P Parameter: Timepoint (hr) Value: 6
  misc_feature: MA Experiment 20000173 PARAMETER Experiment Name: At_42deg_Heat_P Parameter: Tissue Value: Aerial
  misc_feature: MA Experiment ID: 20000182 Result: Up-regulated in Transcription
  misc_feature: MA Experiment 20000182 PARAMETER Experiment Name: At_2mM_SA_P Parameter: Age (day) Value: 14
  misc_feature: MA Experiment 20000182 PARAMETER Experiment Name: At_2mM_SA_P Parameter: Organism Value: A. thaliana
  misc_feature: MA Experiment 20000182 PARAMETER Experiment Name: At_2mM_SA_P Parameter: Plant Line Value: WS
  misc_feature: MA Experiment 20000182 PARAMETER Experiment Name: At_2mM_SA_P Parameter: Timepoint (hr) Value: 6
  misc_feature: MA Experiment 20000182 PARAMETER Experiment Name: At_2mM_SA_P Parameter: Tissue Value: Aerial
  misc_feature: MA Experiment 20000182 PARAMETER Experiment Name: At_2mM_SA_P Parameter: Treatment Value: 2mM SA vs. No Treatment
  misc_feature: MA Experiment ID: 20000184 Result: Down-regulated in Transcription
  misc_feature: MA Experiment 20000184 PARAMETER Experiment Name: At_Shoots__P Parameter: Age (day) Value: 7
  misc_feature: MA Experiment 20000184 PARAMETER Experiment Name: At_Shoots__P Parameter: Tissue Value: Shoots vs. Whole Plant
  misc_feature: MA Experiment ID: 20000234 Result: Down-regulated in Transcription
  misc_feature: MA Experiment 20000234 PARAMETER Experiment Name: At_Siliques_P Parameter: Age (day) Value: 21
  misc_feature: MA Experiment 20000234 PARAMETER Experiment Name: At_Siliques_P Parameter: Organism Value: A. thaliana
  misc_feature: MA Experiment 20000234 PARAMETER Experiment Name: At_Siliques_P Parameter: Plant Line Value: WS
  misc_feature: MA Experiment 20000234 PARAMETER Experiment Name: At_Siliques_P Parameter: Tissue Value: Less Than 5mm Siliques vs. Whole Plant
  misc_feature: MA Experiment ID: 20000264 Result: Down-regulated in Transcription
  misc_feature: MA Experiment 20000264 PARAMETER Experiment Name: At_Open_Flower_P Parameter: Age (day) Value: 21
  misc_feature: MA Experiment 20000264 PARAMETER Experiment Name: At_Open_Flower_P Parameter: Plant Line Value: WS
  misc_feature: MA Experiment 20000264 PARAMETER Experiment Name: At_Open_Flower_P Parameter: Tissue Value: Open Flower vs. Whole Plant
  misc_feature: MA Experiment ID: 20000496 Result: Up-regulated in Transcription
  misc_feature: MA Experiment 20000496 PARAMETER Experiment Name: At_Guard_Cells_P Parameter: Harvest Date Value: 7/19/2002
  misc_feature: MA Experiment 20000496 PARAMETER Experiment Name: At_Guard_Cells_P Parameter: Organism Value: Canola
  misc_feature: MA Experiment 20000496 PARAMETER Experiment Name: At_Guard_Cells_P Parameter: Tissue Value: Guard Cells vs. Leaves
  misc_feature: MA Experiment ID: 20000794 Result: Down-regulated in Transcription
  misc_feature: MA Experiment 20000794 PARAMETER Experiment Name: At_Petals_P Parameter: Age (day) Value: 23-25 days
  misc_feature: MA Experiment 20000794 PARAMETER Experiment Name: At_Petals_P Parameter: Plant Line Value: WS
  misc_feature: MA Experiment 20000794 PARAMETER Experiment Name: At_Petals_P Parameter: Tissue Value: Petals vs. Whole plant
  misc_feature: MA Experiment ID: 20001557 Result: Down-regulated in Transcription
  misc_feature: MA Experiment 20001557 PARAMETER Experiment Name: At_Drought_Soil_Dry_P Parameter: Age (day) Value: 27
  misc_feature: MA Experiment 20001557 PARAMETER Experiment Name: At_Drought_Soil_Dry_P Parameter: Organism Value: A. thaliana
  misc_feature: MA Experiment 20001557 PARAMETER Experiment Name: At_Drought_Soil_Dry_P Parameter: Plant Line Value: WS
  misc_feature: MA Experiment 20001557 PARAMETER Experiment Name: At_Drought_Soil_Dry_P Parameter: Post Timepoint (hr) Value: 3
  misc_feature: MA Experiment 20001557 PARAMETER Experiment Name: At_Drought_Soil_Dry_P Parameter: Post-Treatment Value: Re-Water vs. No Drought
  misc_feature: MA Experiment 20001557 PARAMETER Experiment Name: At_Drought_Soil_Dry_P Parameter: Timepoint (day) Value: 13
  misc_feature: MA Experiment 20001557 PARAMETER Experiment Name: At_Drought_Soil_Dry_P Parameter: Treatment Value: Drought vs. No Drought
  misc_feature: MA Experiment ID: 20001558 Result: Down-regulated in Transcription
  misc_feature: MA Experiment 20001558 PARAMETER Experiment Name: At_Drought_Soil_Dry_P Parameter: Age (day) Value: 27
  misc_feature: MA Experiment 20001558 PARAMETER Experiment Name: At_Drought_Soil_Dry_P Parameter: Organism Value: A. thaliana
  misc_feature: MA Experiment 20001558 PARAMETER Experiment Name: At_Drought_Soil_Dry_P Parameter: Plant Line Value: WS
  misc_feature: MA Experiment 20001558 PARAMETER Experiment Name: At_Drought_Soil_Dry_P Parameter: Post Timepoint (hr) Value: 6
  misc_feature: MA Experiment 20001558 PARAMETER Experiment Name: At_Drought_Soil_Dry_P Parameter: Post-Treatment Value: Re-Water vs. No Drought
  misc_feature: MA Experiment 20001558 PARAMETER Experiment Name: At_Drought_Soil_Dry_P Parameter: Timepoint (day) Value: 13
  misc_feature: MA Experiment 20001558 PARAMETER Experiment Name: At_Drought_Soil_Dry_P Parameter: Treatment Value: Drought vs. No Drought
  misc_feature: MA Experiment ID: 20001904 Result: Down-regulated in Transcription
  misc_feature: MA Experiment 20001904 PARAMETER Experiment Name: At_Drought_Reproduction_P Parameter: Age (day) Value: 37
  misc_feature: MA Experiment 20001904 PARAMETER Experiment Name: At_Drought_Reproduction_P Parameter: Organism Value: A. thaliana
  misc_feature: MA Experiment 20001904 PARAMETER Experiment Name: At_Drought_Reproduction_P Parameter: Plant Line Value: WS
  misc_feature: MA Experiment 20001904 PARAMETER Experiment Name: At_Drought_Reproduction_P Parameter: Timepoint (day) Value: 7
  misc_feature: MA Experiment 20001904 PARAMETER Experiment Name: At_Drought_Reproduction_P Parameter: Tissue Value: Rosettes
  misc_feature: MA Experiment 20001904 PARAMETER Experiment Name: At_Drought_Reproduction_P Parameter: Treatment Value: Drought vs. No Drought
  misc_feature: MA Experiment ID: 20001905 Result: Down-regulated in Transcription
  misc_feature: MA Experiment 20001905 PARAMETER Experiment Name: At_Drought_Reproduction_P Parameter: Age (day) Value: 40
  misc_feature: MA Experiment 20001905 PARAMETER Experiment Name: At_Drought_Reproduction_P Parameter: Organism Value: A. thaliana
  misc_feature: MA Experiment 20001905 PARAMETER Experiment Name: At_Drought_Reproduction_P Parameter: Plant Line Value: WS
  misc_feature: MA Experiment 20001905 PARAMETER Experiment Name: At_Drought_Reproduction_P Parameter: Timepoint (day) Value: 10
  misc_feature: MA Experiment 20001905 PARAMETER Experiment Name: At_Drought_Reproduction_P Parameter: Tissue Value: Rosettes
  misc_feature: MA Experiment 20001905 PARAMETER Experiment Name: At_Drought_Reproduction_P Parameter: Treatment Value: Drought vs. No Drought
gtcaccatttttattttcgttgactcggtcggatttggggaagaagaagaacatgaagtgttttcacttcaccaatggcgacaagagaacaacaacaacaatcgaagaaggagtaggaggaggagacagtgttgtttcaagagcttcaagactctcatgggctcgttctctaagcgtagcatcatccaccacttcagacccaactcgccggtccgagtttgactcagactggagtttctcaccggaaagacttacttttcccaagccattaagtcaacgttggatcggtggacttgttcctgagaatgatctaaaggtgtttactttcaaagagctgaaaatagctactaaaggtttcaatagaggtcttttgattggcgaaggagggtttggttgcgtttatagaggtgttgttgatgtttcagactctaatggttttgattcgaagattaatgttgctgttaaacagcttaatcgtcaaggtttacagtgttcaggggcataaggaatggatcaatgaggtgaattttctaggagtagtgaatcatccaaatcttgtgaagttagttgggtattgtgctgatgatgatgaaagagggatgcaaaggcttctagtctatgaacttatgtgtaataagagcttggaggatcatctcgtaggccgagttgtgtcggtatctctaccgtggatgatgaggttgaagattgcgcaagatgctgctcaaggcttagcttatcttcatgaagaaatggattttcagttgatatttcgagatttcaagtcttcaaacatcttgcttgatgagagattcggtgcaaagctctcggattttggattagctaggcaaggacctcctgaaggacttggtcatgtctcaacttcagttgtaggtacggttggttacgcagctcctgagtatgtacaaaccgggaaattgacggcaaagagtgatgtatggagctttggggtagtgttgtatgaactgatcacgggaagacgagcagtggatagaaatcgacctcgaggtgaacagaagcttttagaatgggtgaagccttatgtatcagactcgaagaagttccatctgattgtcgatccacggctcgaaggccagtactactgtatgaagtctgttcaaagagtagctgctttagcaaacaaatgtctaatgaagcaaccgaaatctcggcctaaaatgagcgaagtcgtatcactacttggacgcatcatcgatgaagaagcggaaaacgttcctccgccagttgctgatgaaacagaagagataatcaaagctgagctcaatggagagagtgagcctgagctaaagaagcaaggtagtagttatcgtaagaaggttcttgatcttagggataagatgaacttaaacaagtcgctttcgaagctagactggcgaaactggacaccaggactggtcagaacatggtagtagaaatagtgtcttcactgtatataaacttcttaagcatttgcttatgtatatgtttgaaagcatctttctttgttcttatttcttctttacatgtaacactaacagagcttgaagttgaagacaatgagatcatttatact

SEQ ID NO: 96752 - protein, 343 aa, Arabidopsis thaliana
  peptide (1)..(343): Ceres Seq. ID no. 12734634
  misc_feature (26)..(343): Homolog of NCBI NO: 7488278 NR Description: probable protein kinase [imported] - Arabidopsis >gi|3461836|gb|AAC33222.1| putative protein kinase [Arabidopsis >gi|20197438|gb|AAM15076.1| putative protein kinase [Arabidopsis
  misc_feature (1)..(343): Homolog of NCBI NO: 30684071 NR Description: protein kinase family [Arabidopsis thaliana]
  misc_feature (26)..(342): Homolog of NCBI NO: 7248457 NR Description: protein serine/threonine kinase [Lophopyrum >gi|13022177|gb|AAK11674.1|AF339747_1 protein kinase [Lophopyrum
  misc_feature (26)..(280): Homolog of NCBI NO: 30687780 NR Description: protein kinase, putative [Arabidopsis thaliana]
  misc_feature (26)..(280): Homolog of NCBI NO: 28416693 NR Description: At2g39110 [Arabidopsis thaliana]
  misc_feature (26)..(280): Homolog of NCBI NO: 25287613 NR Description: probable protein kinase [imported] - Arabidopsis >gi|3928095|gb|AAC79621.1| putative protein kinase [Arabidopsis
  misc_feature (26)..(281): Homolog of NCBI NO: 15232764 NR Description: putative protein kinase; protein id: At3g09830.1, by cDNA: gi_20268726 [Arabidopsis thaliana] putative protein kinase [Arabidopsis thaliana]
  misc_feature (26)..(342): Homolog of NCBI NO: 37534774 NR Description: putative serine/threonine kinase [Oryza sativa
  misc_feature (26)..(316): Homolog of NCBI NO: 15242720 NR Description: putative protein; protein id: At5g03320.1
  misc_feature (26)..(311): Homolog of NCBI NO: 15238002 NR Description: protein serine threonine kinase-like; protein id:
MFQTLMVLIRRLMLLLNSLIVKVYSVQGHKEWINEVNFLGVVNHPNLVKLVGYCADDDERGMQRLLVYELMCNKSLEDHLVGRVVSVSLPWMMRLKIAQDAAQGLAYLHEEMDFQLIFRDFKSSNILLDERFGAKLSDFGLARQGPPEGLGHVSTSVVGTVGYAAPEYVQTGKLTAKSDVWSFGVVLYELITGRRAVDRNRPRGEQKLLEWVKPYVSDSKKFHLIVDPRLEGQYYCMKSVQRVAALANKCLMKQPKSRPKMSEVVSLLGRIIDEEAENVPPPVADETEEIIKAELNGESEPELKKQGSSYRKKVLDLRDKMNLNKSLSKLDWRNWTPGLVRTW

SEQ ID NO: 96753 - protein, 338 aa, Arabidopsis thaliana
  peptide (1)..(338): Ceres Seq. ID no. 12734635
  misc_feature (21)..(338): Homolog of NCBI NO: 7488278 NR Description: probable protein kinase [imported] - Arabidopsis >gi|3461836|gb|AAC33222.1| putative protein kinase [Arabidopsis >gi|20197438|gb|AAM15076.1| putative protein kinase [Arabidopsis
  misc_feature (1)..(338): Homolog of NCBI NO: 30684071 NR Description: protein kinase family [Arabidopsis thaliana]
  misc_feature (21)..(337): Homolog of NCBI NO: 7248457 NR Description: protein serine/threonine kinase [Lophopyrum >gi|13022177|gb|AAK11674.1|AF339747_1 protein kinase [Lophopyrum
  misc_feature (21)..(275): Homolog of NCBI NO: 30687780 NR Description: protein kinase, putative [Arabidopsis thaliana]
  misc_feature (21)..(275): Homolog of NCBI NO: 28416693 NR Description: At2g39110 [Arabidopsis thaliana]
  misc_feature (21)..(275): Homolog of NCBI NO: 25287613 NR Description: probable protein kinase [imported] - Arabidopsis >gi|3928095|gb|AAC79621.1| putative protein kinase [Arabidopsis
  misc_feature (21)..(276): Homolog of NCBI NO: 15232764 NR Description: putative protein kinase; protein id: At3g09830.1, by cDNA: gi_20268726 [Arabidopsis thaliana] putative protein kinase [Arabidopsis thaliana]
  misc_feature (21)..(337): Homolog of NCBI NO: 37534774 NR Description: putative serine/threonine kinase [Oryza sativa
  misc_feature (21)..(311): Homolog of NCBI NO: 15242720 NR Description: putative protein; protein id: At5g03320.1
  misc_feature (21)..(306): Homolog of NCBI NO: 15238002 NR Description: protein serine threonine kinase-like; protein id:
MVLIRRLMLLLNSLIVKVYSVQGHKEWINEVNFLGVVNHPNLVKLVGYCADDDERGMQRLLVYELMCNKSLEDHLVGRVVSVSLPWMMRLKIAQDAAQGLAYLHEEMDFQLIFRDFKSSNILLDERFGAKLSDFGLARQGPPEGLGHVSTSVVGTVGYAAPEYVQTGKLTAKSDVWSFGVVLYELITGRRAVDRNRPRGEQKLLEWVKPYVSDSKKFHLIVDPRLEGQYYCMKSVQRVAALANKCLMKQPKSRPKMSEVVSLLGRIIDEEAENVPPPVADETEEIIKAELNGESEPELKKQGSSYRKKVLDLRDKMNLNKSLSKLDWRNWTPGLVRTW

SEQ ID NO: 96754 - protein, 331 aa, Arabidopsis thaliana
  peptide (1)..(331): Ceres Seq. ID no. 12734636
  misc_feature (14)..(331): Homolog of NCBI NO: 7488278 NR Description: probable protein kinase [imported] - Arabidopsis >gi|3461836|gb|AAC33222.1| putative protein kinase [Arabidopsis >gi|20197438|gb|AAM15076.1| putative protein kinase [Arabidopsis
  misc_feature (1)..(331): Homolog of NCBI NO: 30684071 NR Description: protein kinase family [Arabidopsis thaliana]
  misc_feature (14)..(330): Homolog of NCBI NO: 7248457 NR Description: protein serine/threonine kinase [Lophopyrum >gi|13022177|gb|AAK11674.1|AF339747_1 protein kinase [Lophopyrum
  misc_feature (14)..(268): Homolog of NCBI NO: 30687780 NR Description: protein kinase, putative [Arabidopsis thaliana]
  misc_feature (14)..(268): Homolog of NCBI NO: 28416693 NR Description: At2g39110 [Arabidopsis thaliana]
  misc_feature (14)..(268): Homolog of NCBI NO: 25287613 NR Description: probable protein kinase [imported] - Arabidopsis >gi|3928095|gb|AAC79621.1| putative protein kinase [Arabidopsis
  misc_feature (14)..(269): Homolog of NCBI NO: 15232764 NR Description: putative protein kinase; protein id: At3g09830.1, by cDNA: gi_20268726 [Arabidopsis thaliana] putative protein kinase [Arabidopsis thaliana]
  misc_feature (14)..(330): Homolog of NCBI NO: 37534774 NR Description: putative serine/threonine kinase [Oryza sativa
  misc_feature (14)..(304): Homolog of NCBI NO: 15242720 NR Description: putative protein; protein id: At5g03320.1
  misc_feature (14)..(299): Homolog of NCBI NO: 15238002 NR Description: protein serine threonine kinase-like; protein id:
MLLLNSLIVKVYSVQGHKEWINEVNFLGVVNHPNLVKLVGYCADDDERGMQRLLVYELMCNKSLEDHLVGRVVSVSLPWMMRLKIAQDAAQGLAYLHEEMDFQLIFRDFKSSNILLDERFGAKLSDFGLARQGPPEGLGHVSTSVVGTVGYAAPEYVQTGKLTAKSDVWSFGVVLYELITGRRAVDRNRPRGEQKLLEWVKPYVSDSKKFHLIVDPRLEGQYYCMKSVQRVAALANKCLMKQPKSRPKMSEVVSLLGRIIDEEAENVPPPVADETEEIIKAELNGESEPELKKQGSSYRKKVLDLRDKMNLNKSLSKLDWRNWTPGLVRTW

SEQ ID NO: 96755 - DNA, 2163 bp, Arabidopsis thaliana
  misc_feature (1)..(2163): Ceres Seq. ID no. 12734644
  misc_feature: MA Experiment ID: 20000171 Result: Up-regulated in Transcription
  misc_feature: MA Experiment 20000171 PARAMETER Experiment Name: At_42deg_Heat_P Parameter: Age (day) Value: 14
  misc_feature: MA Experiment 20000171 PARAMETER Experiment Name: At_42deg_Heat_P Parameter: Organism Value: A. thaliana
  misc_feature: MA Experiment 20000171 PARAMETER Experiment Name: At_42deg_Heat_P Parameter: Plant Line Value: WS
  misc_feature: MA Experiment 20000171 PARAMETER Experiment Name: At_42deg_Heat_P Parameter: Temperature (deg C) Value: 42 vs. 22
  misc_feature: MA Experiment 20000171 PARAMETER Experiment Name: At_42deg_Heat_P Parameter: Timepoint (hr) Value: 1
  misc_feature: MA Experiment 20000171 PARAMETER Experiment Name: At_42deg_Heat_P Parameter: Tissue Value: Aerial
atggcaatggagaagtctagctcaaagtacagaacccagttctggtacgtggcaatggcctcattcctcctttggcttgtcttgctttacctttttagttcttccgctaaaaccgttcataaccacgagagattgttccggcaagaaaatatcatcgatctccctgtcgaaaacgtcccacaaaaccacgaacctgatgaagctcctgtcgttaacgttgtctctgaggacatttccgttgataacagctctcttcctgtttctgtcgattctcctccggatgatcagatgtcagaagacaagaaggttgtgactgatctcgttgaagaacttgagaaagaaagggttgaaaatgagaagaagagagttgattcggttgtaattggacggtcatctaaggcaaggagaggacatcgagagccacgaaaggcgagatcttcgggtagattggaggcagagaagaaaagggttcgtcgtaatgatgctgatgagagcaatgcggagaatagtgatgagaatcatcaagcattagacaaagaaccgaactttttcgaggctaagaaagacgtggaaccaaagaaagcgctagttgatgataatgacgacgatcttgagaccaagagaggcaaggagttgccgaatgattcttccagtaatgttgttgaagatgataatgacgacgatcttgagaccaagaaaggcaaggataacatctctaaatctgaaccaaaaactcagagaaattttgtattgaataagaataatacttccaaggcgaaaaacagagtaatttccaagagaaaccaacctagtagagtcggtaaagttatgttacggccaagagaaacgcgaagtaacgatccatgtaaaggaaaatatgtgtatatgcatgaggtgccagctttgtttaacgaagagcttctcaagaactgttggacattgagcaggtggactgatatgtgcgagttaacgtcgaatttcgggttaggccctcgtctaccaaacatggaaggagtttctggttggtatgccacaaaccagttcacattggaagtaatattccacaacaggatgaagcagtacaagtgcttgaccaaagactcgtctttagcttctgcggtgtatgttccttactatccgggtttagacttgatgcggtttttgtggggaccgttccctttcatgagagatgctgccgcgcttgatctcatgaagtggctgagggagagtcaggagtggaagaggatggacggacgagatcattttatggtggctggtcgaaccacttgggactttatgcgtacaccagagaatgaatccgattggggaaataggttaatgatattaccggaagtaagaaacatgacgatgctactaatcgaatcaagcccatggaactaccacgggttcgcggttccttacccgacctatttccacccttcaacatacgcagaaatcatccaatggcagatgagaatgagaagaattaatcgtcgttacttattctcatttgtcggtgccccacgaccaaacctcggtgacagcataagaaccgagatcatggaccaatgcaaagcttcaaaacgaaaatgcaagcttctagaatgcatatcgggttctcaaaaatgctacaaacccgaccaaatcatgaaattctttttgagctcaacgttctgtcttcaaccaccaggtgactcatacacacgtcgctccacttttgactccatcttagcaggttgtataccagttttctttcatccgggatcagcttatgcgcaatacatttggcatttaccgaaagatatcgcgaaatactctgtttttattccggagaaaaatgtgaaagaaggtaaagtgagtatagagaatgttttgagtagaataccgaggacaaaagttttcgctatgagagaacaagtgataagactgataccgaggttaatgtattttcacccgtcgagtaagagtgaagacacgggaaggtttgaagatgcattcgatgtcgcggtggaaggagttttggaaagagtggaggggttaaggaagaggatagaggaaggcaaggaggagatttttgattttccggagcagtattcttggaaatataatgtgtttgggaatgttgagaggcatgagtgggatccttacttcgatcggccttaa

SEQ ID NO: 96756 - protein, 720 aa, Arabidopsis thaliana
  peptide (1)..(720): Ceres Seq. ID no. 12734645
  misc_feature (294)..(640): Pfam Name: Exostosin family Pfam Description: Exostosin family
  misc_feature (278)..(720): Homolog of NCBI NO: 27497206 NR Description: Unknown protein [Oryza sativa (japonica
  misc_feature (250)..(720): Homolog of NCBI NO: 25411977 NR Description: hypothetical protein At2g20370 [imported] - thaliana >gi|4512698|gb|AAD21751.1| unknown protein [Arabidopsis
  misc_feature (250)..(720): Homolog of NCBI NO: 30680972 NR Description: expressed protein [Arabidopsis thaliana]
  misc_feature (280)..(702): Homolog of NCBI NO: 29824391 NR Description: unknown protein [Arabidopsis thaliana]
  misc_feature (248)..(689): Homolog of NCBI NO: 15225735 NR Description: hypothetical protein; protein id: At2g32750.1
  misc_feature (287)..(717): Homolog of NCBI NO: 37535066 NR Description: hypothetical protein [Oryza sativa (japonica group)] >gi|22165082|gb|AAM93699.1| hypothetical protein [Oryza
  misc_feature (287)..(677): Homolog of NCBI NO: 27497203 NR Description: Hypothetical protein [Oryza sativa (japonica
  misc_feature (289)..(684): Homolog of NCBI NO: 27497204 NR Description: Hypothetical protein [Oryza sativa (japonica
  misc_feature (287)..(717): Homolog of NCBI NO: 37535064 NR Description: putative exostosin family protein [Oryza sativa
  misc_feature (257)..(682): Homolog of NCBI NO: 15225165 NR Description: Exostosin family; protein id: At2g31990.1
MAMEKSSSKYRTQFWYVAMASFLLWLVLLYLFSSSAKTVHNHERLFRQENIIDLPVENVPQNHEPDEAPVVNVVSEDISVDNSSLPVSVDSPPDDQMSEDKKVVTDLVEELEKERVENEKKRVDSVVIGRSSKARRGHREPRKARSSGRLEAEKKRVRRNDADESNAENSDENHQALDKEPNFFEAKKDVEPKKALVDDNDDDLETKRGKELPNDSSSNVVEDDNDDDLETKKGKDNISKSEPKTQRNFVLNKNNTSKAKNRVISKRNQPSRVGKVMLRPRETRSNDPCKGKYVYMHEVPALFNEELLKNCWTLSRWTDMCELTSNFGLGPRLPNMEGVSGWYATNQFTLEVIFHNRMKQYKCLTKDSSLASAVYVPYYPGLDLMRFLWGPFPFMRDAAALDLMKWLRESQEWKRMDGRDHFMVAGRTTWDFMRTPENESDWGNRLMILPEVRNMTMLLIESSPWNYHGFAVPYPTYFHPSTYAEIIQWQMRMRRINRRYLFSFVGAPRPNLGDSIRTEIMDQCKASKRKCKLLECISGSQKCYKPDQIMKFFLSSTFCLQPPGDSYTRRSTFDSILAGCIPVFFHPGSAYAQYIWHLPKDIAKYSVFIPEKNVKEGKVSIENVLSRIPRTKVFAMREQVIRLIPRLMYFHPSSKSEDTGRFEDAFDVAVEGVLERVEGLRKRIEEGKEEIFDFPEQYSWKYNVFGNVERHEWDPYFDRP

SEQ ID NO: 96757 - protein, 718 aa, Arabidopsis thaliana
  peptide (1)..(718): Ceres Seq. ID no. 12734646
  misc_feature (292)..(638): Pfam Name: Exostosin family Pfam Description: Exostosin family
  misc_feature (276)..(718): Homolog of NCBI NO: 27497206 NR Description: Unknown protein [Oryza sativa (japonica
  misc_feature (248)..(718): Homolog of NCBI NO: 25411977 NR Description: hypothetical protein At2g20370 [imported] - thaliana >gi|4512698|gb|AAD21751.1| unknown protein [Arabidopsis
  misc_feature (248)..(718): Homolog of NCBI NO: 30680972 NR Description: expressed protein [Arabidopsis thaliana]
  misc_feature (278)..(700): Homolog of NCBI NO: 29824391 NR Description: unknown protein [Arabidopsis thaliana]
  misc_feature (246)..(687): Homolog of NCBI NO: 15225735 NR Description: hypothetical protein; protein id: At2g32750.1
  misc_feature (285)..(715): Homolog of NCBI NO: 37535066 NR Description: hypothetical protein [Oryza sativa (japonica group)] >gi|22165082|gb|AAM93699.1| hypothetical protein [Oryza
  misc_feature (285)..(675): Homolog of NCBI NO: 27497203 NR Description: Hypothetical protein [Oryza sativa (japonica
  misc_feature (287)..(682): Homolog of NCBI NO: 27497204 NR Description: Hypothetical protein [Oryza sativa (japonica
  misc_feature (285)..(715): Homolog of NCBI NO: 37535064 NR Description: putative exostosin family protein [Oryza sativa
  misc_feature (255)..(680): Homolog of NCBI NO: 15225165 NR Description: Exostosin family; protein id: At2g31990.1
MEKSSSKYRTQFWYVAMASFLLWLVLLYLFSSSAKTVHNHERLFRQENIIDLPVENVPQNHEPDEAPVVNVVSEDISVDNSSLPVSVDSPPDDQMSEDKKVVTDLVEELEKERVENEKKRVDSVVIGRSSKARRGHREPRKARSSGRLEAEKKRVRRNDADESNAENSDENHQALDKEPNFFEAKKDVEPKKALVDDNDDDLETKRGKELPNDSSSNVVEDDNDDDLETKKGKDNISKSEPKTQRNFVLNKNNTSKAKNRVISKRNQPSRVGKVMLRPRETRSNDPCKGKYVYMHEVPALFNEELLKNCWTLSRWTDMCELTSNFGLGPRLPNMEGVSGWYATNQFTLEVIFHNRMKQYKCLTKDSSLASAVYVPYYPGLDLMRFLWGPFPFMRDAAALDLMKWLRESQEWKRMDGRDHFMVAGRTTWDFMRTPENESDWGNRLMILPEVRNMTMLLIESSPWNYHGFAVPYPTYFHPSTYAEIIQWQMRMRRINRRYLFSFVGAPRPNLGDSIRTEIMDQCKASKRKCKLLECISGSQKCYKPDQIMKFFLSSTFCLQPPGDSYTRRSTFDSILAGCIPVFFHPGSAYAQYIWHLPKDIAKYSVFIPEKNVKEGKVSIENVLSRIPRTKVFAMREQVIRLIPRLMYFHPSSKSEDTGRFEDAFDVAVEGVLERVEGLRKRIEEGKEEIFDFPEQYSWKYNVFGNVERHEWDPYFDRP

SEQ ID NO: 96758 - protein, 702 aa, Arabidopsis thaliana
  peptide (1)..(702): Ceres Seq. ID no. 12734647
  misc_feature (276)..(622): Pfam Name: Exostosin family Pfam Description: Exostosin family
  misc_feature (260)..(702): Homolog of NCBI NO: 27497206 NR Description: Unknown protein [Oryza sativa (japonica
  misc_feature (232)..(702): Homolog of NCBI NO: 25411977 NR Description: hypothetical protein At2g20370 [imported] - thaliana >gi|4512698|gb|AAD21751.1| unknown protein [Arabidopsis
  misc_feature (232)..(702): Homolog of NCBI NO: 30680972 NR Description: expressed protein [Arabidopsis thaliana]
  misc_feature (262)..(684): Homolog of NCBI NO: 29824391 NR Description: unknown protein [Arabidopsis thaliana]
  misc_feature (230)..(671): Homolog of NCBI NO: 15225735 NR Description: hypothetical protein; protein id: At2g32750.1
  misc_feature (269)..(699): Homolog of NCBI NO: 37535066 NR Description: hypothetical protein [Oryza sativa (japonica group)] >gi|22165082|gb|AAM93699.1| hypothetical protein [Oryza
  misc_feature (269)..(659): Homolog of NCBI NO: 27497203 NR Description: Hypothetical protein [Oryza sativa (japonica
  misc_feature (271)..(666): Homolog of NCBI NO: 27497204 NR Description: Hypothetical protein [Oryza sativa (japonica
  misc_feature (269)..(699): Homolog of NCBI NO: 37535064 NR Description: putative exostosin family protein [Oryza sativa
  misc_feature (239)..(664): Homolog of NCBI NO: 15225165 NR Description: Exostosin family; protein id: At2g31990.1
MASFLLWLVLLYLFSSSAKTVHNHERLFRQENIIDLPVENVPQNHEPDEAPVVNVVSEDISVDNSSLPVSVDSPPDDQMSEDKKVVTDLVEELEKERVENEKKRVDSVVIGRSSKARRGHREPRKARSSGRLEAEKKRVRRNDADESNAENSDENHQALDKEPNFFEAKKDVEPKKALVDDNDDDLETKRGKELPNDSSSNVVEDDNDDDLETKKGKDNISKSEPKTQRNFVLNKNNTSKAKNRVISKRNQPSRVGKVMLRPRETRSNDPCKGKYVYMHEVPALFNEELLKNCWTLSRWTDMCELTSNFGLGPRLPNMEGVSGWYATNQFTLEVIFHNRMKQYKCLTKDSSLASAVYVPYYPGLDLMRFLWGPFPFMRDAAALDLMKWLRESQEWKRMDGRDHFMVAGRTTWDFMRTPENESDWGNRLMILPEVRNMTMLLIESSPWNYHGFAVPYPTYFHPSTYAEIIQWQMRMRRINRRYLFSFVGAPRPNLGDSIRTEIMDQCKASKRKCKLLECISGSQKCYKPDQIMKFFLSSTFCLQPPGDSYTRRSTFDSILAGCIPVFFHPGSAYAQYIWHLPKDIAKYSVFIPEKNVKEGKVSIENVLSRIPRTKVFAMREQVIRLIPRLMYFHPSSKSEDTGRFEDAFDVAVEGVLERVEGLRKRIEEGKEEIFDFPEQYSWKYNVFGNVERHEWDPYFDRP

SEQ ID NO: 96759 - DNA, 879 bp, Arabidopsis thaliana
  misc_feature (1)..(879): Ceres Seq. ID no. 12734652
  misc_feature: MA Experiment ID: 20000173 Result: Down-regulated in Transcription
  misc_feature: MA Experiment 20000173 PARAMETER Experiment Name: At_42deg_Heat_P Parameter: Age (day) Value: 14
  misc_feature: MA Experiment 20000173 PARAMETER Experiment Name: At_42deg_Heat_P Parameter: Organism Value: A. thaliana
  misc_feature: MA Experiment 20000173 PARAMETER Experiment Name: At_42deg_Heat_P Parameter: Plant Line Value: WS
  misc_feature: MA Experiment 20000173 PARAMETER Experiment Name: At_42deg_Heat_P Parameter: Temperature (deg C) Value: 42 vs. 22
  misc_feature: MA Experiment 20000173 PARAMETER Experiment Name: At_42deg_Heat_P Parameter: Timepoint (hr) Value: 6
  misc_feature: MA Experiment 20000173 PARAMETER Experiment Name: At_42deg_Heat_P Parameter: Tissue Value: Aerial
  misc_feature: MA Experiment ID: 20000438 Result: Down-regulated in Transcription
  misc_feature: MA Experiment 20000438 PARAMETER Experiment Name: At_Shoots__P Parameter: Age (day) Value: 14
  misc_feature: MA Experiment 20000438 PARAMETER Experiment Name: At_Shoots__P Parameter: Tissue Value: Shoots vs. Whole Plant
  misc_feature: MA Experiment ID: 20000439 Result: Up-regulated in Transcription
  misc_feature: MA Experiment 20000439 PARAMETER Experiment Name: At_Roots__P Parameter: Age (day) Value: 14 vs. 21
  misc_feature: MA Experiment 20000439 PARAMETER Experiment Name: At_Roots__P Parameter: Organism Value: A. thaliana
  misc_feature: MA Experiment 20000439 PARAMETER Experiment Name: At_Roots__P Parameter: Tissue Value: Roots vs. Whole Plant
  misc_feature: MA Experiment ID: 20000794 Result: Up-regulated in Transcription
  misc_feature: MA Experiment 20000794 PARAMETER Experiment Name: At_Petals_P Parameter: Age (day) Value: 23-25 days
  misc_feature: MA Experiment 20000794 PARAMETER Experiment Name: At_Petals_P Parameter: Plant Line Value: WS
  misc_feature: MA Experiment 20000794 PARAMETER Experiment Name: At_Petals_P Parameter: Tissue Value: Petals vs. Whole plant
atggatggagatggttctagctttgagcagtttatcatgcctccttccgctctcgatcgtcttgcttctttgcatattgaatacccaatgctgtttcaactgagtaatgtttctgttgagaagacctcacattgtggtgtactagaattcactgcagacgaaggcctagtttacttgccatattggatgatgcaaaacatgtctcttgaagagggagacgttatgcaagttaagaatatcagcttggtaaaagggacttacatcaagctgcagcctcacactcaagatttcttggatatttccaacccaaaagccatcttggagactacgcttaggagttactcttgcttaaccacgggtgatacaattatggttccgtataacaacaagcaatattacatcaatgtggttgaggcaaaaccttcttcagctgtgagtattatcgaaacggattgtgaggttgattttgctcctcctcttgattacaaagaacctgagaagccacagaagttgactccttcaaacaaacgacctctccaagttaaagaagaagaagaacctgcaagcaaagttcccaaattcacgccgttcactggatcaggaaaacgtttagatggaaaagcacaaacacaaactgaaccagaagatacaaaacagcaagaaaagccgactgagaatgggaaagacgatgagaagttgtcagtcactacaccaaggcaaatatcaggaaagctcgtctttggttcaaacagcaaatcagctgcaaaagaaacagcgaaagttgatgatccaaagaacattgtgcaagagagctcaacaaaatccgatgaagctaagttcaaagtgttcacagggaagaaatactcactcaatggttaa

SEQ ID NO: 96760 - protein, 292 aa, Arabidopsis thaliana
  peptide (1)..(292): Ceres Seq. ID no. 12734653
  misc_feature (5)..(159): Pfam Name: Ubiquitin fusion degradation protein UFD1 Pfam Description: Ubiquitin fusion degradation protein UFD1
  misc_feature (1)..(292): Homolog of NCBI NO: 7488408 NR Description: probable ubiquitin fusion-degradation protein
  misc_feature (13)..(292): Homolog of NCBI NO: 30684115 NR Description: ubiquitin fusion degradation (UFD) protein,
  misc_feature (7)..(292): Homolog of NCBI NO: 21592947 NR Description: putative ubiquitin fusion-degradation protein
  misc_feature (7)..(292): Homolog of NCBI NO: 18399646 NR Description: putative ubiquitin fusion-degradation protein;
  misc_feature (7)..(292): Homolog of NCBI NO: 25347017 NR Description: probable ubiquitin fusion-degradation protein
  misc_feature (7)..(292): Homolog of NCBI NO: 18420341 NR Description: putative ubiquitin-dependent proteolytic protein; id: At4g38930.1, supported by cDNA: gi_16930496 [Arabidopsis >gi|16930497|gb|AAL31934.1|AF419602_1 AT4g38930/F19H22_30
  misc_feature (7)..(292): Homolog of NCBI NO: 7488221 NR Description: probable ubiquitin-dependent proteolytic protein -
  misc_feature (9)..(290): Homolog of NCBI NO: 38345534 NR Description: OSJNBa0020J04.9 [Oryza sativa (japonica
  misc_feature (10)..(262): Homolog of NCBI NO: 38540890 NR Description: Ubiquitin fusion degradation 1-like protein
  misc_feature (10)..(257): Homolog of NCBI NO: 16758158 NR Description: ubiquitin fusion degradation 1-like [Rattus
MDGDGSSFEQFIMPPSALDRLASLHIEYPMLFQLSNVSVEKTSHCGVLEFTADEGLVYLPYWMMQNMSLEEGDVMQVKNISLVKGTYIKLQPHTQDFLDISNPKAILETTLRSYSCLTTGDTIMVPYNNKQYYINVVEAKPSSAVSIIETDCEVDFAPPLDYKEPEKPQKLTPSNKRPLQVKEEEEPASKVPKFTPFTGSGKRLDGKAQTQTEPEDTKQQEKPTENGKDDEKLSVTTPRQISGKLVFGSNSKSAAKETAKVDDPKNIVQESSTKSDEAKFKVFTGKKYSLNG

SEQ ID NO: 96761 - protein, 280 aa, Arabidopsis thaliana
  peptide (1)..(280): Ceres Seq. ID no. 12734654
  misc_feature (1)..(147): Pfam Name: Ubiquitin fusion degradation protein UFD1 Pfam Description: Ubiquitin fusion degradation protein UFD1
  misc_feature (1)..(280): Homolog of NCBI NO: 7488408 NR Description: probable ubiquitin fusion-degradation protein
  misc_feature (1)..(280): Homolog of NCBI NO: 30684115 NR Description: ubiquitin fusion degradation (UFD) protein,
  misc_feature (1)..(280): Homolog of NCBI NO: 21592947 NR Description: putative ubiquitin fusion-degradation protein
  misc_feature (1)..(280): Homolog of NCBI NO: 18399646 NR Description: putative ubiquitin fusion-degradation protein;
  misc_feature (1)..(280): Homolog of NCBI NO: 25347017 NR Description: probable ubiquitin fusion-degradation protein
  misc_feature (1)..(280): Homolog of NCBI NO: 18420341 NR Description: putative ubiquitin-dependent proteolytic protein; id: At4g38930.1, supported by cDNA: gi_16930496 [Arabidopsis >gi|16930497|gb|AAL31934.1|AF419602_1 AT4g38930/F19H22_30
  misc_feature (1)..(280): Homolog of NCBI NO: 7488221 NR Description: probable ubiquitin-dependent proteolytic protein -
  misc_feature (1)..(278): Homolog of NCBI NO: 38345534 NR Description: OSJNBa0020J04.9 [Oryza sativa (japonica
  misc_feature (1)..(250): Homolog of NCBI NO: 38540890 NR Description: Ubiquitin fusion degradation 1-like protein
  misc_feature (1)..(245): Homolog of NCBI NO: 16758158 NR Description: ubiquitin fusion degradation 1-like [Rattus
MPPSALDRLASLHIEYPMLFQLSNVSVEKTSHCGVLEFTADEGLVYLPYWMMQNMSLEEGDVMQVKNISLVKGTYIKLQPHTQDFLDISNPKAILETTLRSYSCLTTGDTIMVPYNNKQYYINVVEAKPSSAVSIIETDCEVDFAPPLDYKEPEKPQKLTPSNKRPLQVKEEEEPASKVPKFTPFTGSGKRLDGKAQTQTEPEDTKQQEKPTENGKDDEKLSVTTPRQISGKLVFGSNSKSAAKETAKVDDPKNIVQESSTKSDEAKFKVFTGKKYSLNG

SEQ ID NO: 96762 - protein, 263 aa, Arabidopsis thaliana
  peptide (1)..(263): Ceres Seq. ID no. 12734655
  misc_feature (1)..(130): Pfam Name: Ubiquitin fusion degradation protein UFD1 Pfam Description: Ubiquitin fusion degradation protein UFD1
  misc_feature (1)..(263): Homolog of NCBI NO: 7488408 NR Description: probable ubiquitin fusion-degradation protein
  misc_feature (1)..(263): Homolog of NCBI NO: 30684115 NR Description: ubiquitin fusion degradation (UFD) protein,
  misc_feature (1)..(263): Homolog of NCBI NO: 21592947 NR Description: putative ubiquitin fusion-degradation protein
  misc_feature (1)..(263): Homolog of NCBI NO: 18399646 NR Description: putative ubiquitin fusion-degradation protein;
  misc_feature (1)..(263): Homolog of NCBI NO: 25347017 NR Description: probable ubiquitin fusion-degradation protein
  misc_feature (1)..(263): Homolog of NCBI NO: 18420341 NR Description: putative ubiquitin-dependent proteolytic protein; id: At4g38930.1, supported by cDNA: gi_16930496 [Arabidopsis >gi|16930497|gb|AAL31934.1|AF419602_1 AT4g38930/F19H22_30
  misc_feature (1)..(263): Homolog of NCBI NO: 7488221 NR Description: probable ubiquitin-dependent proteolytic protein -
  misc_feature (1)..(261): Homolog of NCBI NO: 38345534 NR Description: OSJNBa0020J04.9 [Oryza sativa (japonica
  misc_feature (1)..(233): Homolog of NCBI NO: 38540890 NR Description: Ubiquitin fusion degradation 1-like protein
  misc_feature (1)..(228): Homolog of NCBI NO: 16758158 NR Description: ubiquitin fusion degradation 1-like [Rattus
MLFQLSNVSVEKTSHCGVLEFTADEGLVYLPYWMMQNMSLEEGDVMQVKNISLVKGTYIKLQPHTQDFLDISNPKAILETTLRSYSCLTTGDTIMVPYNNKQYYINVVEAKPSSAVSIIETDCEVDFAPPLDYKEPEKPQKLTPSNKRPLQVKEEEEPASKVPKFTPFTGSGKRLDGKAQTQTEPEDTKQQEKPTENGKDDEKLSVTTPRQISGKLVFGSNSKSAAKETAKVDDPKNIVQESSTKSDEAKFKVFTGKKYSLNG

SEQ ID NO: 96763 - DNA, 1449 bp, Arabidopsis thaliana
  misc_feature (1)..(1449): Ceres Seq. ID no. 12734656
  misc_feature: MA Experiment ID: 20000166 Result: Up-regulated in Transcription
  misc_feature: MA Experiment 20000166 PARAMETER Experiment Name: At_100uM_ABA_P Parameter: Age (day) Value: 14
  misc_feature: MA Experiment 20000166 PARAMETER Experiment Name: At_100uM_ABA_P Parameter: Organism Value: A. thaliana
  misc_feature: MA Experiment 20000166 PARAMETER Experiment Name: At_100uM_ABA_P Parameter: Plant Line Value: WS
  misc_feature: MA Experiment 20000166 PARAMETER Experiment Name: At_100uM_ABA_P Parameter: Timepoint (hr) Value: 1
  misc_feature: MA Experiment 20000166 PARAMETER Experiment Name: At_100uM_ABA_P Parameter: Tissue Value: Aerial
  misc_feature: MA Experiment 20000166 PARAMETER Experiment Name: At_100uM_ABA_P Parameter: Treatment Value: 100uM ABA vs. No Treatment
  misc_feature: MA Experiment ID: 20000169 Result: Up-regulated in Transcription
  misc_feature: MA Experiment 20000169 PARAMETER Experiment Name: At_100uM_ABA_P Parameter: Age (day) Value: 14
  misc_feature: MA Experiment 20000169 PARAMETER Experiment Name: At_100uM_ABA_P Parameter: Organism Value: A. thaliana
  misc_feature: MA Experiment 20000169 PARAMETER Experiment Name: At_100uM_ABA_P Parameter: Plant Line Value: WS
  misc_feature: MA Experiment 20000169 PARAMETER Experiment Name: At_100uM_ABA_P Parameter: Timepoint (hr) Value: 6
  misc_feature: MA Experiment 20000169 PARAMETER Experiment Name: At_100uM_ABA_P Parameter: Tissue Value: Aerial
  misc_feature: MA Experiment 20000169 PARAMETER Experiment Name: At_100uM_ABA_P Parameter: Treatment Value: 100uM ABA vs. No Treatment
  misc_feature: MA Experiment ID: 20000179 Result: Down-regulated in Transcription
  misc_feature: MA Experiment 20000179 PARAMETER Experiment Name: At_Germinating_Seeds_P Parameter: Age (hr) Value: 6 vs. 0
  misc_feature: MA Experiment 20000179 PARAMETER Experiment Name: At_Germinating_Seeds_P Parameter: Tissue Value: Germinating Seeds
  misc_feature: MA Experiment ID: 20000180 Result: Down-regulated in Transcription
  misc_feature: MA Experiment 20000180 PARAMETER Experiment Name: At_Germinating_Seeds_P Parameter: Age (hr) Value: 24 vs. 0
  misc_feature: MA Experiment 20000180 PARAMETER Experiment Name: At_Germinating_Seeds_P Parameter: Tissue Value: Germinating Seeds
  misc_feature: MA Experiment ID: 20000234 Result: Up-regulated in Transcription
  misc_feature: MA Experiment 20000234 PARAMETER Experiment Name: At_Siliques_P Parameter: Age (day) Value: 21
  misc_feature: MA Experiment 20000234 PARAMETER Experiment Name: At_Siliques_P Parameter: Organism Value: A. thaliana
  misc_feature: MA Experiment 20000234 PARAMETER Experiment Name: At_Siliques_P Parameter: Plant Line Value: WS
  misc_feature: MA Experiment 20000234 PARAMETER Experiment Name: At_Siliques_P Parameter: Tissue Value: Less Than 5mm Siliques vs. Whole Plant
  misc_feature: MA Experiment ID: 20000235 Result: Up-regulated in Transcription
  misc_feature: MA Experiment 20000235 PARAMETER Experiment Name: At_Siliques_P Parameter: Age (day) Value: 21
  misc_feature: MA Experiment 20000235 PARAMETER Experiment Name: At_Siliques_P Parameter: Organism Value: A. thaliana
  misc_feature: MA Experiment 20000235 PARAMETER Experiment Name: At_Siliques_P Parameter: Plant Line Value: WS
  misc_feature: MA Experiment 20000235 PARAMETER Experiment Name: At_Siliques_P Parameter: Tissue Value: 5-10mm Siliques vs. Whole Plant
  misc_feature: MA Experiment ID: 20000264 Result: Up-regulated in Transcription
  misc_feature: MA Experiment 20000264 PARAMETER Experiment Name: At_Open_Flower_P Parameter: Age (day) Value: 21
  misc_feature: MA Experiment 20000264 PARAMETER Experiment Name: At_Open_Flower_P Parameter: Plant Line Value: WS
  misc_feature: MA Experiment 20000264 PARAMETER Experiment Name: At_Open_Flower_P Parameter: Tissue Value: Open Flower vs. Whole Plant
  misc_feature: MA Experiment ID: 20000453 Result: Up-regulated in Transcription
  misc_feature: MA Experiment 20000453 PARAMETER Experiment Name: At_100uM_ABA_P Parameter: Age (day) Value: 15
  misc_feature: MA Experiment 20000453 PARAMETER Experiment Name: At_100uM_ABA_P Parameter: Organism Value: A. thaliana
  misc_feature: MA Experiment 20000453 PARAMETER Experiment Name: At_100uM_ABA_P Parameter: Plant Line Value: WS
  misc_feature: MA Experiment 20000453 PARAMETER Experiment Name: At_100uM_ABA_P Parameter: Timepoint (hr) Value: 24
  misc_feature: MA Experiment 20000453 PARAMETER Experiment Name: At_100uM_ABA_P Parameter: Tissue Value: Aerial
  misc_feature: MA Experiment 20000453 PARAMETER Experiment Name: At_100uM_ABA_P Parameter: Treatment Value: 100uM ABA vs. No Treatment
  misc_feature: MA Experiment ID: 20000455 Result: Up-regulated in Transcription
  misc_feature: MA Experiment 20000455 PARAMETER Experiment Name: At_100uM_ABA_P Parameter: Age (day) Value: 16
  misc_feature: MA Experiment 20000455 PARAMETER Experiment Name: At_100uM_ABA_P Parameter: Organism Value: A. thaliana
  misc_feature: MA Experiment 20000455 PARAMETER Experiment Name: At_100uM_ABA_P Parameter: Plant Line Value: WS
  misc_feature: MA Experiment 20000455 PARAMETER Experiment Name: At_100uM_ABA_P Parameter: Timepoint (hr) Value: 48
  misc_feature: MA Experiment 20000455 PARAMETER Experiment Name: At_100uM_ABA_P Parameter: Tissue Value: Aerial
  misc_feature: MA Experiment 20000455 PARAMETER Experiment Name: At_100uM_ABA_P Parameter: Treatment Value: 100uM ABA vs. No Treatment
  misc_feature: MA Experiment ID: 20000496 Result: Up-regulated in Transcription
  misc_feature: MA Experiment 20000496 PARAMETER Experiment Name: At_Guard_Cells_P Parameter: Harvest Date Value: 7/19/2002
  misc_feature: MA Experiment 20000496 PARAMETER Experiment Name: At_Guard_Cells_P Parameter: Organism Value: Canola
  misc_feature: MA Experiment 20000496 PARAMETER Experiment Name: At_Guard_Cells_P Parameter: Tissue Value: Guard Cells vs. Leaves
  misc_feature: MA Experiment ID: 20000527 Result: Up-regulated in Transcription
  misc_feature: MA Experiment 20000527 PARAMETER Experiment Name: At_10percent_PEG_P Parameter: Age (day) Value: 20
  misc_feature: MA Experiment 20000527 PARAMETER Experiment Name: At_10percent_PEG_P Parameter: Organism Value: A. thaliana
  misc_feature: MA Experiment 20000527 PARAMETER Experiment Name: At_10percent_PEG_P Parameter: Plant Line Value: WS
  misc_feature: MA Experiment 20000527 PARAMETER Experiment Name: At_10percent_PEG_P Parameter: Timepoint (day) Value: 20
  misc_feature: MA Experiment 20000527 PARAMETER Experiment Name: At_10percent_PEG_P Parameter: Tissue Value: Whole Plant
  misc_feature: MA Experiment 20000527 PARAMETER Experiment Name: At_10percent_PEG_P Parameter: Treatment Value: 10percent PEG vs. No Treatment
  misc_feature: MA Experiment ID: 20000575 Result: Up-regulated in Transcription
  misc_feature: MA Experiment 20000575 PARAMETER Experiment Name: At_100uM_ABA_Mutants__P Parameter: Organism Value: A. thaliana
  misc_feature: MA Experiment 20000575 PARAMETER Experiment Name: At_100uM_ABA_Mutants__P Parameter: Plant Line Value: CS22
  misc_feature: MA Experiment 20000575 PARAMETER Experiment Name: At_100uM_ABA_Mutants__P Parameter: Timepoint (hr) Value: 6
  misc_feature: MA Experiment 20000575 PARAMETER Experiment Name: At_100uM_ABA_Mutants__P Parameter: Tissue Value: Whole Plant
  misc_feature: MA Experiment 20000575 PARAMETER Experiment Name: At_100uM_ABA_Mutants__P Parameter: Treatment Value: 1uM ABA vs. No Treatment
  misc_feature: MA Experiment ID: 20001248 Result: Down-regulated in Transcription
  misc_feature: MA Experiment 20001248 PARAMETER Experiment Name: At_Far-red-induction_P Parameter: Age (day) Value: 7
  misc_feature: MA Experiment 20001248 PARAMETER Experiment Name: At_Far-red-induction_P Parameter: Light Value: Far-red vs. White
  misc_feature: MA Experiment 20001248 PARAMETER Experiment Name: At_Far-red-induction_P Parameter: Organism Value: A. thaliana
  misc_feature: MA Experiment 20001248 PARAMETER Experiment Name: At_Far-red-induction_P Parameter: Plant Line Value: Columbia
  misc_feature: MA Experiment 20001248 PARAMETER Experiment Name: At_Far-red-induction_P Parameter: Timepoint (hr) Value: 4
  misc_feature: MA Experiment 20001248 PARAMETER Experiment Name: At_Far-red-induction_P Parameter: Tissue Value: Whole Plant
  misc_feature: MA Experiment ID: 20001451 Result: Down-regulated in Transcription
  misc_feature: MA Experiment 20001451 PARAMETER Experiment Name: At_Far-red-induction_P Parameter: Age (day) Value: 7
  misc_feature: MA Experiment 20001451 PARAMETER Experiment Name: At_Far-red-induction_P Parameter: Light Value: Far-red vs. White
  misc_feature: MA Experiment 20001451 PARAMETER Experiment Name: At_Far-red-induction_P Parameter: Organism Value: A. thaliana
  misc_feature: MA Experiment 20001451 PARAMETER Experiment Name: At_Far-red-induction_P Parameter: Plant Line Value: Columbia
  misc_feature: MA Experiment 20001451 PARAMETER Experiment Name: At_Far-red-induction_P Parameter: Timepoint (hr) Value: 24
  misc_feature: MA Experiment 20001451 PARAMETER Experiment Name: At_Far-red-induction_P Parameter: Tissue Value: Whole Plant
  misc_feature: MA Experiment ID: 20001457 Result: Up-regulated in Transcription
  misc_feature: MA Experiment 20001457 PARAMETER Experiment Name: At_50mM_NH4NO3_L-to-H_P Parameter: Age (day) Value: Undefined
  misc_feature: MA Experiment 20001457 PARAMETER Experiment Name: At_50mM_NH4NO3_L-to-H_P Parameter: Organism Value: Undefined
  misc_feature: MA Experiment 20001457 PARAMETER Experiment Name: At_50mM_NH4NO3_L-to-H_P Parameter: Plant Line Value: Undefined
  misc_feature: MA Experiment 20001457 PARAMETER Experiment Name: At_50mM_NH4NO3_L-to-H_P Parameter: Timepoint (hr) Value: 0.5
  misc_feature: MA Experiment 20001457 PARAMETER Experiment Name: At_50mM_NH4NO3_L-to-H_P Parameter: Tissue Value: Siliques
  misc_feature: MA Experiment 20001457 PARAMETER Experiment Name: At_50mM_NH4NO3_L-to-H_P Parameter: Treatment Value: 50mM NH4NO3 vs. 100mM Manitol
  misc_feature: MA Experiment ID: 20001458 Result: Up-regulated in Transcription
  misc_feature: MA Experiment 20001458 PARAMETER Experiment Name: At_50mM_NH4NO3_L-to-H_P Parameter: Age (day) Value: Undefined
  misc_feature: MA Experiment 20001458 PARAMETER Experiment Name: At_50mM_NH4NO3_L-to-H_P Parameter: Organism Value: Undefined
  misc_feature: MA Experiment 20001458 PARAMETER Experiment Name: At_50mM_NH4NO3_L-to-H_P Parameter: Plant Line Value: Undefined
  misc_feature: MA Experiment 20001458 PARAMETER Experiment Name: At_50mM_NH4NO3_L-to-H_P Parameter: Timepoint (hr) Value: 2
  misc_feature: MA Experiment 20001458 PARAMETER Experiment Name: At_50mM_NH4NO3_L-to-H_P Parameter: Tissue Value: Siliques
  misc_feature: MA Experiment 20001458 PARAMETER Experiment Name: At_50mM_NH4NO3_L-to-H_P Parameter: Treatment Value: 50mM NH4NO3 vs. 100mM Manitol
  misc_feature: MA Experiment ID: 20001459 Result: Up-regulated in Transcription
  misc_feature: MA Experiment 20001459 PARAMETER Experiment Name: At_50mM_NH4NO3_L-to-H_P Parameter: Age (day) Value: Undefined
  misc_feature: MA Experiment 20001459 PARAMETER Experiment Name: At_50mM_NH4NO3_L-to-H_P Parameter: Organism Value: Undefined
  misc_feature: MA Experiment 20001459 PARAMETER Experiment Name: At_50mM_NH4NO3_L-to-H_P Parameter: Plant Line Value: Undefined
  misc_feature: MA Experiment 20001459 PARAMETER Experiment Name: At_50mM_NH4NO3_L-to-H_P Parameter: Timepoint (hr) Value: 4
  misc_feature: MA Experiment 20001459 PARAMETER Experiment Name: At_50mM_NH4NO3_L-to-H_P Parameter: Tissue Value: Siliques
  misc_feature: MA Experiment 20001459 PARAMETER Experiment Name: At_50mM_NH4NO3_L-to-H_P Parameter: Treatment Value: 50mM NH4NO3 vs. 100mM Manitol
  misc_feature: MA Experiment ID: 20001554 Result: Up-regulated in Transcription
  misc_feature: MA Experiment 20001554 PARAMETER Experiment Name: At_Drought_Soil_Dry_P Parameter: Age (day) Value: 21
  misc_feature: MA Experiment 20001554 PARAMETER Experiment Name: At_Drought_Soil_Dry_P Parameter: Organism Value: A. thaliana
  misc_feature: MA Experiment 20001554 PARAMETER Experiment Name: At_Drought_Soil_Dry_P Parameter: Plant Line Value: WS
  misc_feature: MA Experiment 20001554 PARAMETER Experiment Name: At_Drought_Soil_Dry_P Parameter: Post Timepoint (hr) Value: None
  misc_feature: MA Experiment 20001554 PARAMETER Experiment Name: At_Drought_Soil_Dry_P Parameter: Post-Treatment Value: None
  misc_feature: MA Experiment 20001554 PARAMETER Experiment Name: At_Drought_Soil_Dry_P Parameter: Timepoint (day) Value: 7
  misc_feature: MA Experiment 20001554 PARAMETER Experiment Name: At_Drought_Soil_Dry_P Parameter: Treatment Value: Drought vs. No Drought
  misc_feature: MA Experiment ID: 20001555 Result: Up-regulated in Transcription
  misc_feature: MA Experiment 20001555 PARAMETER Experiment Name: At_Drought_Soil_Dry_P Parameter: Age (day) Value: 24
  misc_feature: MA Experiment 20001555 PARAMETER Experiment Name: At_Drought_Soil_Dry_P Parameter: Organism Value: A. thaliana
  misc_feature: MA Experiment 20001555 PARAMETER Experiment Name: At_Drought_Soil_Dry_P Parameter: Plant Line Value: WS
  misc_feature: MA Experiment 20001555 PARAMETER Experiment Name: At_Drought_Soil_Dry_P Parameter: Post Timepoint (hr) Value: None
  misc_feature: MA Experiment 20001555 PARAMETER Experiment Name: At_Drought_Soil_Dry_P Parameter: Post-Treatment Value: None
  misc_feature: MA Experiment 20001555 PARAMETER Experiment Name: At_Drought_Soil_Dry_P Parameter: Timepoint (day) Value: 10
  misc_feature: MA Experiment 20001555 PARAMETER Experiment Name: At_Drought_Soil_Dry_P Parameter: Treatment Value: Drought vs. No Drought
  misc_feature: MA Experiment ID: 20001757 Result: Up-regulated in Transcription
  misc_feature: MA Experiment 20001757 PARAMETER Experiment Name: At_50mM_NH4NO3_L-to-H_P Parameter: Timepoint (hr) Value: 6
  misc_feature: MA Experiment 20001757 PARAMETER Experiment Name: At_50mM_NH4NO3_L-to-H_P Parameter: Tissue Value: Leaf
  misc_feature: MA Experiment 20001757 PARAMETER Experiment Name: At_50mM_NH4NO3_L-to-H_P Parameter: Treatment Value: 50mM NH4NO3 vs 100mM Mannitol
  misc_feature: MA Experiment ID: 20001759 Result: Up-regulated in Transcription
  misc_feature: MA Experiment 20001759 PARAMETER Experiment Name: At_50mM_NH4NO3_L-to-H_P Parameter: Timepoint (hr) Value: 1
  misc_feature: MA Experiment 20001759 PARAMETER Experiment Name: At_50mM_NH4NO3_L-to-H_P Parameter: Tissue Value: Siliques
  misc_feature: MA Experiment 20001759 PARAMETER Experiment Name: At_50mM_NH4NO3_L-to-H_P Parameter: Treatment Value: 50mM NH4NO3 vs 100mM Mannitol
atgcaaatctcatcttcatcgtcttcaaatttcttctcttctctttatgctgatgaaccggcactaatcacattaacaattgttgtagtagtagtagtgttactatttaaatggtggttgcactggaaagagcaaagactacggctacctcctggctccatggggttgccttacatcggagagacactccgcctctacacagaaaatcccaattccttcttcgccactcgccaaaacaagtacggggatatattcaagacgcacatattaggatgtccatgtgtgatgataagtagtccagaggcggctcgaatggtgttagtgagcaaagctcacttgttcaagccaacttatcctccaagcaaagagcgtatgattggaccagaggctcttttcttccaccaaggtccataccattctacccttaagcggctggtccagtcttctttcatgccttctgctctcagaccaaccgtctctcacatcgagctccttgtcctccaaaccctttcctcttggacgtcccaaaagtccatcaacaccctcgaatacatgaaacgatatgcattcgatgtggcgatcatgtcagcgttcggggacaaagaggagcccactacgattgatgttattaagcttctctatcaacgtctcgaaaggggttacaactccatgcctctcgacctaccgggcacactttttcataagtccatgaaggcaagaatagaattaagcgaggaactaaggaaagtaatagagaagagaagagagaatgggagagaagaaggaggactattgggagtacttctgggagcaaaggatcaaaaacgcaacggcttaagtgattcacagattgctgacaacatcatcggtgttatattcgccgccaccgacaccaccgcttctgtcttaacttggcttctcaagtacttacacgaccaccccaatctcctccaagaagtctccagggagcaattcagcattcgacagaaaataaaaaaagaaaaccgaagaatctcatgggaagatacaagaaaaatgccactgaccactagggtgatacaagagacactaagagcagcaagtgtactgtcctttacatttagagaagcagtacaagacgtcgaatatgatggctacttgatcccaaagggttggaaggttcttcctcttttccggcgaatccatcactcctccgaattcttccccgatcctgaaaaattcgatccttctagattcgaggtggcaccaaaaccttacacgtacatgccattcggaaatggagtgcactcatgtccaggaagtgagctggctaaacttgagatgcttatcctccttcaccacctcactacttccttcagatgggaagtgattggagatgaagaaggtatacagtatggtcctttccctgtacccaagaagggtttaccaataagagtaaccccgatttaa

SEQ ID NO: 96764 - protein, 482 aa, Arabidopsis thaliana
  peptide (1)..(482): Ceres Seq. ID no. 12734657
  misc_feature (50)..(479): Pfam Name: Cytochrome P450 Pfam Description: Cytochrome P450
  misc_feature (1)..(482): Homolog of NCBI NO: 15227033 NR Description: taxane 13-alpha-hydroxylase(cytochrome p450 putative; protein id: At2g29090.1 [Arabidopsis thaliana]
  misc_feature (46)..(477): Homolog of NCBI NO: 30694740 NR Description: cytochrome P450 family [Arabidopsis thaliana] cytochrome P450 [Arabidopsis thaliana] AT5g45340/K9E15_12 [Arabidopsis thaliana]
  misc_feature (46)..(477): Homolog of NCBI NO: 18415271 NR Description: cytochrome p450 family; protein id: At4g19230.1, by cDNA: gi_15293092, supported by cDNA: gi_20259298 [Arabidopsis >gi|15293093|gb|AAK93657.1| putative cytochrome P450 cytochrome
  misc_feature (46)..(453): Homolog of NCBI NO: 30694744 NR Description: cytochrome P450 family [Arabidopsis thaliana]
  misc_feature (20)..(476): Homolog of NCBI NO: 18402179 NR Description: cytochrome P450, putative; protein id: supported by cDNA: 126144. [Arabidopsis thaliana]
  misc_feature (46)..(453): Homolog of NCBI NO: 7430728 NR Description: cytochrome P450 - Arabidopsis thaliana cytochrome P450 [Arabidopsis thaliana]
  misc_feature (20)..(454): Homolog of NCBI NO: 9294629 NR Description: cytochrome P450 [Arabidopsis thaliana]
  misc_feature (20)..(479): Homolog of NCBI NO: 28380196 NR Description: Taxane 13-alpha-hydroxylase
  misc_feature (20)..(481): Homolog of NCBI NO: 28380205 NR Description: Taxane 10-beta-hydroxylase
  misc_feature (22)..(479): Homolog of NCBI NO: 27127269 NR Description: cytochrome P450 [Oryza sativa (japonica
MQISSSSSSNFFSSLYADEPALITLTIVVVVVVLLFKWWLHWKEQRLRLPPGSMGLPYIGETLRLYTENPNSFFATRQNKYGDIFKTHILGCPCVMISSPEAARMVLVSKAHLFKPTYPPSKERMIGPEALFFHQGPYHSTLKRLVQSSFMPSALRPTVSHIELLVLQTLSSWTSQKSINTLEYMKRYAFDVAIMSAFGDKEEPTTIDVIKLLYQRLERGYNSMPLDLPGTLFHKSMKARIELSEELRKVIEKRRENGREEGGLLGVLLGAKDQKRNGLSDSQIADNIIGVIFAATDTTASVLTWLLKYLHDHPNLLQEVSREQFSIRQKIKKENRRISWEDTRKMPLTTRVIQETLRAASVLSFTFREAVQDVEYDGYLIPKGWKVLPLFRRIHHSSEFFPDPEKFDPSRFEVAPKPYTYMPFGNGVHSCPGSELAKLEMLILLHHLTTSFRWEVIGDEEGIQYGPFPVPKKGLPIRVTPI

SEQ ID NO: 96765 - protein, 429 aa, Arabidopsis thaliana
  peptide (1)..(429): Ceres Seq. ID no. 12734658
  misc_feature (1)..(426): Pfam Name: Cytochrome P450 Pfam Description: Cytochrome P450
  misc_feature (1)..(429): Homolog of NCBI NO: 15227033 NR Description: taxane 13-alpha-hydroxylase(cytochrome p450 putative; protein id: At2g29090.1 [Arabidopsis thaliana]
  misc_feature (1)..(424): Homolog of NCBI NO: 30694740 NR Description: cytochrome P450 family [Arabidopsis thaliana] cytochrome P450 [Arabidopsis thaliana] AT5g45340/K9E15_12 [Arabidopsis thaliana]
  misc_feature (1)..(424): Homolog of NCBI NO: 18415271 NR Description: cytochrome p450 family; protein id: At4g19230.1, by cDNA: gi_15293092, supported by cDNA: gi_20259298 [Arabidopsis >gi|15293093|gb|AAK93657.1| putative cytochrome P450 cytochrome
  misc_feature (1)..(400): Homolog of NCBI NO: 30694744 NR Description: cytochrome P450 family [Arabidopsis thaliana]
  misc_feature (1)..(423): Homolog of NCBI NO: 18402179 NR Description: cytochrome P450, putative; protein id: supported by cDNA: 126144. [Arabidopsis thaliana]
  misc_feature (1)..(400): Homolog of NCBI NO: 7430728 NR Description: cytochrome P450 - Arabidopsis thaliana cytochrome P450 [Arabidopsis thaliana]
  misc_feature (1)..(401): Homolog of NCBI NO: 9294629 NR Description: cytochrome P450 [Arabidopsis thaliana]
  misc_feature (1)..(426): Homolog of NCBI NO: 28380196 NR Description: Taxane 13-alpha-hydroxylase
  misc_feature (1)..(428): Homolog of NCBI NO: 28380205 NR Description: Taxane 10-beta-hydroxylase
  misc_feature (1)..(426): Homolog of NCBI NO: 27127269 NR Description: cytochrome P450 [Oryza sativa (japonica
MGLPYIGETLRLYTENPNSFFATRQNKYGDIFKTHILGCPCVMISSPEAARMVLVSKAHLFKPTYPPSKERMIGPEALFFHQGPYHSTLKRLVQSSFMPSALRPTVSHIELLVLQTLSSWTSQKSINTLEYMKRYAFDVAIMSAFGDKEEPTTIDVIKLLYQRLERGYNSMPLDLPGTLFHKSMKARIELSEELRKVIEKRRENGREEGGLLGVLLGAKDQKRNGLSDSQIADNIIGVIFAATDTTASVLTWLLKYLHDHPNLLQEVSREQFSIRQKIKKENRRISWEDTRKMPLTTRVIQETLRAASVLSFTFREAVQDVEYDGYLIPKGWKVLPLFRRIHHSSEFFPDPEKFDPSRFEVAPKPYTYMPFGNGVHSCPGSELAKLEMLILLHHLTTSFRWEVIGDEEGIQYGPFPVPKKGLPIRVTPI

SEQ ID NO: 96766 - protein, 387 aa, Arabidopsis thaliana
  peptide (1)..(387): Ceres Seq. ID no. 12734659
  misc_feature (1)..(384): Pfam Name: Cytochrome P450 Pfam Description: Cytochrome P450
  misc_feature (1)..(387): Homolog of NCBI NO: 15227033 NR Description: taxane 13-alpha-hydroxylase(cytochrome p450 putative; protein id: At2g29090.1 [Arabidopsis thaliana]
  misc_feature (1)..(382): Homolog of NCBI NO: 30694740 NR Description: cytochrome P450 family [Arabidopsis thaliana] cytochrome P450 [Arabidopsis thaliana] AT5g45340/K9E15_12 [Arabidopsis thaliana]
  misc_feature (1)..(382): Homolog of NCBI NO: 18415271 NR Description: cytochrome p450 family; protein id: At4g19230.1, by cDNA: gi_15293092, supported by cDNA: gi_20259298 [Arabidopsis >gi|15293093|gb|AAK93657.1| putative cytochrome P450 cytochrome
  misc_feature (1)..(358): Homolog of NCBI NO: 30694744 NR Description: cytochrome P450 family [Arabidopsis thaliana]
  misc_feature (1)..(381): Homolog of NCBI NO: 18402179 NR Description: cytochrome P450, putative; protein id: supported by cDNA: 126144. [Arabidopsis thaliana]
  misc_feature (1)..(358): Homolog of NCBI NO: 7430728 NR Description: cytochrome P450 - Arabidopsis thaliana cytochrome P450 [Arabidopsis thaliana]
  misc_feature (1)..(359): Homolog of NCBI NO: 9294629 NR Description: cytochrome P450 [Arabidopsis thaliana]
  misc_feature (1)..(384): Homolog of NCBI NO: 28380196 NR Description: Taxane 13-alpha-hydroxylase
  misc_feature (1)..(386): Homolog of NCBI NO: 28380205 NR Description: Taxane 10-beta-hydroxylase
  misc_feature (1)..(384): Homolog of NCBI NO: 27127269 NR Description: cytochrome P450 [Oryza sativa (japonica
MISSPEAARMVLVSKAHLFKPTYPPSKERMIGPEALFFHQGPYHSTLKRLVQSSFMPSALRPTVSHIELLVLQTLSSWTSQKSINTLEYMKRYAFDVAIMSAFGDKEEPTTIDVIKLLYQRLERGYNSMPLDLPGTLFHKSMKARIELSEELRKVIEKRRENGREEGGLLGVLLGAKDQKRNGLSDSQIADNIIGVIFAATDTTASVLTWLLKYLHDHPNLLQEVSREQFSIRQKIKKENRRISWEDTRKMPLTTRVIQETLRAASVLSFTFREAVQDVEYDGYLIPKGWKVLPLFRRIHHSSEFFPDPEKFDPSRFEVAPKPYTYMPFGNGVHSCPGSELAKLEMLILLHHLTTSFRWEVIGDEEGIQYGPFPVPKKGLPIRVTPI

SEQ ID NO: 96767 - DNA, 807 bp, Arabidopsis thaliana
  misc_feature (1)..(807): Ceres Seq. ID no. 12734671
  misc_feature: MA Experiment ID: 20000438 Result: Up-regulated in Transcription
  misc_feature: MA Experiment 20000438 PARAMETER Experiment Name: At_Shoots__P Parameter: Age (day) Value: 14
  misc_feature: MA Experiment 20000438 PARAMETER Experiment Name: At_Shoots__P Parameter: Tissue Value: Shoots vs. Whole Plant
  misc_feature: MA Experiment ID: 20001557 Result: Down-regulated in Transcription
  misc_feature: MA Experiment 20001557 PARAMETER Experiment Name: At_Drought_Soil_Dry_P Parameter: Age (day) Value: 27
  misc_feature: MA Experiment 20001557 PARAMETER Experiment Name: At_Drought_Soil_Dry_P Parameter: Organism Value: A. thaliana
  misc_feature: MA Experiment 20001557 PARAMETER Experiment Name: At_Drought_Soil_Dry_P Parameter: Plant Line Value: WS
  misc_feature: MA Experiment 20001557 PARAMETER Experiment Name: At_Drought_Soil_Dry_P Parameter: Post Timepoint (hr) Value: 3
  misc_feature: MA Experiment 20001557 PARAMETER Experiment Name: At_Drought_Soil_Dry_P Parameter: Post-Treatment Value: Re-Water vs. No Drought
  misc_feature: MA Experiment 20001557 PARAMETER Experiment Name: At_Drought_Soil_Dry_P Parameter: Timepoint (day) Value: 13
  misc_feature: MA Experiment 20001557 PARAMETER Experiment Name: At_Drought_Soil_Dry_P Parameter: Treatment Value: Drought vs. No Drought
atggctaaagcaggagaaaactcgagagacaaatctagatggagccttgaaggcatgaccgctcttgttacaggtggctccaaaggcctcggagaagctgtagtggaggaactagccatgttgggagcaagagttcacacatgtgccagagacgaaactcagcttcaagaacgcttacgtgaatggcaagccaaaggatttgaggtcaccacttctgtctgcgacgtctcttctcgtgagcaacgagagaaactcatggaaaccgtttcctctgtcttccaaggaaaactcaacatcctcgtaaataatgcgggaacgggtataataaagccgagtacagagtatacagcagaagattactcgtttctgatggctacaaatctcgagtccgcttttcatctctcacagatcgcgcaccctttgttgaaagcctctggttccgggagcatcgtgttcatgtcctctgttgctggacttgtgcataccggtgcatcaatctatggagcatctaaaggagctatgaatcagctaggaagaagcttagcatgcgagtgggcaagtgacaacataagggttaactctgtgtgtccatgggtcataacaactcctttaactagctttattttcagtgatgaaaagttaagaaaagcagtggaggataagacaccaatgggacgtgttggagaagcaaatgaagtatcatcgcttgtcgcatttctctgttttccggcagcttcttatattacaggtcagactatctgcgtcgacggaggtgcttcggtgaatggcttctctttcaagccttag

SEQ ID NO: 96768 - protein, 268 aa, Arabidopsis thaliana
  peptide (1)..(268): Ceres Seq. ID no. 12734672
  misc_feature (1)..(268): Homolog of NCBI NO: 15227040 NR Description: putative tropinone reductase; protein id: [Arabidopsis thaliana] >gi|25283124|pir||B84693 probable
  misc_feature (1)..(268): Homolog of NCBI NO: 15227043 NR Description: putative tropinone reductase; protein id: [Arabidopsis thaliana] >gi|25283125|pir||C84693 probable
  misc_feature (1)..(268): Homolog of NCBI NO: 15227076 NR Description: putative tropinone reductase; protein id: supported by cDNA: 2618., supported by cDNA: gi_15010623, by cDNA: gi_19699255 [Arabidopsis thaliana]
  misc_feature (1)..(268): Homolog of NCBI NO: 21554716 NR Description: putative tropinone reductase [Arabidopsis
  misc_feature (1)..(267): Homolog of NCBI NO: 15227075 NR Description: putative tropinone reductase; protein id: supported by cDNA: 14555., supported by cDNA: gi_17473659, by cDNA: gi_20148626 [Arabidopsis thaliana]
  misc_feature (10)..(268): Homolog of NCBI NO: 15227069 NR Description: putative tropinone reductase; protein id: [Arabidopsis thaliana] >gi|25283126|pir||E84694 probable
  misc_feature (1)..(265): Homolog of NCBI NO: 25283134 NR Description: probable tropinone reductase [imported] - thaliana >gi|3980398|gb|AAC95201.1| putative tropinone reductase
  misc_feature (109)..(267): Homolog of NCBI NO: 6457349 NR Description: short chain alcohol dehydrogenase [Arabidopsis
  misc_feature (1)..(101): Homolog of NCBI NO: 6457349 NR Description: short chain alcohol dehydrogenase [Arabidopsis
  misc_feature (10)..(268): Homolog of NCBI NO: 15222400 NR Description: tropinone reductase-I, putative; protein id:
MAKAGENSRDKSRWSLEGMTALVTGGSKGLGEAVVEELAMLGARVHTCARDETQLQERLREWQAKGFEVTTSVCDVSSREQREKLMETVSSVFQGKLNILVNNAGTGIIKPSTEYTAEDYSFLMATNLESAFHLSQIAHPLLKASGSGSIVFMSSVAGLVHTGASIYGASKGAMNQLGRSLACEWASDNIRVNSVCPWVITTPLTSFIFSDEKLRKAVEDKTPMGRVGEANEVSSLVAFLCFPAASYITGQTICVDGGASVNGFSFKP

SEQ ID NO: 96769 - protein, 250 aa, Arabidopsis thaliana
  peptide (1)..(250): Ceres Seq. ID no. 12734673
  misc_feature (1)..(250): Homolog of NCBI NO: 15227040 NR Description: putative tropinone reductase; protein id: [Arabidopsis thaliana] >gi|25283124|pir||B84693 probable
  misc_feature (1)..(250): Homolog of NCBI NO: 15227043 NR Description: putative tropinone reductase; protein id: [Arabidopsis thaliana] >gi|25283125|pir||C84693 probable
  misc_feature (1)..(250): Homolog of NCBI NO: 15227076 NR Description: putative tropinone reductase; protein id: supported by cDNA: 2618., supported by cDNA: gi_15010623, by cDNA: gi_19699255 [Arabidopsis thaliana]
  misc_feature (1)..(250): Homolog of NCBI NO: 21554716 NR Description: putative tropinone reductase [Arabidopsis
  misc_feature (1)..(249): Homolog of NCBI NO: 15227075 NR Description: putative tropinone reductase; protein id: supported by cDNA: 14555., supported by cDNA: gi_17473659, by cDNA: gi_20148626 [Arabidopsis thaliana]
  misc_feature (1)..(250): Homolog of NCBI NO: 15227069 NR Description: putative tropinone reductase; protein id: [Arabidopsis thaliana] >gi|25283126|pir||E84694 probable
  misc_feature (1)..(247): Homolog of NCBI NO: 25283134 NR Description: probable tropinone reductase [imported] - thaliana >gi|3980398|gb|AAC95201.1| putative tropinone reductase
  misc_feature (91)..(249): Homolog of NCBI NO: 6457349 NR Description: short chain alcohol dehydrogenase [Arabidopsis
  misc_feature (1)..(83): Homolog of NCBI NO: 6457349 NR Description: short chain alcohol dehydrogenase [Arabidopsis
  misc_feature (1)..(250): Homolog of NCBI NO: 15222400 NR Description: tropinone reductase-I, putative; protein id:
MTALVTGGSKGLGEAVVEELAMLGARVHTCARDETQLQERLREWQAKGFEVTTSVCDVSSREQREKLMETVSSVFQGKLNILVNNAGTGIIKPSTEYTAEDYSFLMATNLESAFHLSQIAHPLLKASGSGSIVFMSSVAGLVHTGASIYGASKGAMNQLGRSLACEWASDNIRVNSVCPWVITTPLTSFIFSDEKLRKAVEDKTPMGRVGEANEVSSLVAFLCFPAASYITGQTICVDGGASVNGFSFKP

SEQ ID NO: 96770 - protein, 229 aa, Arabidopsis thaliana
  peptide (1)..(229): Ceres Seq. ID no. 12734674
  misc_feature (1)..(229): Homolog of NCBI NO: 15227040 NR Description: putative tropinone reductase; protein id: [Arabidopsis thaliana] >gi|25283124|pir||B84693 probable
  misc_feature (1)..(229): Homolog of NCBI NO: 15227043 NR Description: putative tropinone reductase; protein id: [Arabidopsis thaliana] >gi|25283125|pir||C84693 probable
  misc_feature (1)..(229): Homolog of NCBI NO: 15227076 NR Description: putative tropinone reductase; protein id: supported by cDNA: 2618., supported by cDNA: gi_15010623, by cDNA: gi_19699255 [Arabidopsis thaliana]
  misc_feature (1)..(229): Homolog of NCBI NO: 21554716 NR Description: putative tropinone reductase [Arabidopsis
  misc_feature (1)..(228): Homolog of NCBI NO: 15227075 NR Description: putative tropinone reductase; protein id: supported by cDNA: 14555., supported by cDNA: gi_17473659, by cDNA: gi_20148626 [Arabidopsis thaliana]
  misc_feature (1)..(229): Homolog of NCBI NO: 15227069 NR Description: putative tropinone reductase; protein id: [Arabidopsis thaliana] >gi|25283126|pir||E84694 probable
  misc_feature (1)..(226): Homolog of NCBI NO: 25283134 NR Description: probable tropinone reductase [imported] - thaliana >gi|3980398|gb|AAC95201.1| putative tropinone reductase
  misc_feature (70)..(228): Homolog of NCBI NO: 6457349 NR Description: short chain alcohol dehydrogenase [Arabidopsis
  misc_feature (1)..(62): Homolog of NCBI NO: 6457349 NR Description: short chain alcohol dehydrogenase [Arabidopsis
  misc_feature (1)..(229): Homolog of NCBI NO: 15222400 NR Description: tropinone reductase-I, putative; protein id:
MLGARVHTCARDETQLQERLREWQAKGFEVTTSVCDVSSREQREKLMETVSSVFQGKLNILVNNAGTGIIKPSTEYTAEDYSFLMATNLESAFHLSQIAHPLLKASGSGSIVFMSSVAGLVHTGASIYGASKGAMNQLGRSLACEWASDNIRVNSVCPWVITTPLTSFIFSDEKLRKAVEDKTPMGRVGEANEVSSLVAFLCFPAASYITGQTICVDGGASVNGFSFKP

SEQ ID NO: 96771 - DNA, 976 bp, Arabidopsis thaliana
  misc_feature (1)..(976): Ceres Seq. ID no. 12734683
  misc_feature: MA Experiment ID: 108462 Result: Up-regulated in Transcription
  misc_feature: MA Experiment 108462 PARAMETER Experiment Name: At_Germinating_Seeds_cDNA_P Parameter: Age (day) Value: 2 vs. 0
  misc_feature: MA Experiment 108462 PARAMETER Experiment Name: At_Germinating_Seeds_cDNA_P Parameter: Tissue Value: Germinating Seeds
  misc_feature: MA Experiment ID: 108463 Result: Up-regulated in Transcription
  misc_feature: MA Experiment 108463 PARAMETER Experiment Name: At_Germinating_Seeds_cDNA_P Parameter: Age (day) Value: 3 vs. 0
  misc_feature: MA Experiment 108463 PARAMETER Experiment Name: At_Germinating_Seeds_cDNA_P Parameter: Tissue Value: Germinating Seeds
  misc_feature: MA Experiment ID: 108464 Result: Up-regulated in Transcription
  misc_feature: MA Experiment 108464 PARAMETER Experiment Name: At_Germinating_Seeds_cDNA_P Parameter: Age (day) Value: 4 vs. 0
  misc_feature: MA Experiment 108464 PARAMETER Experiment Name: At_Germinating_Seeds_cDNA_P Parameter: Tissue Value: Germinating Seeds
  misc_feature: MA Experiment ID: 108577 Result: Down-regulated in Transcription
  misc_feature: MA Experiment 108577 PARAMETER Experiment Name: At_42deg_Heat_cDNA_P Parameter: Temperature (deg C) Value: 42 vs. 22
  misc_feature: MA Experiment 108577 PARAMETER Experiment Name: At_42deg_Heat_cDNA_P Parameter: Timepoint (hr) Value: 6
  misc_feature: MA Experiment 108577 PARAMETER Experiment Name: At_42deg_Heat_cDNA_P Parameter: Tissue Value: Aerial
  misc_feature: MA Experiment ID: 108585 Result: Down-regulated in Transcription
  misc_feature: MA Experiment 108585 PARAMETER Experiment Name: At_5mM_NaNP_cDNA_P Parameter: Timepoint (hr) Value: 6
  misc_feature: MA Experiment 108585 PARAMETER Experiment Name: At_5mM_NaNP_cDNA_P Parameter: Tissue Value: Aerial
  misc_feature: MA Experiment 108585 PARAMETER Experiment Name: At_5mM_NaNP_cDNA_P Parameter: Treatment Value: null
  misc_feature: MA Experiment ID: 108594 Result: Down-regulated in Transcription
  misc_feature: MA Experiment 108594 PARAMETER Experiment Name: At_Ler-rhl_Root_cDNA_P Parameter: Plant Line Value: null
  misc_feature: MA Experiment ID: 108595 Result: Down-regulated in Transcription
  misc_feature: MA Experiment 108595 PARAMETER Experiment Name: At_Ler-pi_Ovule_cDNA_P Parameter: Plant Line Value: null
  misc_feature: MA Experiment ID: 20000087 Result: Down-regulated in Transcription
  misc_feature: MA Experiment 20000087 PARAMETER Experiment Name: At_100uM_ABA_Mutants_cDNA_P Parameter: Plant Line Value: WS
  misc_feature: MA Experiment 20000087 PARAMETER Experiment Name: At_100uM_ABA_Mutants_cDNA_P Parameter: Timepoint (hr) Value: 6
  misc_feature: MA Experiment 20000087 PARAMETER Experiment Name: At_100uM_ABA_Mutants_cDNA_P Parameter: Tissue Value: Aerial
  misc_feature: MA Experiment 20000087 PARAMETER Experiment Name: At_100uM_ABA_Mutants_cDNA_P Parameter: Treatment Value: 100uM ABA vs. No Treatment
  misc_feature: MA Experiment ID: 20000112 Result: Down-regulated in Transcription
  misc_feature: MA Experiment 20000112 PARAMETER Experiment Name: At_42deg_Heat_cDNA_P Parameter: Temperature (deg C) Value: 42 vs. 22
  misc_feature: MA Experiment 20000112 PARAMETER Experiment Name: At_42deg_Heat_cDNA_P Parameter: Timepoint (hr) Value: 2
  misc_feature: MA Experiment 20000112 PARAMETER Experiment Name: At_42deg_Heat_cDNA_P Parameter: Tissue Value: Aerial
  misc_feature: MA Experiment ID: 20000182 Result: Down-regulated in Transcription
  misc_feature: MA Experiment 20000182 PARAMETER Experiment Name: At_2mM_SA_P Parameter: Age (day) Value: 14
  misc_feature: MA Experiment 20000182 PARAMETER Experiment Name: At_2mM_SA_P Parameter: Organism Value: A. thaliana
  misc_feature: MA Experiment 20000182 PARAMETER Experiment Name: At_2mM_SA_P Parameter: Plant Line Value: WS
  misc_feature: MA Experiment 20000182 PARAMETER Experiment Name: At_2mM_SA_P Parameter: Timepoint (hr) Value: 6
  misc_feature: MA Experiment 20000182 PARAMETER Experiment Name: At_2mM_SA_P Parameter: Tissue Value: Aerial
  misc_feature: MA Experiment 20000182 PARAMETER Experiment Name: At_2mM_SA_P Parameter: Treatment Value: 2mM SA vs. No Treatment
  misc_feature: MA Experiment ID: 20000267 Result: Up-regulated in Transcription
  misc_feature: MA Experiment 20000267 PARAMETER Experiment Name: At_Drought_P Parameter: Age (day) Value: 7
  misc_feature: MA Experiment 20000267 PARAMETER Experiment Name: At_Drought_P Parameter: Organism Value: A. thaliana
  misc_feature: MA Experiment 20000267 PARAMETER Experiment Name: At_Drought_P Parameter: Plant Line Value: WS
  misc_feature: MA Experiment 20000267 PARAMETER Experiment Name: At_Drought_P Parameter: Timepoint (hr) Value: 6
  misc_feature: MA Experiment 20000267 PARAMETER Experiment Name: At_Drought_P Parameter: Tissue Value: Whole Plant
  misc_feature: MA Experiment 20000267 PARAMETER Experiment Name: At_Drought_P Parameter: Treatment Value: Drought vs. No Drought
  misc_feature: MA Experiment ID: 20000268 Result: Down-regulated in Transcription
  misc_feature: MA Experiment 20000268 PARAMETER Experiment Name: At_100mM_NaCl__P Parameter: Age (day) Value: 14
  misc_feature: MA Experiment 20000268 PARAMETER Experiment Name: At_100mM_NaCl__P Parameter: Organism Value: A. thaliana
  misc_feature: MA Experiment 20000268 PARAMETER Experiment Name: At_100mM_NaCl__P Parameter: Plant Line Value: WS
  misc_feature: MA Experiment 20000268 PARAMETER Experiment Name: At_100mM_NaCl__P Parameter: Timepoint (hr) Value: 6
  misc_feature: MA Experiment 20000268 PARAMETER Experiment Name: At_100mM_NaCl__P Parameter: Tissue Value: Whole Plant
  misc_feature: MA Experiment 20000268 PARAMETER Experiment Name: At_100mM_NaCl__P Parameter: Treatment Value: 100mM NaCl vs. No Treatment
  misc_feature: MA Experiment ID: 20000437 Result: Up-regulated in Transcription
  misc_feature: MA Experiment 20000437 PARAMETER Experiment Name: At_Drought_P Parameter: Age (day) Value: 8
  misc_feature: MA Experiment 20000437 PARAMETER Experiment Name: At_Drought_P Parameter: Organism Value: A. thaliana
  misc_feature: MA Experiment 20000437 PARAMETER Experiment Name: At_Drought_P Parameter: Plant Line Value: WS
  misc_feature: MA Experiment 20000437 PARAMETER Experiment Name: At_Drought_P Parameter: Timepoint (hr) Value: 24
  misc_feature: MA Experiment 20000437 PARAMETER Experiment Name: At_Drought_P Parameter: Tissue Value: Whole Plant
  misc_feature: MA Experiment 20000437 PARAMETER Experiment Name: At_Drought_P Parameter: Treatment Value: Drought vs. No Drought
  misc_feature: MA Experiment ID: 20000438 Result: Up-regulated in Transcription
  misc_feature: MA Experiment 20000438 PARAMETER Experiment Name: At_Shoots__P Parameter: Age (day) Value: 14
  misc_feature: MA Experiment 20000438 PARAMETER Experiment Name: At_Shoots__P Parameter: Tissue Value: Shoots vs. Whole Plant
  misc_feature: MA Experiment ID: 20000495 Result: Down-regulated in Transcription
  misc_feature: MA Experiment 20000495 PARAMETER Experiment Name: At_Guard_Cells_P Parameter: Harvest Date Value: 8/2/2002
  misc_feature: MA Experiment 20000495 PARAMETER Experiment Name: At_Guard_Cells_P Parameter: Organism Value: A. thaliana
  misc_feature: MA Experiment 20000495 PARAMETER Experiment Name: At_Guard_Cells_P Parameter: Tissue Value: Guard Cells vs. Leaves
  misc_feature: MA Experiment ID: 20000496 Result: Down-regulated in Transcription
  misc_feature: MA Experiment 20000496 PARAMETER Experiment Name: At_Guard_Cells_P Parameter: Harvest Date Value: 7/19/2002
  misc_feature: MA Experiment 20000496 PARAMETER Experiment Name: At_Guard_Cells_P Parameter: Organism Value: Canola
  misc_feature: MA Experiment 20000496 PARAMETER Experiment Name: At_Guard_Cells_P Parameter: Tissue Value: Guard Cells vs. Leaves
  misc_feature: MA Experiment ID: 20000527 Result: Up-regulated in Transcription
  misc_feature: MA Experiment 20000527 PARAMETER Experiment Name: At_10percent_PEG_P Parameter: Age (day) Value: 20
  misc_feature: MA Experiment 20000527 PARAMETER Experiment Name: At_10percent_PEG_P Parameter: Organism Value: A. thaliana
  misc_feature: MA Experiment 20000527 PARAMETER Experiment Name: At_10percent_PEG_P Parameter: Plant Line Value: WS
  misc_feature: MA Experiment 20000527 PARAMETER Experiment Name: At_10percent_PEG_P Parameter: Timepoint (day) Value: 20
  misc_feature: MA Experiment 20000527 PARAMETER Experiment Name: At_10percent_PEG_P Parameter: Tissue Value: Whole Plant
  misc_feature: MA Experiment 20000527 PARAMETER Experiment Name: At_10percent_PEG_P Parameter: Treatment Value: 10percent PEG vs. No Treatment
  misc_feature: MA Experiment ID: 20000794 Result: Up-regulated in Transcription
  misc_feature: MA Experiment 20000794 PARAMETER Experiment Name: At_Petals_P Parameter: Age (day) Value: 23-25 days
  misc_feature: MA Experiment 20000794 PARAMETER Experiment Name: At_Petals_P Parameter: Plant Line Value: WS
  misc_feature: MA Experiment 20000794 PARAMETER Experiment Name: At_Petals_P Parameter: Tissue Value: Petals vs. Whole plant
  misc_feature: MA Experiment ID: 20001248 Result: Down-regulated in Transcription
  misc_feature: MA Experiment 20001248 PARAMETER Experiment Name: At_Far-red-induction_P Parameter: Age (day) Value: 7
  misc_feature: MA Experiment 20001248 PARAMETER Experiment Name: At_Far-red-induction_P Parameter: Light Value: Far-red vs. White
  misc_feature: MA Experiment 20001248 PARAMETER Experiment Name: At_Far-red-induction_P Parameter: Organism Value: A. thaliana
  misc_feature: MA Experiment 20001248 PARAMETER Experiment Name: At_Far-red-induction_P Parameter: Plant Line Value: Columbia
  misc_feature: MA Experiment 20001248 PARAMETER Experiment Name: At_Far-red-induction_P Parameter: Timepoint (hr) Value: 4
  misc_feature: MA Experiment 20001248 PARAMETER Experiment Name: At_Far-red-induction_P Parameter: Tissue Value: Whole Plant
  misc_feature: MA Experiment ID: 20001555 Result: Up-regulated in Transcription
  misc_feature: MA Experiment 20001555 PARAMETER Experiment Name: At_Drought_Soil_Dry_P Parameter: Age (day) Value: 24
  misc_feature: MA Experiment 20001555 PARAMETER Experiment Name: At_Drought_Soil_Dry_P Parameter: Organism Value: A. thaliana
  misc_feature: MA Experiment 20001555 PARAMETER Experiment Name: At_Drought_Soil_Dry_P Parameter: Plant Line Value: WS
  misc_feature: MA Experiment 20001555 PARAMETER Experiment Name: At_Drought_Soil_Dry_P Parameter: Post Timepoint (hr) Value: None
  misc_feature: MA Experiment 20001555 PARAMETER Experiment Name: At_Drought_Soil_Dry_P Parameter: Post-Treatment Value: None
  misc_feature: MA Experiment 20001555 PARAMETER Experiment Name: At_Drought_Soil_Dry_P Parameter: Timepoint (day) Value: 10
  misc_feature: MA Experiment 20001555 PARAMETER Experiment Name: At_Drought_Soil_Dry_P Parameter: Treatment Value: Drought vs. No Drought
  misc_feature: MA Experiment ID: 20001556 Result: Up-regulated in Transcription
  misc_feature: MA Experiment 20001556 PARAMETER Experiment Name: At_Drought_Soil_Dry_P Parameter: Age (day) Value: 26
  misc_feature: MA Experiment 20001556 PARAMETER Experiment Name: At_Drought_Soil_Dry_P Parameter: Organism Value: A. thaliana
  misc_feature: MA Experiment 20001556 PARAMETER Experiment Name: At_Drought_Soil_Dry_P Parameter: Plant Line Value: WS
  misc_feature: MA Experiment 20001556 PARAMETER Experiment Name: At_Drought_Soil_Dry_P Parameter: Post Timepoint (hr) Value: None
  misc_feature: MA Experiment 20001556 PARAMETER Experiment Name: At_Drought_Soil_Dry_P Parameter: Post-Treatment Value: None
  misc_feature: MA Experiment 20001556 PARAMETER Experiment Name: At_Drought_Soil_Dry_P Parameter: Timepoint (day) Value: 12
  misc_feature: MA Experiment 20001556 PARAMETER Experiment Name: At_Drought_Soil_Dry_P Parameter: Treatment Value: Drought vs. No Drought
  misc_feature: MA Experiment ID: 20001557 Result: Down-regulated in Transcription
  misc_feature: MA Experiment 20001557 PARAMETER Experiment Name: At_Drought_Soil_Dry_P Parameter: Age (day) Value: 27
  misc_feature: MA Experiment 20001557 PARAMETER Experiment Name: At_Drought_Soil_Dry_P Parameter: Organism Value: A. thaliana
  misc_feature: MA Experiment 20001557 PARAMETER Experiment Name: At_Drought_Soil_Dry_P Parameter: Plant Line Value: WS
  misc_feature: MA Experiment 20001557 PARAMETER Experiment Name: At_Drought_Soil_Dry_P Parameter: Post Timepoint (hr) Value: 3
  misc_feature: MA Experiment 20001557 PARAMETER Experiment Name: At_Drought_Soil_Dry_P Parameter: Post-Treatment Value: Re-Water vs. No Drought
  misc_feature: MA Experiment 20001557 PARAMETER Experiment Name: At_Drought_Soil_Dry_P Parameter: Timepoint (day) Value: 13
  misc_feature: MA Experiment 20001557 PARAMETER Experiment Name: At_Drought_Soil_Dry_P Parameter: Treatment Value: Drought vs. No Drought
  misc_feature: MA Experiment ID: 20001559 Result: Up-regulated in Transcription
  misc_feature: MA Experiment 20001559 PARAMETER Experiment Name: At_Drought_Soil_Dry_P Parameter: Age (day) Value: 28
  misc_feature: MA Experiment 20001559 PARAMETER Experiment Name: At_Drought_Soil_Dry_P Parameter: Organism Value: A. thaliana
  misc_feature: MA Experiment 20001559 PARAMETER Experiment Name: At_Drought_Soil_Dry_P Parameter: Plant Line Value: WS
  misc_feature: MA Experiment 20001559 PARAMETER Experiment Name: At_Drought_Soil_Dry_P Parameter: Post Timepoint (hr) Value: 29
  misc_feature: MA Experiment 20001559 PARAMETER Experiment Name: At_Drought_Soil_Dry_P Parameter: Post-Treatment Value: Re-Water vs. No Drought
  misc_feature: MA Experiment 20001559 PARAMETER Experiment Name: At_Drought_Soil_Dry_P Parameter: Timepoint (day) Value: 14
  misc_feature: MA Experiment 20001559 PARAMETER Experiment Name: At_Drought_Soil_Dry_P Parameter: Treatment Value: Drought vs. No Drought
  misc_feature: MA Experiment ID: 20001757 Result: Up-regulated in Transcription
  misc_feature: MA Experiment 20001757 PARAMETER Experiment Name: At_50mM_NH4NO3_L-to-H_P Parameter: Timepoint (hr) Value: 6
  misc_feature: MA Experiment 20001757 PARAMETER Experiment Name: At_50mM_NH4NO3_L-to-H_P Parameter: Tissue Value: Leaf
  misc_feature: MA Experiment 20001757 PARAMETER Experiment Name: At_50mM_NH4NO3_L-to-H_P Parameter: Treatment Value: 50mM NH4NO3 vs 100mM Mannitol
  misc_feature: MA Experiment ID: 20001905 Result: Up-regulated in Transcription
  misc_feature: MA Experiment 20001905 PARAMETER Experiment Name: At_Drought_Reproduction_P Parameter: Age (day) Value: 40
  misc_feature: MA Experiment 20001905 PARAMETER Experiment Name: At_Drought_Reproduction_P Parameter: Organism Value: A. thaliana
  misc_feature: MA Experiment 20001905 PARAMETER Experiment Name: At_Drought_Reproduction_P Parameter: Plant Line Value: WS
  misc_feature: MA Experiment 20001905 PARAMETER Experiment Name: At_Drought_Reproduction_P Parameter: Timepoint (day) Value: 10
  misc_feature: MA Experiment 20001905 PARAMETER Experiment Name: At_Drought_Reproduction_P Parameter: Tissue Value: Rosettes
  misc_feature: MA Experiment 20001905 PARAMETER Experiment Name: At_Drought_Reproduction_P Parameter: Treatment Value: Drought vs. No Drought
agtaacaagcaagaaaaatggataaaagatggagtctacaaggaatgactgctcttgtaaccggtgcagccagcggtatcggttatgccatagtagaggagttagctggttttggagctagaatccatgtatgcgacatatccgaaactctgcttaatcaaagcttaagagaatgggaaaagaaagggtttcaagtgagtggttcagtctgtgatgtaacctctcgtcccgagagagaaaaactgatgcaaaccgtctcttcgcttttcgatggcaaactaaacattcttgtaaacaatgtgggcgtacttcgcgcaaagccaacaacagaatatgtggcagacgatttcacttttcatatctcaacaaacttggaagctgcttaccatttttgccaactttcacatcctctcttaaagacttcaggctatggaagcatcgtgttcctttcctctgtttctggggttgtgtcaataactgactgtggatcactttatggtctaacaaaaggagctctaaatcagctagctagaaatttggcatgtgaatgggcaaaagacggcataagagccaatgcggttgcacctaatgttgtcaagactgctcagtctcaattctttcttcaagacgtcagtaaaaaggagggattgtttagtagaactccacttggtcggtctggagagccgaatgaagtagcatcactagtggtcttcttgtgtcttcctgcagcttcttatatcacaggtcaaaccatttgtattgatggaggcctcacggtttacggtttctcctctcaaccacaggcttgaaaatggtcttgtcgtttcttgtctgtttaaatattctctccctaataaaatctctcatcacgctatgagtttatgtcccttgtacaaaaacacacaatgtcaaattgttgctctttagtcttgtaagagaaatgagggacttatctatatgaaggatcaattaaact

SEQ ID NO: 96772 - protein, 263 aa, Arabidopsis thaliana
  peptide (1)..(263): Ceres Seq. ID no. 12734684
  misc_feature (1)..(263): Homolog of NCBI NO: 15227070 NR Description: putative tropinone reductase; protein id: supported by cDNA: gi_18252898 [Arabidopsis thaliana]
  misc_feature (1)..(263): Homolog of NCBI NO: 15227072 NR Description: putative tropinone reductase; protein id: supported by cDNA: 1637. [Arabidopsis thaliana]
  misc_feature (1)..(263): Homolog of NCBI NO: 15529236 NR Description: At2g29320/F16P2.30 [Arabidopsis thaliana]
  misc_feature (1)..(263): Homolog of NCBI NO: 21553753 NR Description: putative tropinone reductase [Arabidopsis
  misc_feature (1)..(263): Homolog of NCBI NO: 15227071 NR Description: putative tropinone reductase; protein id: [Arabidopsis thaliana] >gi|25283128|pir||G84694 probable
  misc_feature (1)..(262): Homolog of NCBI NO: 30684202 NR Description: short-chain dehydrogenase/reductase family [Arabidopsis thaliana] >gi|25283131|pir||B84695 probable
  misc_feature (1)..(263): Homolog of NCBI NO: 15224550 NR Description: putative tropinone reductase; protein id: [Arabidopsis thaliana] >gi|25283135|pir||C84711 probable
  misc_feature (1)..(261): Homolog of NCBI NO: 15227073 NR Description: putative tropinone reductase; protein id: [Arabidopsis thaliana] >gi|25283130|pir||A84695 probable
  misc_feature (1)..(262): Homolog of NCBI NO: 15222399 NR Description: tropinone reductase-I, putative; protein id: supported by cDNA: gi_13605590, supported by cDNA: gi_15777866 thaliana] >gi|13605591|gb|AAK32789.1|AF361621_1
  misc_feature (1)..(262): Homolog of NCBI NO: 25406975 NR Description: protein F22G5.20 [imported] - Arabidopsis >gi|8778545|gb|AAF79553.1|AC022464_11 F22G5.20 [Arabidopsis
MDKRWSLQGMTALVTGAASGIGYAIVEELAGFGARIHVCDISETLLNQSLREWEKKGFQVSGSVCDVTSRPEREKLMQTVSSLFDGKLNILVNNVGVLRAKPTTEYVADDFTFHISTNLEAAYHFCQLSHPLLKTSGYGSIVFLSSVSGVVSITDCGSLYGLTKGALNQLARNLACEWAKDGIRANAVAPNVVKTAQSQFFLQDVSKKEGLFSRTPLGRSGEPNEVASLVVFLCLPAASYITGQTICIDGGLTVYGFSSQPQA

SEQ ID NO: 96773 - protein, 254 aa, Arabidopsis thaliana
  peptide (1)..(254): Ceres Seq. ID no. 12734685
  misc_feature (1)..(254): Homolog of NCBI NO: 15227070 NR Description: putative tropinone reductase; protein id: supported by cDNA: gi_18252898 [Arabidopsis thaliana]
  misc_feature (1)..(254): Homolog of NCBI NO: 15227072 NR Description: putative tropinone reductase; protein id: supported by cDNA: 1637. [Arabidopsis thaliana]
  misc_feature (1)..(254): Homolog of NCBI NO: 15529236 NR Description: At2g29320/F16P2.30 [Arabidopsis thaliana]
  misc_feature (1)..(254): Homolog of NCBI NO: 21553753 NR Description: putative tropinone reductase [Arabidopsis
  misc_feature (1)..(254): Homolog of NCBI NO: 15227071 NR Description: putative tropinone reductase; protein id: [Arabidopsis thaliana] >gi|25283128|pir||G84694 probable
  misc_feature (1)..(253): Homolog of NCBI NO: 30684202 NR Description: short-chain dehydrogenase/reductase family [Arabidopsis thaliana] >gi|25283131|pir||B84695 probable
  misc_feature (1)..(254): Homolog of NCBI NO: 15224550 NR Description: putative tropinone reductase; protein id: [Arabidopsis thaliana] >gi|25283135|pir||C84711 probable
  misc_feature (1)..(252): Homolog of NCBI NO: 15227073 NR Description: putative tropinone reductase; protein id: [Arabidopsis thaliana] >gi|25283130|pir||A84695 probable
  misc_feature (1)..(253): Homolog of NCBI NO: 15222399 NR Description: tropinone reductase-I, putative; protein id: supported by cDNA: gi_13605590, supported by cDNA: gi_15777866 thaliana] >gi|13605591|gb|AAK32789.1|AF361621_1
  misc_feature (1)..(253): Homolog of NCBI NO: 25406975 NR Description: protein F22G5.20 [imported] - Arabidopsis >gi|8778545|gb|AAF79553.1|AC022464_11 F22G5.20 [Arabidopsis
MTALVTGAASGIGYAIVEELAGFGARIHVCDISETLLNQSLREWEKKGFQVSGSVCDVTSRPEREKLMQTVSSLFDGKLNILVNNVGVLRAKPTTEYVADDFTFHISTNLEAAYHFCQLSHPLLKTSGYGSIVFLSSVSGVVSITDCGSLYGLTKGALNQLARNLACEWAKDGIRANAVAPNVVKTAQSQFFLQDVSKKEGLFSRTPLGRSGEPNEVASLVVFLCLPAASYITGQTICIDGGLTVYGFSSQPQA

SEQ ID NO: 96774 - protein, 187 aa, Arabidopsis thaliana
  peptide (1)..(187): Ceres Seq. ID no. 12734686
  misc_feature (1)..(187): Homolog of NCBI NO: 15227070 NR Description: putative tropinone reductase; protein id: supported by cDNA: gi_18252898 [Arabidopsis thaliana]
  misc_feature (1)..(187): Homolog of NCBI NO: 15227072 NR Description: putative tropinone reductase; protein id: supported by cDNA: 1637. [Arabidopsis thaliana]
  misc_feature (1)..(187): Homolog of NCBI NO: 15529236 NR Description: At2g29320/F16P2.30 [Arabidopsis thaliana]
  misc_feature (1)..(187): Homolog of NCBI NO: 21553753 NR Description: putative tropinone reductase [Arabidopsis
  misc_feature (1)..(187): Homolog of NCBI NO: 15227071 NR Description: putative tropinone reductase; protein id: [Arabidopsis thaliana] >gi|25283128|pir||G84694 probable
  misc_feature (1)..(186): Homolog of NCBI NO: 30684202 NR Description: short-chain dehydrogenase/reductase family [Arabidopsis thaliana] >gi|25283131|pir||B84695 probable
  misc_feature (1)..(187): Homolog of NCBI NO: 15224550 NR Description: putative tropinone reductase; protein id: [Arabidopsis thaliana] >gi|25283135|pir||C84711 probable
  misc_feature (1)..(185): Homolog of NCBI NO: 15227073 NR Description: putative tropinone reductase; protein id: [Arabidopsis thaliana] >gi|25283130|pir||A84695 probable
  misc_feature (1)..(186): Homolog of NCBI NO: 15222399 NR Description: tropinone reductase-I, putative; protein id: supported by cDNA: gi_13605590, supported by cDNA: gi_15777866 thaliana] >gi|13605591|gb|AAK32789.1|AF361621_1
  misc_feature (1)..(186): Homolog of NCBI NO: 25406975 NR Description: protein F22G5.20 [imported] - Arabidopsis >gi|8778545|gb|AAF79553.1|AC022464_11 F22G5.20 [Arabidopsis
MQTVSSLFDGKLNILVNNVGVLRAKPTTEYVADDFTFHISTNLEAAYHFCQLSHPLLKTSGYGSIVFLSSVSGVVSITDCGSLYGLTKGALNQLARNLACEWAKDGIRANAVAPNVVKTAQSQFFLQDVSKKEGLFSRTPLGRSGEPNEVASLVVFLCLPAASYITGQTICIDGGLTVYGFSSQPQA

SEQ ID NO: 96775 - DNA, 789 bp, Arabidopsis thaliana
  misc_feature (1)..(789): Ceres Seq. ID no. 12734687
  misc_feature: MA Experiment ID: 20000180 Result: Up-regulated in Transcription
  misc_feature: MA Experiment 20000180 PARAMETER Experiment Name: At_Germinating_Seeds_P Parameter: Age (hr) Value: 24 vs. 0
  misc_feature: MA Experiment 20000180 PARAMETER Experiment Name: At_Germinating_Seeds_P Parameter: Tissue Value: Germinating Seeds
  misc_feature: MA Experiment ID: 20000182 Result: Down-regulated in Transcription
  misc_feature: MA Experiment 20000182 PARAMETER Experiment Name: At_2mM_SA_P Parameter: Age (day) Value: 14
  misc_feature: MA Experiment 20000182 PARAMETER Experiment Name: At_2mM_SA_P Parameter: Organism Value: A. thaliana
  misc_feature: MA Experiment 20000182 PARAMETER Experiment Name: At_2mM_SA_P Parameter: Plant Line Value: WS
  misc_feature: MA Experiment 20000182 PARAMETER Experiment Name: At_2mM_SA_P Parameter: Timepoint (hr) Value: 6
  misc_feature: MA Experiment 20000182 PARAMETER Experiment Name: At_2mM_SA_P Parameter: Tissue Value: Aerial
  misc_feature: MA Experiment 20000182 PARAMETER Experiment Name: At_2mM_SA_P Parameter: Treatment Value: 2mM SA vs. No Treatment
  misc_feature: MA Experiment ID: 20000227 Result: Down-regulated in Transcription
  misc_feature: MA Experiment 20000227 PARAMETER Experiment Name: At_Root-Tips-vs-Tops_P Parameter: Tissue Value: Root Tips vs. Root Tops
  misc_feature: MA Experiment ID: 20000438 Result: Up-regulated in Transcription
  misc_feature: MA Experiment 20000438 PARAMETER Experiment Name: At_Shoots__P Parameter: Age (day) Value: 14
  misc_feature: MA Experiment 20000438 PARAMETER Experiment Name: At_Shoots__P Parameter: Tissue Value: Shoots vs. Whole Plant
  misc_feature: MA Experiment ID: 20000439 Result: Down-regulated in Transcription
  misc_feature: MA Experiment 20000439 PARAMETER Experiment Name: At_Roots__P Parameter: Age (day) Value: 14 vs. 21
  misc_feature: MA Experiment 20000439 PARAMETER Experiment Name: At_Roots__P Parameter: Organism Value: A. thaliana
  misc_feature: MA Experiment 20000439 PARAMETER Experiment Name: At_Roots__P Parameter: Tissue Value: Roots vs. Whole Plant
  misc_feature: MA Experiment ID: 20000495 Result: Down-regulated in Transcription
  misc_feature: MA Experiment 20000495 PARAMETER Experiment Name: At_Guard_Cells_P Parameter: Harvest Date Value: 8/2/2002
  misc_feature: MA Experiment 20000495 PARAMETER Experiment Name: At_Guard_Cells_P Parameter: Organism Value: A. thaliana
  misc_feature: MA Experiment 20000495 PARAMETER Experiment Name: At_Guard_Cells_P Parameter: Tissue Value: Guard Cells vs. Leaves
  misc_feature: MA Experiment ID: 20000496 Result: Down-regulated in Transcription
  misc_feature: MA Experiment 20000496 PARAMETER Experiment Name: At_Guard_Cells_P Parameter: Harvest Date Value: 7/19/2002
  misc_feature: MA Experiment 20000496 PARAMETER Experiment Name: At_Guard_Cells_P Parameter: Organism Value: Canola
  misc_feature: MA Experiment 20000496 PARAMETER Experiment Name: At_Guard_Cells_P Parameter: Tissue Value: Guard Cells vs. Leaves
  misc_feature: MA Experiment ID: 20000527 Result: Up-regulated in Transcription
  misc_feature: MA Experiment 20000527 PARAMETER Experiment Name: At_10percent_PEG_P Parameter: Age (day) Value: 20
  misc_feature: MA Experiment 20000527 PARAMETER Experiment Name: At_10percent_PEG_P Parameter: Organism Value: A. thaliana
  misc_feature: MA Experiment 20000527 PARAMETER Experiment Name: At_10percent_PEG_P Parameter: Plant Line Value: WS
  misc_feature: MA Experiment 20000527 PARAMETER Experiment Name: At_10percent_PEG_P Parameter: Timepoint (day) Value: 20
  misc_feature: MA Experiment 20000527 PARAMETER Experiment Name: At_10percent_PEG_P Parameter: Tissue Value: Whole Plant
  misc_feature: MA Experiment 20000527 PARAMETER Experiment Name: At_10percent_PEG_P Parameter: Treatment Value: 10percent PEG vs. No Treatment
  misc_feature: MA Experiment ID: 20000794 Result: Up-regulated in Transcription
  misc_feature: MA Experiment 20000794 PARAMETER Experiment Name: At_Petals_P Parameter: Age (day) Value: 23-25 days
  misc_feature: MA Experiment 20000794 PARAMETER Experiment Name: At_Petals_P Parameter: Plant Line Value: WS
  misc_feature: MA Experiment 20000794 PARAMETER Experiment Name: At_Petals_P Parameter: Tissue Value: Petals vs. Whole plant
  misc_feature: MA Experiment ID: 20001557 Result: Down-regulated in Transcription
  misc_feature: MA Experiment 20001557 PARAMETER Experiment Name: At_Drought_Soil_Dry_P Parameter: Age (day) Value: 27
  misc_feature: MA Experiment 20001557 PARAMETER Experiment Name: At_Drought_Soil_Dry_P Parameter: Organism Value: A. thaliana
  misc_feature: MA Experiment 20001557 PARAMETER Experiment Name: At_Drought_Soil_Dry_P Parameter: Plant Line Value: WS
  misc_feature: MA Experiment 20001557 PARAMETER Experiment Name: At_Drought_Soil_Dry_P Parameter: Post Timepoint (hr) Value: 3
  misc_feature: MA Experiment 20001557 PARAMETER Experiment Name: At_Drought_Soil_Dry_P Parameter: Post-Treatment Value: Re-Water vs. No Drought
  misc_feature: MA Experiment 20001557 PARAMETER Experiment Name: At_Drought_Soil_Dry_P Parameter: Timepoint (day) Value: 13
  misc_feature: MA Experiment 20001557 PARAMETER Experiment Name: At_Drought_Soil_Dry_P Parameter: Treatment Value: Drought vs. No Drought
  misc_feature: MA Experiment ID: 20001757 Result: Up-regulated in Transcription
  misc_feature: MA Experiment 20001757 PARAMETER Experiment Name: At_50mM_NH4NO3_L-to-H_P Parameter: Timepoint (hr) Value: 6
  misc_feature: MA Experiment 20001757 PARAMETER Experiment Name: At_50mM_NH4NO3_L-to-H_P Parameter: Tissue Value: Leaf
  misc_feature: MA Experiment 20001757 PARAMETER Experiment Name: At_50mM_NH4NO3_L-to-H_P Parameter: Treatment Value: 50mM NH4NO3 vs 100mM Mannitol
  misc_feature: MA Experiment ID: 20001905 Result: Down-regulated in Transcription
  misc_feature: MA Experiment 20001905 PARAMETER Experiment Name: At_Drought_Reproduction_P Parameter: Age (day) Value: 40
  misc_feature: MA Experiment 20001905 PARAMETER Experiment Name: At_Drought_Reproduction_P Parameter: Organism Value: A. thaliana
  misc_feature: MA Experiment 20001905 PARAMETER Experiment Name: At_Drought_Reproduction_P Parameter: Plant Line Value: WS
  misc_feature: MA Experiment 20001905 PARAMETER Experiment Name: At_Drought_Reproduction_P Parameter: Timepoint (day) Value: 10
  misc_feature: MA Experiment 20001905 PARAMETER Experiment Name: At_Drought_Reproduction_P Parameter: Tissue Value: Rosettes
  misc_feature: MA Experiment 20001905 PARAMETER Experiment Name: At_Drought_Reproduction_P Parameter: Treatment Value: Drought vs. No Drought
  misc_feature: MA Experiment ID: 20001911 Result: Down-regulated in Transcription
  misc_feature: MA Experiment 20001911 PARAMETER Experiment Name: At_Drought_Reproduction_P Parameter: Age (day) Value: 40
  misc_feature: MA Experiment 20001911 PARAMETER Experiment Name: At_Drought_Reproduction_P Parameter: Organism Value: A. thaliana
  misc_feature: MA Experiment 20001911 PARAMETER Experiment Name: At_Drought_Reproduction_P Parameter: Plant Line Value: WS
  misc_feature: MA Experiment 20001911 PARAMETER Experiment Name: At_Drought_Reproduction_P Parameter: Timepoint (day) Value: 10
  misc_feature: MA Experiment 20001911 PARAMETER Experiment Name: At_Drought_Reproduction_P Parameter: Tissue Value: Flowers
  misc_feature: MA Experiment 20001911 PARAMETER Experiment Name: At_Drought_Reproduction_P Parameter: Treatment Value: Drought vs. No Drought
atggataagagatggagtctacaaggtatgactgctcttgtaaccggtgcagccagtggaatcgggtatgccatagtagaggagttagcaagttttggagctataatccatatatgtgacatctctgaaactcttctcagtcaaagtttaagtgaatgggaaaagaaagggtttcaagtgagtggttcaatctgtgatgtagcttctcggcccgatagagaaaaactgatgcaaaccgtctcctcgctgtttgatggcaaactcaacattcttgtaaacaatgttggtgtaatacgtggaaagccaacaacagaatatgtggcagaggatttctcttaccacatctcaacaaatttggaaccagctttccattttagccagctttcacatcttcttttaaaggcttcaggatttggaagcatcgtctttatgtcctctgctacaggggttgtatcagttcaatgtggatccatttatagtctaactaaaggagctttgaaccagttaactagaaatttagcatgtgaatgggcaaaagacggcataagagccaatgctgttgcacctaatgttgtcaagactcctttgtctcaatcttatctcgaggacgtcggtttcaaggaggcattgttcagtagaactccacttggtcgcgctggagagccgaatgaagttgcatcactagtggtcttcttgtgtctaccagcagcttcttatattactggtcaaaccatttgtattgatggtggtttcactgttaatgccttctcttataagccacaggcttga

SEQ ID NO: 96776 - protein, 262 aa, Arabidopsis thaliana
  peptide (1)..(262): Ceres Seq. ID no. 12734688
  misc_feature (1)..(262): Homolog of NCBI NO: 15227071 NR Description: putative tropinone reductase; protein id: [Arabidopsis thaliana] >gi|25283128|pir||G84694 probable
  misc_feature (1)..(262): Homolog of NCBI NO: 15227072 NR Description: putative tropinone reductase; protein id: supported by cDNA: 1637. [Arabidopsis thaliana]
  misc_feature (1)..(262): Homolog of NCBI NO: 15529236 NR Description: At2g29320/F16P2.30 [Arabidopsis thaliana]
  misc_feature (1)..(262): Homolog of NCBI NO: 15227070 NR Description: putative tropinone reductase; protein id: supported by cDNA: gi_18252898 [Arabidopsis thaliana]
  misc_feature (1)..(262): Homolog of NCBI NO: 21553753 NR Description: putative tropinone reductase [Arabidopsis
  misc_feature (1)..(261): Homolog of NCBI NO: 30684202 NR Description: short-chain dehydrogenase/reductase family [Arabidopsis thaliana] >gi|25283131|pir||B84695 probable
  misc_feature (1)..(262): Homolog of NCBI NO: 15224550 NR Description: putative tropinone reductase; protein id: [Arabidopsis thaliana] >gi|25283135|pir||C84711 probable
  misc_feature (1)..(260): Homolog of NCBI NO: 15227073 NR Description: putative tropinone reductase; protein id: [Arabidopsis thaliana] >gi|25283130|pir||A84695 probable
  misc_feature (3)..(261): Homolog of NCBI NO: 15222399 NR Description: tropinone reductase-I, putative; protein id: supported by cDNA: gi_13605590, supported by cDNA: gi_15777866 thaliana] >gi|13605591|gb|AAK32789.1|AF361621_1
  misc_feature (3)..(261): Homolog of NCBI NO: 25406975 NR Description: protein F22G5.20 [imported] - Arabidopsis >gi|8778545|gb|AAF79553.1|AC022464_11 F22G5.20 [Arabidopsis
MDKRWSLQGMTALVTGAASGIGYAIVEELASFGAIIHICDISETLLSQSLSEWEKKGFQVSGSICDVASRPDREKLMQTVSSLFDGKLNILVNNVGVIRGKPTTEYVAEDFSYHISTNLEPAFHFSQLSHLLLKASGFGSIVFMSSATGVVSVQCGSIYSLTKGALNQLTRNLACEWAKDGIRANAVAPNVVKTPLSQSYLEDVGFKEALFSRTPLGRAGEPNEVASLVVFLCLPAASYITGQTICIDGGFTVNAFSYKPQA

SEQ ID NO: 96777 - protein, 253 aa, Arabidopsis thaliana
  peptide (1)..(253): Ceres Seq. ID no. 12734689
  misc_feature (1)..(253): Homolog of NCBI NO: 15227071 NR Description: putative tropinone reductase; protein id: [Arabidopsis thaliana] >gi|25283128|pir||G84694 probable
  misc_feature (1)..(253): Homolog of NCBI NO: 15227072 NR Description: putative tropinone reductase; protein id: supported by cDNA: 1637. [Arabidopsis thaliana]
  misc_feature (1)..(253): Homolog of NCBI NO: 15529236 NR Description: At2g29320/F16P2.30 [Arabidopsis thaliana]
  misc_feature (1)..(253): Homolog of NCBI NO: 15227070 NR Description: putative tropinone reductase; protein id: supported by cDNA: gi_18252898 [Arabidopsis thaliana]
  misc_feature (1)..(253): Homolog of NCBI NO: 21553753 NR Description: putative tropinone reductase [Arabidopsis
  misc_feature (1)..(252): Homolog of NCBI NO: 30684202 NR Description: short-chain dehydrogenase/reductase family [Arabidopsis thaliana] >gi|25283131|pir||B84695 probable
  misc_feature (1)..(253): Homolog of NCBI NO: 15224550 NR Description: putative tropinone reductase; protein id: [Arabidopsis thaliana] >gi|25283135|pir||C84711 probable
  misc_feature (1)..(251): Homolog of NCBI NO: 15227073 NR Description: putative tropinone reductase; protein id: [Arabidopsis thaliana] >gi|25283130|pir||A84695 probable
  misc_feature (1)..(252): Homolog of NCBI NO: 15222399 NR Description: tropinone reductase-I, putative; protein id: supported by cDNA: gi_13605590, supported by cDNA: gi_15777866 thaliana] >gi|13605591|gb|AAK32789.1|AF361621_1
  misc_feature (1)..(252): Homolog of NCBI NO: 25406975 NR Description: protein F22G5.20 [imported] - Arabidopsis >gi|8778545|gb|AAF79553.1|AC022464_11 F22G5.20 [Arabidopsis
MTALVTGAASGIGYAIVEELASFGAIIHICDISETLLSQSLSEWEKKGFQVSGSICDVASRPDREKLMQTVSSLFDGKLNILVNNVGVIRGKPTTEYVAEDFSYHISTNLEPAFHFSQLSHLLLKASGFGSIVFMSSATGVVSVQCGSIYSLTKGALNQLTRNLACEWAKDGIRANAVAPNVVKTPLSQSYLEDVGFKEALFSRTPLGRAGEPNEVASLVVFLCLPAASYITGQTICIDGGFTVNAFSYKPQA

SEQ ID NO: 96778 - protein, 186 aa, Arabidopsis thaliana
  peptide (1)..(186): Ceres Seq. ID no. 12734690
  misc_feature (1)..(186): Homolog of NCBI NO: 15227071 NR Description: putative tropinone reductase; protein id: [Arabidopsis thaliana] >gi|25283128|pir||G84694 probable
  misc_feature (1)..(186): Homolog of NCBI NO: 15227072 NR Description: putative tropinone reductase; protein id: supported by cDNA: 1637. [Arabidopsis thaliana]
  misc_feature (1)..(186): Homolog of NCBI NO: 15529236 NR Description: At2g29320/F16P2.30 [Arabidopsis thaliana]
  misc_feature (1)..(186): Homolog of NCBI NO: 15227070 NR Description: putative tropinone reductase; protein id: supported by cDNA: gi_18252898 [Arabidopsis thaliana]
  misc_feature (1)..(186): Homolog of NCBI NO: 21553753 NR Description: putative tropinone reductase [Arabidopsis
  misc_feature (1)..(185): Homolog of NCBI NO: 30684202 NR Description: short-chain dehydrogenase/reductase family [Arabidopsis thaliana] >gi|25283131|pir||B84695 probable
  misc_feature (1)..(186): Homolog of NCBI NO: 15224550 NR Description: putative tropinone reductase; protein id: [Arabidopsis thaliana] >gi|25283135|pir||C84711 probable
  misc_feature (1)..(184): Homolog of NCBI NO: 15227073 NR Description: putative tropinone reductase; protein id: [Arabidopsis thaliana] >gi|25283130|pir||A84695 probable
  misc_feature (1)..(185): Homolog of NCBI NO: 15222399 NR Description: tropinone reductase-I, putative; protein id: supported by cDNA: gi_13605590, supported by cDNA: gi_15777866 thaliana] >gi|13605591|gb|AAK32789.1|AF361621_1
  misc_feature (1)..(185): Homolog of NCBI NO: 25406975 NR Description: protein F22G5.20 [imported] - Arabidopsis >gi|8778545|gb|AAF79553.1|AC022464_11 F22G5.20 [Arabidopsis
MQTVSSLFDGKLNILVNNVGVIRGKPTTEYVAEDFSYHISTNLEPAFHFSQLSHLLLKASGFGSIVFMSSATGVVSVQCGSIYSLTKGALNQLTRNLACEWAKDGIRANAVAPNVVKTPLSQSYLEDVGFKEALFSRTPLGRAGEPNEVASLVVFLCLPAASYITGQTICIDGGFTVNAFSYKPQA

SEQ ID NO: 96779 - DNA, 983 bp, Arabidopsis thaliana
  misc_feature (1)..(983): Ceres Seq. ID no. 12734691
  misc_feature: MA Experiment ID: 20000214 Result: Down-regulated in Transcription
  misc_feature: MA Experiment 20000214 PARAMETER Experiment Name: At_4deg_Cold_P Parameter: Timepoint (hr) Value: 6
  misc_feature: MA Experiment ID: 20000227 Result: Down-regulated in Transcription
  misc_feature: MA Experiment 20000227 PARAMETER Experiment Name: At_Root-Tips-vs-Tops_P Parameter: Tissue Value: Root Tips vs. Root Tops
  misc_feature: MA Experiment ID: 20000264 Result: Up-regulated in Transcription
  misc_feature: MA Experiment 20000264 PARAMETER Experiment Name: At_Open_Flower_P Parameter: Age (day) Value: 21
  misc_feature: MA Experiment 20000264 PARAMETER Experiment Name: At_Open_Flower_P Parameter: Plant Line Value: WS
  misc_feature: MA Experiment 20000264 PARAMETER Experiment Name: At_Open_Flower_P Parameter: Tissue Value: Open Flower vs. Whole Plant
  misc_feature: MA Experiment ID: 20000439 Result: Down-regulated in Transcription
  misc_feature: MA Experiment 20000439 PARAMETER Experiment Name: At_Roots__P Parameter: Age (day) Value: 14 vs. 21
  misc_feature: MA Experiment 20000439 PARAMETER Experiment Name: At_Roots__P Parameter: Organism Value: A. thaliana
  misc_feature: MA Experiment 20000439 PARAMETER Experiment Name: At_Roots__P Parameter: Tissue Value: Roots vs. Whole Plant
  misc_feature: MA Experiment ID: 20000794 Result: Up-regulated in Transcription
  misc_feature: MA Experiment 20000794 PARAMETER Experiment Name: At_Petals_P Parameter: Age (day) Value: 23-25 days
  misc_feature: MA Experiment 20000794 PARAMETER Experiment Name: At_Petals_P Parameter: Plant Line Value: WS
  misc_feature: MA Experiment 20000794 PARAMETER Experiment Name: At_Petals_P Parameter: Tissue Value: Petals vs. Whole plant
aacttacaagcaaaatggacaaaagatggagtctcaaaggtatgactgctcttgtgaccggtggagccagtggaatcggttatgccatagtagaagagttggctggttttggagctagaatccatgtatgtgacatctctgaagctaagctcaatcaaagtttaagcgaatgggaaaagaaaggttttcaagtaagtggctcagtttgtgatgtagcctctcgtcccgagagagaagaactgatgcaaaccgtctcctcgcagttcgatggcaaactcaacattcttgtaagcaatgtgggcgtaatccgctcaaagccaacaacagaatataccgaagacgatttcgcttttcatatatcatcaaacgtggaagctgcttaccattttagccagctttcacatcctctcctaaaggcttcaggctatggaagcatcatctttgtttcctctattgcaggggttatatcttttgacgctggatccatttatggtctaacaaaaggagctttgattcagctagctaaaaatttggcatgtgaatgggcaaaagacggcataagagccaacgctgttgcgcctaatgtcatcaatactcctctgtctcaatctgtaataaactaacaactttttcttttctttttttatgtgaatgtaacaacgattttatgtgaattaatctaaccctctcttaattgtgtttctgcaagtatcttgaggacgtcagtttcaagaaggcattgttgagtaggactccacttggtcgtgttggagagccaaatgaagttgcatcactagtggccttcttgtgtctacctgcagcttcttatattactggtcagactatttgtgttgatggaggtctcaccgttaatggcttctcctatcagccagaggtttgagtatggtcatgtctcgttctttttgtttgtctagaattttcagtgttctctcaaataaaatatttcaaactatgagtatatg

SEQ ID NO: 96780 - protein, 206 aa, Arabidopsis thaliana
  peptide (1)..(206): Ceres Seq. ID no. 12734692
  misc_feature (5)..(205): Homolog of NCBI NO: 30684202 NR Description: short-chain dehydrogenase/reductase family [Arabidopsis thaliana] >gi|25283131|pir||B84695 probable
  misc_feature (1)..(205): Homolog of NCBI NO: 15227072 NR Description: putative tropinone reductase; protein id: supported by cDNA: 1637. [Arabidopsis thaliana]
  misc_feature (5)..(205): Homolog of NCBI NO: 15529236 NR Description: At2g29320/F16P2.30 [Arabidopsis thaliana]
  misc_feature (5)..(205): Homolog of NCBI NO: 21553753 NR Description: putative tropinone reductase [Arabidopsis
  misc_feature (5)..(202): Homolog of NCBI NO: 15227070 NR Description: putative tropinone reductase; protein id: supported by cDNA: gi_18252898 [Arabidopsis thaliana]
  misc_feature (5)..(205): Homolog of NCBI NO: 15227071 NR Description: putative tropinone reductase; protein id: [Arabidopsis thaliana] >gi|25283128|pir||G84694 probable
  misc_feature (5)..(202): Homolog of NCBI NO: 15227073 NR Description: putative tropinone reductase; protein id: [Arabidopsis thaliana] >gi|25283130|pir||A84695 probable
  misc_feature (5)..(202): Homolog of NCBI NO: 15224550 NR Description: putative tropinone reductase; protein id: [Arabidopsis thaliana] >gi|25283135|pir||C84711 probable
  misc_feature (5)..(206): Homolog of NCBI NO: 18402017 NR Description: putative tropinone reductase; protein id: supported by cDNA: gi_14334839 [Arabidopsis thaliana] putative tropinone reductase [Arabidopsis thaliana]
  misc_feature (3)..(204): Homolog of NCBI NO: 15222399 NR Description: tropinone reductase-I, putative; protein id: supported by cDNA: gi_13605590, supported by cDNA: gi_15777866 thaliana] >gi|13605591|gb|AAK32789.1|AF361621_1
LTSKMDKRWSLKGMTALVTGGASGIGYAIVEELAGFGARIHVCDISEAKLNQSLSEWEKKGFQVSGSVCDVASRPEREELMQTVSSQFDGKLNILVSNVGVIRSKPTTEYTEDDFAFHISSNVEAAYHFSQLSHPLLKASGYGSIIFVSSIAGVISFDAGSIYGLTKGALIQLAKNLACEWAKDGIRANAVAPNVINTPLSQSVIN

SEQ ID NO: 96781 - protein, 202 aa, Arabidopsis thaliana
  peptide (1)..(202): Ceres Seq. ID no. 12734693
  misc_feature (1)..(201): Homolog of NCBI NO: 30684202 NR Description: short-chain dehydrogenase/reductase family [Arabidopsis thaliana] >gi|25283131|pir||B84695 probable
  misc_feature (1)..(201): Homolog of NCBI NO: 15227072 NR Description: putative tropinone reductase; protein id: supported by cDNA: 1637. [Arabidopsis thaliana]
  misc_feature (1)..(201): Homolog of NCBI NO: 15529236 NR Description: At2g29320/F16P2.30 [Arabidopsis thaliana]
  misc_feature (1)..(201): Homolog of NCBI NO: 21553753 NR Description: putative tropinone reductase [Arabidopsis
  misc_feature (1)..(198): Homolog of NCBI NO: 15227070 NR Description: putative tropinone reductase; protein id: supported by cDNA: gi_18252898 [Arabidopsis thaliana]
  misc_feature (1)..(201): Homolog of NCBI NO: 15227071 NR Description: putative tropinone reductase; protein id: [Arabidopsis thaliana] >gi|25283128|pir||G84694 probable
  misc_feature (1)..(198): Homolog of NCBI NO: 15227073 NR Description: putative tropinone reductase; protein id: [Arabidopsis thaliana] >gi|25283130|pir||A84695 probable
  misc_feature (1)..(198): Homolog of NCBI NO: 15224550 NR Description: putative tropinone reductase; protein id: [Arabidopsis thaliana] >gi|25283135|pir||C84711 probable
  misc_feature (1)..(202): Homolog of NCBI NO: 18402017 NR Description: putative tropinone reductase; protein id: supported by cDNA: gi_14334839 [Arabidopsis thaliana] putative tropinone reductase [Arabidopsis thaliana]
  misc_feature (1)..(200): Homolog of NCBI NO: 15222399 NR Description: tropinone reductase-I, putative; protein id: supported by cDNA: gi_13605590, supported by cDNA: gi_15777866 thaliana] >gi|13605591|gb|AAK32789.1|AF361621_1
MDKRWSLKGMTALVTGGASGIGYAIVEELAGFGARIHVCDISEAKLNQSLSEWEKKGFQVSGSVCDVASRPEREELMQTVSSQFDGKLNILVSNVGVIRSKPTTEYTEDDFAFHISSNVEAAYHFSQLSHPLLKASGYGSIIFVSSIAGVISFDAGSIYGLTKGALIQLAKNLACEWAKDGIRANAVAPNVINTPLSQSVIN

SEQ ID NO: 96782 - protein, 193 aa, Arabidopsis thaliana
  peptide (1)..(193): Ceres Seq. ID no. 12734694
  misc_feature (1)..(192): Homolog of NCBI NO: 30684202 NR Description: short-chain dehydrogenase/reductase family [Arabidopsis thaliana] >gi|25283131|pir||B84695 probable
  misc_feature (1)..(192): Homolog of NCBI NO: 15227072 NR Description: putative tropinone reductase; protein id: supported by cDNA: 1637. [Arabidopsis thaliana]
  misc_feature (1)..(192): Homolog of NCBI NO: 15529236 NR Description: At2g29320/F16P2.30 [Arabidopsis thaliana]
  misc_feature (1)..(192): Homolog of NCBI NO: 21553753 NR Description: putative tropinone reductase [Arabidopsis
  misc_feature (1)..(189): Homolog of NCBI NO: 15227070 NR Description: putative tropinone reductase; protein id: supported by cDNA: gi_18252898 [Arabidopsis thaliana]
  misc_feature (1)..(192): Homolog of NCBI NO: 15227071 NR Description: putative tropinone reductase; protein id: [Arabidopsis thaliana] >gi|25283128|pir||G84694 probable
  misc_feature (1)..(189): Homolog of NCBI NO: 15227073 NR Description: putative tropinone reductase; protein id: [Arabidopsis thaliana] >gi|25283130|pir||A84695 probable
  misc_feature (1)..(189): Homolog of NCBI NO: 15224550 NR Description: putative tropinone reductase; protein id: [Arabidopsis thaliana] >gi|25283135|pir||C84711 probable
  misc_feature (1)..(193): Homolog of NCBI NO: 18402017 NR Description: putative tropinone reductase; protein id: supported by cDNA: gi_14334839 [Arabidopsis thaliana] putative tropinone reductase [Arabidopsis thaliana]
  misc_feature (1)..(191): Homolog of NCBI NO: 15222399 NR Description: tropinone reductase-I, putative; protein id: supported by cDNA: gi_13605590, supported by cDNA: gi_15777866 thaliana] >gi|13605591|gb|AAK32789.1|AF361621_1
MTALVTGGASGIGYAIVEELAGFGARIHVCDISEAKLNQSLSEWEKKGFQVSGSVCDVASRPEREELMQTVSSQFDGKLNILVSNVGVIRSKPTTEYTEDDFAFHISSNVEAAYHFSQLSHPLLKASGYGSIIFVSSIAGVISFDAGSIYGLTKGALIQLAKNLACEWAKDGIRANAVAPNVINTPLSQSVIN

SEQ ID NO: 96783 - DNA, 552 bp, Arabidopsis thaliana
  misc_feature (1)..(552): Ceres Seq. ID no. 12734695
  misc_feature: MA Experiment ID: 20000171 Result: Up-regulated in Transcription
  misc_feature: MA Experiment 20000171 PARAMETER Experiment Name: At_42deg_Heat_P Parameter: Age (day) Value: 14
  misc_feature: MA Experiment 20000171 PARAMETER Experiment Name: At_42deg_Heat_P Parameter: Organism Value: A. thaliana
  misc_feature: MA Experiment 20000171 PARAMETER Experiment Name: At_42deg_Heat_P Parameter: Plant Line Value: WS
  misc_feature: MA Experiment 20000171 PARAMETER Experiment Name: At_42deg_Heat_P Parameter: Temperature (deg C) Value: 42 vs. 22
  misc_feature: MA Experiment 20000171 PARAMETER Experiment Name: At_42deg_Heat_P Parameter: Timepoint (hr) Value: 1
  misc_feature: MA Experiment 20000171 PARAMETER Experiment Name: At_42deg_Heat_P Parameter: Tissue Value: Aerial
  misc_feature: MA Experiment ID: 20000436 Result: Up-regulated in Transcription
  misc_feature: MA Experiment 20000436 PARAMETER Experiment Name: At_Drought_P Parameter: Age (day) Value: 7
  misc_feature: MA Experiment 20000436 PARAMETER Experiment Name: At_Drought_P Parameter: Organism Value: A. thaliana
  misc_feature: MA Experiment 20000436 PARAMETER Experiment Name: At_Drought_P Parameter: Plant Line Value: WS
  misc_feature: MA Experiment 20000436 PARAMETER Experiment Name: At_Drought_P Parameter: Timepoint (hr) Value: 12
  misc_feature: MA Experiment 20000436 PARAMETER Experiment Name: At_Drought_P Parameter: Tissue Value: Whole Plant
  misc_feature: MA Experiment 20000436 PARAMETER Experiment Name: At_Drought_P Parameter: Treatment Value: Drought vs. No Drought
  misc_feature: MA Experiment ID: 20000451 Result: Up-regulated in Transcription
  misc_feature: MA Experiment 20000451 PARAMETER Experiment Name: At_CS6879_Shoots-Roots_P Parameter: Age (day) Value: 14
  misc_feature: MA Experiment 20000451 PARAMETER Experiment Name: At_CS6879_Shoots-Roots_P Parameter: Organism Value: A. thaliana
  misc_feature: MA Experiment 20000451 PARAMETER Experiment Name: At_CS6879_Shoots-Roots_P Parameter: Plant Line Value: CS6879 vs. WS
  misc_feature: MA Experiment 20000451 PARAMETER Experiment Name: At_CS6879_Shoots-Roots_P Parameter: Tissue Value: Roots
  misc_feature: MA Experiment ID: 20000452 Result: Up-regulated in Transcription
  misc_feature: MA Experiment 20000452 PARAMETER Experiment Name: At_CS6879_Shoots-Roots_P Parameter: Age (day) Value: 14
  misc_feature: MA Experiment 20000452 PARAMETER Experiment Name: At_CS6879_Shoots-Roots_P Parameter: Organism Value: A. thaliana
  misc_feature: MA Experiment 20000452 PARAMETER Experiment Name: At_CS6879_Shoots-Roots_P Parameter: Plant Line Value: CS6879 vs. WS
  misc_feature: MA Experiment 20000452 PARAMETER Experiment Name: At_CS6879_Shoots-Roots_P Parameter: Tissue Value: Shoots
  misc_feature: MA Experiment ID: 20000495 Result: Down-regulated in Transcription
  misc_feature: MA Experiment 20000495 PARAMETER Experiment Name: At_Guard_Cells_P Parameter: Harvest Date Value: 8/2/2002
  misc_feature: MA Experiment 20000495 PARAMETER Experiment Name: At_Guard_Cells_P Parameter: Organism Value: A. thaliana
  misc_feature: MA Experiment 20000495 PARAMETER Experiment Name: At_Guard_Cells_P Parameter: Tissue Value: Guard Cells vs. Leaves
  misc_feature: MA Experiment ID: 20001757 Result: Down-regulated in Transcription
  misc_feature: MA Experiment 20001757 PARAMETER Experiment Name: At_50mM_NH4NO3_L-to-H_P Parameter: Timepoint (hr) Value: 6
  misc_feature: MA Experiment 20001757 PARAMETER Experiment Name: At_50mM_NH4NO3_L-to-H_P Parameter: Tissue Value: Leaf
  misc_feature: MA Experiment 20001757 PARAMETER Experiment Name: At_50mM_NH4NO3_L-to-H_P Parameter: Treatment Value: 50mM NH4NO3 vs 100mM Mannitol
atggaaactgtttcctctctcttccaaggaaaactcagcatcctcgtacccaatgtgggaataggtgtactaaagccgacgactgagtgtacagcagaagagttctcatttataatagctacaaatctggagtcaactttccatttctcgcaactcgcgcatcctttattgaaagcctctggttcagggaacattgtgctcatgtcttccgtggctggagttgtaaatttgggtaatacatcaatctatggagcaaccaaaggagccatgaatcagctggcgagaaatttagcatgcgagtgggcgagtgataatataagggctaattctgtttgtccatggttcattacaactccgtcaactaaagatttcctcggtgataaagatgtaaaagaaaaggtggagagtgtgacaccattgagacgtgttggagaggcaaatgaagtatcatcgcttgttgcatttctatgtcttcccgcagcttcttatataacaggtcaaaccatttgcgttgatggaggtttcactattaacggcttctctttgccttaa

SEQ ID NO: 96784 - protein, 183 aa, Arabidopsis thaliana
  peptide (1)..(183): Ceres Seq. ID no. 12734696
  misc_feature (1)..(183): Homolog of NCBI NO: 25283134 NR Description: probable tropinone reductase [imported] - thaliana >gi|3980398|gb|AAC95201.1| putative tropinone reductase
  misc_feature (1)..(183): Homolog of NCBI NO: 30684212 NR Description: short-chain dehydrogenase/reductase family
  misc_feature (1)..(181): Homolog of NCBI NO: 15227069 NR Description: putative tropinone reductase; protein id: [Arabidopsis thaliana] >gi|25283126|pir||E84694 probable
  misc_feature (1)..(181): Homolog of NCBI NO: 15227075 NR Description: putative tropinone reductase; protein id: supported by cDNA: 14555., supported by cDNA: gi_17473659, by cDNA: gi_20148626 [Arabidopsis thaliana]
  misc_feature (1)..(181): Homolog of NCBI NO: 15227040 NR Description: putative tropinone reductase; protein id: [Arabidopsis thaliana] >gi|25283124|pir||B84693 probable
  misc_feature (1)..(181): Homolog of NCBI NO: 15227076 NR Description: putative tropinone reductase; protein id: supported by cDNA: 2618., supported by cDNA: gi_15010623, by cDNA: gi_19699255 [Arabidopsis thaliana]
  misc_feature (1)..(181): Homolog of NCBI NO: 15227043 NR Description: putative tropinone reductase; protein id: [Arabidopsis thaliana] >gi|25283125|pir||C84693 probable
  misc_feature (1)..(181): Homolog of NCBI NO: 21554716 NR Description: putative tropinone reductase [Arabidopsis
  misc_feature (24)..(181): Homolog of NCBI NO: 6457349 NR Description: short chain alcohol dehydrogenase [Arabidopsis
  misc_feature (1)..(181): Homolog of NCBI NO: 15222400 NR Description: tropinone reductase-I, putative; protein id:
METVSSLFQGKLSILVPNVGIGVLKPTTECTAEEFSFIIATNLESTFHFSQLAHPLLKASGSGNIVLMSSVAGVVNLGNTSIYGATKGAMNQLARNLACEWASDNIRANSVCPWFITTPSTKDFLGDKDVKEKVESVTPLRRVGEANEVSSLVAFLCLPAASYITGQTICVDGGFTINGFSLP

SEQ ID NO: 96785 - protein, 116 aa, Arabidopsis thaliana
  peptide (1)..(116): Ceres Seq. ID no. 12734697
  misc_feature (1)..(116): Homolog of NCBI NO: 25283134 NR Description: probable tropinone reductase [imported] - thaliana >gi|3980398|gb|AAC95201.1| putative tropinone reductase
  misc_feature (1)..(116): Homolog of NCBI NO: 30684212 NR Description: short-chain dehydrogenase/reductase family
  misc_feature (1)..(114): Homolog of NCBI NO: 15227069 NR Description: putative tropinone reductase; protein id: [Arabidopsis thaliana] >gi|25283126|pir||E84694 probable
  misc_feature (1)..(114): Homolog of NCBI NO: 15227075 NR Description: putative tropinone reductase; protein id: supported by cDNA: 14555., supported by cDNA: gi_17473659, by cDNA: gi_20148626 [Arabidopsis thaliana]
  misc_feature (1)..(114): Homolog of NCBI NO: 15227040 NR Description: putative tropinone reductase; protein id: [Arabidopsis thaliana] >gi|25283124|pir||B84693 probable
  misc_feature (1)..(114): Homolog of NCBI NO: 15227076 NR Description: putative tropinone reductase; protein id: supported by cDNA: 2618., supported by cDNA: gi_15010623, by cDNA: gi_19699255 [Arabidopsis thaliana]
  misc_feature (1)..(114): Homolog of NCBI NO: 15227043 NR Description: putative tropinone reductase; protein id: [Arabidopsis thaliana] >gi|25283125|pir||C84693 probable
  misc_feature (1)..(114): Homolog of NCBI NO: 21554716 NR Description: putative tropinone reductase [Arabidopsis
  misc_feature (1)..(114): Homolog of NCBI NO: 6457349 NR Description: short chain alcohol dehydrogenase [Arabidopsis
  misc_feature (1)..(114): Homolog of NCBI NO: 15222400 NR Description: tropinone reductase-I, putative; protein id:
MSSVAGVVNLGNTSIYGATKGAMNQLARNLACEWASDNIRANSVCPWFITTPSTKDFLGDKDVKEKVESVTPLRRVGEANEVSSLVAFLCLPAASYITGQTICVDGGFTINGFSLP

SEQ ID NO: 96786 - protein, 94 aa, Arabidopsis thaliana
  peptide (1)..(94): Ceres Seq. ID no. 12734698
  misc_feature (1)..(94): Homolog of NCBI NO: 25283134 NR Description: probable tropinone reductase [imported] - thaliana >gi|3980398|gb|AAC95201.1| putative tropinone reductase
  misc_feature (1)..(94): Homolog of NCBI NO: 30684212 NR Description: short-chain dehydrogenase/reductase family
  misc_feature (1)..(92): Homolog of NCBI NO: 15227069 NR Description: putative tropinone reductase; protein id: [Arabidopsis thaliana] >gi|25283126|pir||E84694 probable
  misc_feature (1)..(92): Homolog of NCBI NO: 15227075 NR Description: putative tropinone reductase; protein id: supported by cDNA: 14555., supported by cDNA: gi_17473659, by cDNA: gi_20148626 [Arabidopsis thaliana]
  misc_feature (1)..(92): Homolog of NCBI NO: 15227040 NR Description: putative tropinone reductase; protein id: [Arabidopsis thaliana] >gi|25283124|pir||B84693 probable
  misc_feature (1)..(92): Homolog of NCBI NO: 15227076 NR Description: putative tropinone reductase; protein id: supported by cDNA: 2618., supported by cDNA: gi_15010623, by cDNA: gi_19699255 [Arabidopsis thaliana]
  misc_feature (1)..(92): Homolog of NCBI NO: 15227043 NR Description: putative tropinone reductase; protein id: [Arabidopsis thaliana] >gi|25283125|pir||C84693 probable
  misc_feature (1)..(92): Homolog of NCBI NO: 21554716 NR Description: putative tropinone reductase [Arabidopsis
  misc_feature (1)..(92): Homolog of NCBI NO: 6457349 NR Description: short chain alcohol dehydrogenase [Arabidopsis
  misc_feature (1)..(92): Homolog of NCBI NO: 15222400 NR Description: tropinone reductase-I, putative; protein id:
MNQLARNLACEWASDNIRANSVCPWFITTPSTKDFLGDKDVKEKVESVTPLRRVGEANEVSSLVAFLCLPAASYITGQTICVDGGFTINGFSLP

SEQ ID NO: 96787 - DNA, 1089 bp, Arabidopsis thaliana
  misc_feature (1)..(1089): Ceres Seq. ID no. 12734699
  misc_feature: MA Experiment ID: 20000347 Result: Up-regulated in Transcription
  misc_feature: MA Experiment 20000347 PARAMETER Experiment Name: At_2mM_SA_Sub_P Parameter: Age (day) Value: 14
  misc_feature: MA Experiment 20000347 PARAMETER Experiment Name: At_2mM_SA_Sub_P Parameter: Organism Value: A. thaliana
  misc_feature: MA Experiment 20000347 PARAMETER Experiment Name: At_2mM_SA_Sub_P Parameter: Plant Line Value: WS
  misc_feature: MA Experiment 20000347 PARAMETER Experiment Name: At_2mM_SA_Sub_P Parameter: Timepoint (hr) Value: 6
  misc_feature: MA Experiment 20000347 PARAMETER Experiment Name: At_2mM_SA_Sub_P Parameter: Tissue Value: Aerial
  misc_feature: MA Experiment 20000347 PARAMETER Experiment Name: At_2mM_SA_Sub_P Parameter: Treatment Value: 2mM SA vs. No Treatment
  misc_feature: MA Experiment ID: 20000352 Result: Up-regulated in Transcription
  misc_feature: MA Experiment 20000352 PARAMETER Experiment Name: At_Drought_Sub_P Parameter: Age (day) Value: 7
  misc_feature: MA Experiment 20000352 PARAMETER Experiment Name: At_Drought_Sub_P Parameter: Organism Value: A. thaliana
  misc_feature: MA Experiment 20000352 PARAMETER Experiment Name: At_Drought_Sub_P Parameter: Plant Line Value: WS
  misc_feature: MA Experiment 20000352 PARAMETER Experiment Name: At_Drought_Sub_P Parameter: Timepoint (hr) Value: 6
  misc_feature: MA Experiment 20000352 PARAMETER Experiment Name: At_Drought_Sub_P Parameter: Tissue Value: Whole Plant
  misc_feature: MA Experiment 20000352 PARAMETER Experiment Name: At_Drought_Sub_P Parameter: Treatment Value: Drought vs. No Drought
atggccgagatatgttacgaagtagtgaccgacgcatgtccgtcgtcggtttatgaatcaacgccggcacattcacggcggaggccgagattccaaacggtgatgcatgaagattgggagaagaattgtaagcgtagtaaacaggaggctttagctacgagatactcttcaattcctcgaagctctcgggaggatttctctgaccaaaatgtcgacgtatccagtccaagatacggtgtttcttcggtgtgcggtagaagaagagagatggaagatgcggtggcaattcatccttcattttcttctccgaagaattcggaatttcctcaacactactttggtgtgtatgacggccatggttgttcccacgttgcagcaaggtgtagagagaggcttcacaagctggtgcaagaagaactaagttcagatatggaagatgaagaagaatggaaaacgacgatggagcgtagcttcacacgcatggataaggaagttgtatcgtggggtgattccgtcgtgactgcaaattgcaagtgtgatctacaaacaccggcttgtgattccgtcggatcaaccgctgttgtctcagtcattacgccagataagatcgttgtcgccaattgtggcgattccagagcagttctctgccgcaatgggaaaccagtccctttatcaaccgatcacaagcctgatcggccagacgaattggatcgaatcgaaggagctggtggacgagtcatatattgggactgtccaagagttctcggagtcttagcaatgtcacgagcaataggagacaactatttgaaaccttacgtgagttgcgagccggaggtaaccataacggacaggagagacgatgactgcctcatactagctagtgatggtttatgggatgttgtgtcaaacgagaccgcctgctctgtagcgcgtatgtgtctccgtggtggtgggagaagacaagataatgaggatccggcgatttcggacaaggcttgtacggaagcgtcagtattgctaacaaagctggcgttggcaaggaacagtagtgacaacgtcagtgtcgttgtgattgatctcagaagataa

SEQ ID NO: 96788 - protein, 362 aa, Arabidopsis thaliana
  peptide (1)..(362): Ceres Seq. ID no. 12734700
  misc_feature (76)..(353): Pfam Name: Protein phosphatase 2C Pfam Description: Protein phosphatase 2C
  misc_feature (1)..(362): Homolog of NCBI NO: 15227078 NR Description: protein phosphatase 2C (PP2C), putative; protein At2g29380.1 [Arabidopsis thaliana] >gi|25352214|pir||F84695
  misc_feature (76)..(326): Homolog of NCBI NO: 15222398 NR Description: protein phosphatase 2C (PP2C), putative; protein At1g07430.1, supported by cDNA: 118185., supported by cDNA: supported by cDNA: gi_20259128 [Arabidopsis thaliana] thaliana
  misc_feature (318)..(362): Homolog of NCBI NO: 15222398 NR Description: protein phosphatase 2C (PP2C), putative; protein At1g07430.1, supported by cDNA: 118185., supported by cDNA: supported by cDNA: gi_20259128 [Arabidopsis thaliana] thaliana
  misc_feature (76)..(326): Homolog of NCBI NO: 21537020 NR Description: protein phosphatase 2C, putative [Arabidopsis
  misc_feature (318)..(362): Homolog of NCBI NO: 21537020 NR Description: protein phosphatase 2C, putative [Arabidopsis
  misc_feature (35)..(362): Homolog of NCBI NO: 7768151 NR Description: protein phpsphatase 2C (PP2C) [Fagus sylvatica]
  misc_feature (76)..(326): Homolog of NCBI NO: 15237839 NR Description: protein phosphatase 2C (PP2C); protein id: supported by cDNA: gi_15809791, supported by cDNA: gi_16226418, by cDNA: gi_18377816 [Arabidopsis thaliana]
  misc_feature (76)..(326): Homolog of NCBI NO: 16226419 NR Description: AT5g59220/mnc17_110 [Arabidopsis thaliana]
  misc_feature (328)..(362): Homolog of NCBI NO: 15237839 NR Description: protein phosphatase 2C (PP2C); protein id: supported by cDNA: gi_15809791, supported by cDNA: gi_16226418, by cDNA: gi_18377816 [Arabidopsis thaliana]
  misc_feature (328)..(362): Homolog of NCBI NO: 16226419 NR Description: AT5g59220/mnc17_110 [Arabidopsis thaliana]
MAEICYEVVTDACPSSVYESTPAHSRRRPRFQTVMHEDWEKNCKRSKQEALATRYSSIPRSSREDFSDQNVDVSSPRYGVSSVCGRRREMEDAVAIHPSFSSPKNSEFPQHYFGVYDGHGCSHVAARCRERLHKLVQEELSSDMEDEEEWKTTMERSFTRMDKEVVSWGDSVVTANCKCDLQTPACDSVGSTAVVSVITPDKIVVANCGDSRAVLCRNGKPVPLSTDHKPDRPDELDRIEGAGGRVIYWDCPRVLGVLAMSRAIGDNYLKPYVSCEPEVTITDRRDDDCLILASDGLWDVVSNETACSVARMCLRGGGRRQDNEDPAISDKACTEASVLLTKLALARNSSDNVSVVVIDLRR

SEQ ID NO: 96789 - protein, 328 aa, Arabidopsis thaliana
  peptide (1)..(328): Ceres Seq. ID no. 12734701
  misc_feature (42)..(319): Pfam Name: Protein phosphatase 2C Pfam Description: Protein phosphatase 2C
  misc_feature (1)..(328): Homolog of NCBI NO: 15227078 NR Description: protein phosphatase 2C (PP2C), putative; protein At2g29380.1 [Arabidopsis thaliana] >gi|25352214|pir||F84695
  misc_feature (42)..(292): Homolog of NCBI NO: 15222398 NR Description: protein phosphatase 2C (PP2C), putative; protein At1g07430.1, supported by cDNA: 118185., supported by cDNA: supported by cDNA: gi_20259128 [Arabidopsis thaliana] thaliana
  misc_feature (284)..(328): Homolog of NCBI NO: 15222398 NR Description: protein phosphatase 2C (PP2C), putative; protein At1g07430.1, supported by cDNA: 118185., supported by cDNA: supported by cDNA: gi_20259128 [Arabidopsis thaliana] thaliana
  misc_feature (42)..(292): Homolog of NCBI NO: 21537020 NR Description: protein phosphatase 2C, putative [Arabidopsis
  misc_feature (284)..(328): Homolog of NCBI NO: 21537020 NR Description: protein phosphatase 2C, putative [Arabidopsis
  misc_feature (1)..(328): Homolog of NCBI NO: 7768151 NR Description: protein phpsphatase 2C (PP2C) [Fagus sylvatica]
  misc_feature (42)..(292): Homolog of NCBI NO: 15237839 NR Description: protein phosphatase 2C (PP2C); protein id: supported by cDNA: gi_15809791, supported by cDNA: gi_16226418, by cDNA: gi_18377816 [Arabidopsis thaliana]
  misc_feature (42)..(292): Homolog of NCBI NO: 16226419 NR Description: AT5g59220/mnc17_110 [Arabidopsis thaliana]
  misc_feature (294)..(328): Homolog of NCBI NO: 15237839 NR Description: protein phosphatase 2C (PP2C); protein id: supported by cDNA: gi_15809791, supported by cDNA: gi_16226418, by cDNA: gi_18377816 [Arabidopsis thaliana]
  misc_feature (294)..(328): Homolog of NCBI NO: 16226419 NR Description: AT5g59220/mnc17_110 [Arabidopsis thaliana]
MHEDWEKNCKRSKQEALATRYSSIPRSSREDFSDQNVDVSSPRYGVSSVCGRRREMEDAVAIHPSFSSPKNSEFPQHYFGVYDGHGCSHVAARCRERLHKLVQEELSSDMEDEEEWKTTMERSFTRMDKEVVSWGDSVVTANCKCDLQTPACDSVGSTAVVSVITPDKIVVANCGDSRAVLCRNGKPVPLSTDHKPDRPDELDRIEGAGGRVIYWDCPRVLGVLAMSRAIGDNYLKPYVSCEPEVTITDRRDDDCLILASDGLWDVVSNETACSVARMCLRGGGRRQDNEDPAISDKACTEASVLLTKLALARNSSDNVSVVVIDLRR

SEQ ID NO: 96790 - protein, 273 aa, Arabidopsis thaliana
  peptide (1)..(273): Ceres Seq. ID no. 12734702
  misc_feature (1)..(264): Pfam Name: Protein phosphatase 2C Pfam Description: Protein phosphatase 2C
  misc_feature (1)..(273): Homolog of NCBI NO: 15227078 NR Description: protein phosphatase 2C (PP2C), putative; protein At2g29380.1 [Arabidopsis thaliana] >gi|25352214|pir||F84695
  misc_feature (1)..(237): Homolog of NCBI NO: 15222398 NR Description: protein phosphatase 2C (PP2C), putative; protein At1g07430.1, supported by cDNA: 118185., supported by cDNA: supported by cDNA: gi_20259128 [Arabidopsis thaliana] thaliana
  misc_feature (229)..(273): Homolog of NCBI NO: 15222398 NR Description: protein phosphatase 2C (PP2C), putative; protein At1g07430.1, supported by cDNA: 118185., supported by cDNA: supported by cDNA: gi_20259128 [Arabidopsis thaliana] thaliana
  misc_feature (1)..(237): Homolog of NCBI NO: 21537020 NR Description: protein phosphatase 2C, putative [Arabidopsis
  misc_feature (229)..(273): Homolog of NCBI NO: 21537020 NR Description: protein phosphatase 2C, putative [Arabidopsis
  misc_feature (1)..(273): Homolog of NCBI NO: 7768151 NR Description: protein phpsphatase 2C (PP2C) [Fagus sylvatica]
  misc_feature (1)..(237): Homolog of NCBI NO: 15237839 NR Description: protein phosphatase 2C (PP2C); protein id: supported by cDNA: gi_15809791, supported by cDNA: gi_16226418, by cDNA: gi_18377816 [Arabidopsis thaliana]
  misc_feature (1)..(237): Homolog of NCBI NO: 16226419 NR Description: AT5g59220/mnc17_110 [Arabidopsis thaliana]
  misc_feature (239)..(273): Homolog of NCBI NO: 15237839 NR Description: protein phosphatase 2C (PP2C); protein id: supported by cDNA: gi_15809791, supported by cDNA: gi_16226418, by cDNA: gi_18377816 [Arabidopsis thaliana]
  misc_feature (239)..(273): Homolog of NCBI NO: 16226419 NR Description: AT5g59220/mnc17_110 [Arabidopsis thaliana]
MEDAVAIHPSFSSPKNSEFPQHYFGVYDGHGCSHVAARCRERLHKLVQEELSSDMEDEEEWKTTMERSFTRMDKEVVSWGDSVVTANCKCDLQTPACDSVGSTAVVSVITPDKIVVANCGDSRAVLCRNGKPVPLSTDHKPDRPDELDRIEGAGGRVIYWDCPRVLGVLAMSRAIGDNYLKPYVSCEPEVTITDRRDDDCLILASDGLWDVVSNETACSVARMCLRGGGRRQDNEDPAISDKACTEASVLLTKLALARNSSDNVSVVVIDLRR

SEQ ID NO: 96791 - DNA, 847 bp, Arabidopsis thaliana
  misc_feature (1)..(847): Ceres Seq. ID no. 12734714
  misc_feature: MA Experiment ID: 20000307 Result: Down-regulated in Transcription
  misc_feature: MA Experiment 20000307 PARAMETER Experiment Name: At_Germinating_Seeds_Sub_P Parameter: Age (hr) Value: 24 vs. 0
  misc_feature: MA Experiment 20000307 PARAMETER Experiment Name: At_Germinating_Seeds_Sub_P Parameter: Organism Value: A. thaliana
  misc_feature: MA Experiment 20000307 PARAMETER Experiment Name: At_Germinating_Seeds_Sub_P Parameter: Plant Line Value: WS
  misc_feature: MA Experiment 20000307 PARAMETER Experiment Name: At_Germinating_Seeds_Sub_P Parameter: Tissue Value: Germinating Seeds
  misc_feature: MA Experiment ID: 20000328 Result: Down-regulated in Transcription
  misc_feature: MA Experiment 20000328 PARAMETER Experiment Name: At_42deg_Heat_Sub_P Parameter: Age (day) Value: 14
  misc_feature: MA Experiment 20000328 PARAMETER Experiment Name: At_42deg_Heat_Sub_P Parameter: Organism Value: A. thaliana
  misc_feature: MA Experiment 20000328 PARAMETER Experiment Name: At_42deg_Heat_Sub_P Parameter: Plant Line Value: WS
  misc_feature: MA Experiment 20000328 PARAMETER Experiment Name: At_42deg_Heat_Sub_P Parameter: Temperature (deg C) Value: 42 vs. 22
  misc_feature: MA Experiment 20000328 PARAMETER Experiment Name: At_42deg_Heat_Sub_P Parameter: Timepoint (hr) Value: 6
  misc_feature: MA Experiment 20000328 PARAMETER Experiment Name: At_42deg_Heat_Sub_P Parameter: Tissue Value: Aerial
  misc_feature: MA Experiment ID: 20000346 Result: Up-regulated in Transcription
  misc_feature: MA Experiment 20000346 PARAMETER Experiment Name: At_2mM_SA_Sub_P Parameter: Age (day) Value: 14
  misc_feature: MA Experiment 20000346 PARAMETER Experiment Name: At_2mM_SA_Sub_P Parameter: Organism Value: A. thaliana
  misc_feature: MA Experiment 20000346 PARAMETER Experiment Name: At_2mM_SA_Sub_P Parameter: Plant Line Value: WS
  misc_feature: MA Experiment 20000346 PARAMETER Experiment Name: At_2mM_SA_Sub_P Parameter: Timepoint (hr) Value: 1
  misc_feature: MA Experiment 20000346 PARAMETER Experiment Name: At_2mM_SA_Sub_P Parameter: Tissue Value: Aerial
  misc_feature: MA Experiment 20000346 PARAMETER Experiment Name: At_2mM_SA_Sub_P Parameter: Treatment Value: 2mM SA vs. No Treatment
  misc_feature: MA Experiment ID: 20000347 Result: Up-regulated in Transcription
  misc_feature: MA Experiment 20000347 PARAMETER Experiment Name: At_2mM_SA_Sub_P Parameter: Age (day) Value: 14
  misc_feature: MA Experiment 20000347 PARAMETER Experiment Name: At_2mM_SA_Sub_P Parameter: Organism Value: A. thaliana
  misc_feature: MA Experiment 20000347 PARAMETER Experiment Name: At_2mM_SA_Sub_P Parameter: Plant Line Value: WS
  misc_feature: MA Experiment 20000347 PARAMETER Experiment Name: At_2mM_SA_Sub_P Parameter: Timepoint (hr) Value: 6
  misc_feature: MA Experiment 20000347 PARAMETER Experiment Name: At_2mM_SA_Sub_P Parameter: Tissue Value: Aerial
  misc_feature: MA Experiment 20000347 PARAMETER Experiment Name: At_2mM_SA_Sub_P Parameter: Treatment Value: 2mM SA vs. No Treatment
  misc_feature: MA Experiment ID: 20000348 Result: Up-regulated in Transcription
  misc_feature: MA Experiment 20000348 PARAMETER Experiment Name: At_100uM_ABA_Sub_P Parameter: Age (day) Value: 14
  misc_feature: MA Experiment 20000348 PARAMETER Experiment Name: At_100uM_ABA_Sub_P Parameter: Organism Value: A. thaliana
  misc_feature: MA Experiment 20000348 PARAMETER Experiment Name: At_100uM_ABA_Sub_P Parameter: Plant Line Value: WS
  misc_feature: MA Experiment 20000348 PARAMETER Experiment Name: At_100uM_ABA_Sub_P Parameter: Timepoint (hr) Value: 1
  misc_feature: MA Experiment 20000348 PARAMETER Experiment Name: At_100uM_ABA_Sub_P Parameter: Tissue Value: Aerial
  misc_feature: MA Experiment 20000348 PARAMETER Experiment Name: At_100uM_ABA_Sub_P Parameter: Treatment Value: 100uM ABA vs. No Treatment
  misc_feature: MA Experiment ID: 20000355 Result: Down-regulated in Transcription
  misc_feature: MA Experiment 20000355 PARAMETER Experiment Name: At_Siliques_Sub_P Parameter: Age (day) Value: 21
  misc_feature: MA Experiment 20000355 PARAMETER Experiment Name: At_Siliques_Sub_P Parameter: Organism Value: A. thaliana
  misc_feature: MA Experiment 20000355 PARAMETER Experiment Name: At_Siliques_Sub_P Parameter: Plant Line Value: WS
  misc_feature: MA Experiment 20000355 PARAMETER Experiment Name: At_Siliques_Sub_P Parameter: Tissue Value: Less Than 5mm Siliques vs. Whole Plant
  misc_feature: MA Experiment ID: 20000440 Result: Down-regulated in Transcription
  misc_feature: MA Experiment 20000440 PARAMETER Experiment Name: At_Closed-Flower__Sub_P Parameter: Tissue Value: Closed Flower vs. Whole Plant
aaaccacataaactagtcaaagaagaatagatgagttacattataaaaaagttcaagtgagagaaagagaggtccaatggcggagaaagaagaggatgtgaagcttctaggtttttgggcaagcccttttactcgtagagttgagatggctttcaagctcaaaggcgtgccttacgagtacttggagcaagatatagtgaacaagagccctttgcttctccagataaatccggtttacaagaaggttccggttcttgtctacaaagggaaaatattatccgagtcacatgtgatcctcgaatacatcgaccaaatatggaagaacaatccaattcttcctcaagatccttacgagaaagccatggctttattctgggccaagttcgttgatgaacaggttggaccagtagcttttatgtctgtggcaaaagcagagaagggagtagaggttgcaatcaaggaggctcaagaactctttatgtttcttgagaaggaagtcactggaaaagatttcttcggtggcaaaacaattggatttttggacttggtcgcaggaagtatgatcccgttttgtcttgctcgaggttgggaaggtatgggaattgatatgattccagaggaaaagtttccagagctaaacagatggatcaaaaatttgaaagaaattgagatcgtgagagaatgtattcctcctagagaggaacaaattgagcatatgaagaaagttgtagaaagaatcaaatcagcctaagagacaacaatgatactcttcgatcagtagatgttaactatatgtttgtgtaatcttgttataatagtttgtatgaacaataaatgaaacatttgt

SEQ ID NO: 96792 - protein, 224 aa, Arabidopsis thaliana
  peptide (1)..(224): Ceres Seq. ID no. 12734715
  misc_feature (1)..(224): Homolog of NCBI NO: 15227086 NR Description: glutathione transferase, putative; protein id: supported by cDNA: gi_11096005, supported by cDNA: gi_14423533
  misc_feature (1)..(224): Homolog of NCBI NO: 14423534 NR Description: putative glutathione S-transferase [Arabidopsis
  misc_feature (1)..(224): Homolog of NCBI NO: 15227551 NR Description: glutathione transferase, putative; protein id: supported by cDNA: 38727., supported by cDNA: gi_11095999, by cDNA: gi_16226389 [Arabidopsis thaliana]
  misc_feature (1)..(223): Homolog of NCBI NO: 15227550 NR Description: glutathione transferase, putative; protein id: supported by cDNA: gi_11096001, supported by cDNA: gi_20453169
  misc_feature (1)..(223): Homolog of NCBI NO: 15227087 NR Description: glutathione transferase, putative; protein id: supported by cDNA: gi_11096003 [Arabidopsis thaliana]
  misc_feature (1)..(224): Homolog of NCBI NO: 15227085 NR Description: glutathione transferase (103-1A); protein id: supported by cDNA: 6528., supported by cDNA: gi_17065199,
  misc_feature (4)..(224): Homolog of NCBI NO: 15227084 NR Description: glutathione transferase, putative; protein id: supported by cDNA: gi_11096007 [Arabidopsis thaliana]
  misc_feature (1)..(224): Homolog of NCBI NO: 15227082 NR Description: glutathione transferase, putative; protein id: supported by cDNA: 24361., supported by cDNA: gi_11096009, by cDNA: gi_15010755 [Arabidopsis thaliana]
  misc_feature (6)..(215): Homolog of NCBI NO: 10567808 NR Description: putative glutathione S-transferase T3
MAEKEEDVKLLGFWASPFTRRVEMAFKLKGVPYEYLEQDIVNKSPLLLQINPVYKKVPVLVYKGKILSESHVILEYIDQIWKNNPILPQDPYEKAMALFWAKFVDEQVGPVAFMSVAKAEKGVEVAIKEAQELFMFLEKEVTGKDFFGGKTIGFLDLVAGSMIPFCLARGWEGMGIDMIPEEKFPELNRWIKNLKEIEIVRECIPPREEQIEHMKKVVERIKSA

SEQ ID NO: 96793 - protein, 201 aa, Arabidopsis thaliana
  peptide (1)..(201): Ceres Seq. ID no. 12734716
  misc_feature (1)..(201): Homolog of NCBI NO: 15227086 NR Description: glutathione transferase, putative; protein id: supported by cDNA: gi_11096005, supported by cDNA: gi_14423533
  misc_feature (1)..(201): Homolog of NCBI NO: 14423534 NR Description: putative glutathione S-transferase [Arabidopsis
  misc_feature (1)..(201): Homolog of NCBI NO: 15227551 NR Description: glutathione transferase, putative; protein id: supported by cDNA: 38727., supported by cDNA: gi_11095999, by cDNA: gi_16226389 [Arabidopsis thaliana]
  misc_feature (1)..(200): Homolog of NCBI NO: 15227550 NR Description: glutathione transferase, putative; protein id: supported by cDNA: gi_11096001, supported by cDNA: gi_20453169
  misc_feature (1)..(200): Homolog of NCBI NO: 15227087 NR Description: glutathione transferase, putative; protein id: supported by cDNA: gi_11096003 [Arabidopsis thaliana]
  misc_feature (1)..(201): Homolog of NCBI NO: 15227085 NR Description: glutathione transferase (103-1A); protein id: supported by cDNA: 6528., supported by cDNA: gi_17065199,
  misc_feature (1)..(201): Homolog of NCBI NO: 15227084 NR Description: glutathione transferase, putative; protein id: supported by cDNA: gi_11096007 [Arabidopsis thaliana]
  misc_feature (1)..(201): Homolog of NCBI NO: 15227082 NR Description: glutathione transferase, putative; protein id: supported by cDNA: 24361., supported by cDNA: gi_11096009, by cDNA: gi_15010755 [Arabidopsis thaliana]
  misc_feature (1)..(192): Homolog of NCBI NO: 10567808 NR Description: putative glutathione S-transferase T3
MAFKLKGVPYEYLEQDIVNKSPLLLQINPVYKKVPVLVYKGKILSESHVILEYIDQIWKNNPILPQDPYEKAMALFWAKFVDEQVGPVAFMSVAKAEKGVEVAIKEAQELFMFLEKEVTGKDFFGGKTIGFLDLVAGSMIPFCLARGWEGMGIDMIPEEKFPELNRWIKNLKEIEIVRECIPPREEQIEHMKKVVERIKSA

SEQ ID NO: 96794 - protein, 129 aa, Arabidopsis thaliana
  peptide (1)..(129): Ceres Seq. ID no. 12734717
  misc_feature (1)..(129): Homolog of NCBI NO: 15227086 NR Description: glutathione transferase, putative; protein id: supported by cDNA: gi_11096005, supported by cDNA: gi_14423533
  misc_feature (1)..(129): Homolog of NCBI NO: 14423534 NR Description: putative glutathione S-transferase [Arabidopsis
  misc_feature (1)..(129): Homolog of NCBI NO: 15227551 NR Description: glutathione transferase, putative; protein id: supported by cDNA: 38727., supported by cDNA: gi_11095999, by cDNA: gi_16226389 [Arabidopsis thaliana]
  misc_feature (1)..(128): Homolog of NCBI NO: 15227550 NR Description: glutathione transferase, putative; protein id: supported by cDNA: gi_11096001, supported by cDNA: gi_20453169
  misc_feature (1)..(128): Homolog of NCBI NO: 15227087 NR Description: glutathione transferase, putative; protein id: supported by cDNA: gi_11096003 [Arabidopsis thaliana]
  misc_feature (1)..(129): Homolog of NCBI NO: 15227085 NR Description: glutathione transferase (103-1A); protein id: supported by cDNA: 6528., supported by cDNA: gi_17065199,
  misc_feature (1)..(129): Homolog of NCBI NO: 15227084 NR Description: glutathione transferase, putative; protein id: supported by cDNA: gi_11096007 [Arabidopsis thaliana]
  misc_feature (1)..(129): Homolog of NCBI NO: 15227082 NR Description: glutathione transferase, putative; protein id: supported by cDNA: 24361., supported by cDNA: gi_11096009, by cDNA: gi_15010755 [Arabidopsis thaliana]
  misc_feature (1)..(120): Homolog of NCBI NO: 10567808 NR Description: putative glutathione S-transferase T3
MALFWAKFVDEQVGPVAFMSVAKAEKGVEVAIKEAQELFMFLEKEVTGKDFFGGKTIGFLDLVAGSMIPFCLARGWEGMGIDMIPEEKFPELNRWIKNLKEIEIVRECIPPREEQIEHMKKVVERIKSA

SEQ ID NO: 96795 - DNA, 951 bp, Arabidopsis thaliana
  misc_feature (1)..(951): Ceres Seq. ID no. 12734718
  misc_feature: MA Experiment ID: 20000306 Result: Down-regulated in Transcription
  misc_feature: MA Experiment 20000306 PARAMETER Experiment Name: At_Germinating_Seeds_Sub_P Parameter: Age (hr) Value: 6 vs. 0
  misc_feature: MA Experiment 20000306 PARAMETER Experiment Name: At_Germinating_Seeds_Sub_P Parameter: Organism Value: A. thaliana
  misc_feature: MA Experiment 20000306 PARAMETER Experiment Name: At_Germinating_Seeds_Sub_P Parameter: Plant Line Value: WS
  misc_feature: MA Experiment 20000306 PARAMETER Experiment Name: At_Germinating_Seeds_Sub_P Parameter: Tissue Value: Germinating Seeds
  misc_feature: MA Experiment ID: 20000307 Result: Down-regulated in Transcription
  misc_feature: MA Experiment 20000307 PARAMETER Experiment Name: At_Germinating_Seeds_Sub_P Parameter: Age (hr) Value: 24 vs. 0
  misc_feature: MA Experiment 20000307 PARAMETER Experiment Name: At_Germinating_Seeds_Sub_P Parameter: Organism Value: A. thaliana
  misc_feature: MA Experiment 20000307 PARAMETER Experiment Name: At_Germinating_Seeds_Sub_P Parameter: Plant Line Value: WS
  misc_feature: MA Experiment 20000307 PARAMETER Experiment Name: At_Germinating_Seeds_Sub_P Parameter: Tissue Value: Germinating Seeds
  misc_feature: MA Experiment ID: 20000314 Result: Up-regulated in Transcription
  misc_feature: MA Experiment 20000314 PARAMETER Experiment Name: At_14day_Shoots-Roots_Sub_P Parameter: Age (day) Value: 14
  misc_feature: MA Experiment 20000314 PARAMETER Experiment Name: At_14day_Shoots-Roots_Sub_P Parameter: Organism Value: A. thaliana
  misc_feature: MA Experiment 20000314 PARAMETER Experiment Name: At_14day_Shoots-Roots_Sub_P Parameter: Plant Line Value: WS
  misc_feature: MA Experiment 20000314 PARAMETER Experiment Name: At_14day_Shoots-Roots_Sub_P Parameter: Tissue Value: Roots vs. Whole Plant
  misc_feature: MA Experiment ID: 20000347 Result: Up-regulated in Transcription
  misc_feature: MA Experiment 20000347 PARAMETER Experiment Name: At_2mM_SA_Sub_P Parameter: Age (day) Value: 14
  misc_feature: MA Experiment 20000347 PARAMETER Experiment Name: At_2mM_SA_Sub_P Parameter: Organism Value: A. thaliana
  misc_feature: MA Experiment 20000347 PARAMETER Experiment Name: At_2mM_SA_Sub_P Parameter: Plant Line Value: WS
  misc_feature: MA Experiment 20000347 PARAMETER Experiment Name: At_2mM_SA_Sub_P Parameter: Timepoint (hr) Value: 6
  misc_feature: MA Experiment 20000347 PARAMETER Experiment Name: At_2mM_SA_Sub_P Parameter: Tissue Value: Aerial
  misc_feature: MA Experiment 20000347 PARAMETER Experiment Name: At_2mM_SA_Sub_P Parameter: Treatment Value: 2mM SA vs. No Treatment
  misc_feature: MA Experiment ID: 20000349 Result: Up-regulated in Transcription
  misc_feature: MA Experiment 20000349 PARAMETER Experiment Name: At_100uM_ABA_Sub_P Parameter: Age (day) Value: 14
  misc_feature: MA Experiment 20000349 PARAMETER Experiment Name: At_100uM_ABA_Sub_P Parameter: Organism Value: A. thaliana
  misc_feature: MA Experiment 20000349 PARAMETER Experiment Name: At_100uM_ABA_Sub_P Parameter: Plant Line Value: WS
  misc_feature: MA Experiment 20000349 PARAMETER Experiment Name: At_100uM_ABA_Sub_P Parameter: Timepoint (hr) Value: 6
  misc_feature: MA Experiment 20000349 PARAMETER Experiment Name: At_100uM_ABA_Sub_P Parameter: Tissue Value: Aerial
  misc_feature: MA Experiment 20000349 PARAMETER Experiment Name: At_100uM_ABA_Sub_P Parameter: Treatment Value: 100uM ABA vs. No Treatment
atcttcaagataagcttgagagttgagactacaaaaaaaagcacaatattgtttttaaagtgacagagagagtcagagagagagatctaatggcgaagaaagaagagagtgtgaagcttctagggttttggataagcccttttagtcgtagagtcgagatggctctcaaacttaaaggcgtaccatacgagtacttggaagaagacttacccaaaaagagcactttacttcttgaactaaatccggttcacaagaaggttccggttcttgttcacaatgataaattattatccgagtcacatgtgatcctcgaatacatcgaccaaacttggaataacaatccaattctacctcacgatccctacgagaaggccatggttcggttctgggccaagttcgttgatgagcagatcctaccagttggcttcatgcccctagtaaaagcagagaagggaatagatgttgctattgaggagattcgagaaatgcttatgtttcttgagaaggaagtcactggaaaagatttctttggtggcaagacgatcggattcttggacatggttgcgggaagtatgatcccgttttgtcttgctcgggcttgggaatgtttggggattgatatgactccagaggatacgtttccagaattaaacagatggatcaagaacttgaatgaagttgagatcgtgagggaatgtatacctccaaaagagaaacatattgagcgtatgaagaaaattatagagagagctaagtctacgttctaaattaatgataacttcataactctgtgttctaaaataatgactatgtgcagcttgtatcgttttgttattgaaaaatttgaaacaaagaatgaatgtagctgcattggtagtggaaatcaattaatgggtgcaaagtgaaatgttgaaagctacctattataactataataacaaatattgattt

SEQ ID NO: 96796 - protein, 225 aa, Arabidopsis thaliana
  peptide (1)..(225): Ceres Seq. ID no. 12734719
  misc_feature (1)..(225): Homolog of NCBI NO: 15227550 NR Description: glutathione transferase, putative; protein id: supported by cDNA: gi_11096001, supported by cDNA: gi_20453169
  misc_feature (1)..(223): Homolog of NCBI NO: 15227551 NR Description: glutathione transferase, putative; protein id: supported by cDNA: 38727., supported by cDNA: gi_11095999, by cDNA: gi_16226389 [Arabidopsis thaliana]
  misc_feature (1)..(223): Homolog of NCBI NO: 14423534 NR Description: putative glutathione S-transferase [Arabidopsis
  misc_feature (1)..(223): Homolog of NCBI NO: 15227086 NR Description: glutathione transferase, putative; protein id: supported by cDNA: gi_11096005, supported by cDNA: gi_14423533
  misc_feature (1)..(223): Homolog of NCBI NO: 15227087 NR Description: glutathione transferase, putative; protein id: supported by cDNA: gi_11096003 [Arabidopsis thaliana]
  misc_feature (1)..(224): Homolog of NCBI NO: 15227085 NR Description: glutathione transferase (103-1A); protein id: supported by cDNA: 6528., supported by cDNA: gi_17065199,
  misc_feature (1)..(223): Homolog of NCBI NO: 15227084 NR Description: glutathione transferase, putative; protein id: supported by cDNA: gi_11096007 [Arabidopsis thaliana]
  misc_feature (1)..(220): Homolog of NCBI NO: 15227082 NR Description: glutathione transferase, putative; protein id: supported by cDNA: 24361., supported by cDNA: gi_11096009, by cDNA: gi_15010755 [Arabidopsis thaliana]
  misc_feature (8)..(218): Homolog of NCBI NO: 7595790 NR Description: glutathione S-transferase [Euphorbia esula]
MAKKEESVKLLGFWISPFSRRVEMALKLKGVPYEYLEEDLPKKSTLLLELNPVHKKVPVLVHNDKLLSESHVILEYIDQTWNNNPILPHDPYEKAMVRFWAKFVDEQILPVGFMPLVKAEKGIDVAIEEIREMLMFLEKEVTGKDFFGGKTIGFLDMVAGSMIPFCLARAWECLGIDMTPEDTFPELNRWIKNLNEVEIVRECIPPKEKHIERMKKIIERAKSTF

SEQ ID NO: 96797 - protein, 202 aa, Arabidopsis thaliana
  peptide (1)..(202): Ceres Seq. ID no. 12734720
  misc_feature (1)..(202): Homolog of NCBI NO: 15227550 NR Description: glutathione transferase, putative; protein id: supported by cDNA: gi_11096001, supported by cDNA: gi_20453169
  misc_feature (1)..(200): Homolog of NCBI NO: 15227551 NR Description: glutathione transferase, putative; protein id: supported by cDNA: 38727., supported by cDNA: gi_11095999, by cDNA: gi_16226389 [Arabidopsis thaliana]
  misc_feature (1)..(200): Homolog of NCBI NO: 14423534 NR Description: putative glutathione S-transferase [Arabidopsis
  misc_feature (1)..(200): Homolog of NCBI NO: 15227086 NR Description: glutathione transferase, putative; protein id: supported by cDNA: gi_11096005, supported by cDNA: gi_14423533
  misc_feature (1)..(200): Homolog of NCBI NO: 15227087 NR Description: glutathione transferase, putative; protein id: supported by cDNA: gi_11096003 [Arabidopsis thaliana]
  misc_feature (1)..(201): Homolog of NCBI NO: 15227085 NR Description: glutathione transferase (103-1A); protein id: supported by cDNA: 6528., supported by cDNA: gi_17065199,
  misc_feature (1)..(200): Homolog of NCBI NO: 15227084 NR Description: glutathione transferase, putative; protein id: supported by cDNA: gi_11096007 [Arabidopsis thaliana]
  misc_feature (1)..(197): Homolog of NCBI NO: 15227082 NR Description: glutathione transferase, putative; protein id: supported by cDNA: 24361., supported by cDNA: gi_11096009, by cDNA: gi_15010755 [Arabidopsis thaliana]
  misc_feature (1)..(195): Homolog of NCBI NO: 7595790 NR Description: glutathione S-transferase [Euphorbia esula]
MALKLKGVPYEYLEEDLPKKSTLLLELNPVHKKVPVLVHNDKLLSESHVILEYIDQTWNNNPILPHDPYEKAMVRFWAKFVDEQILPVGFMPLVKAEKGIDVAIEEIREMLMFLEKEVTGKDFFGGKTIGFLDMVAGSMIPFCLARAWECLGIDMTPEDTFPELNRWIKNLNEVEIVRECIPPKEKHIERMKKIIERAKSTF

SEQ ID NO: 96798 - protein, 130 aa, Arabidopsis thaliana
  peptide (1)..(130): Ceres Seq. ID no. 12734721
  misc_feature (1)..(130): Homolog of NCBI NO: 15227550 NR Description: glutathione transferase, putative; protein id: supported by cDNA: gi_11096001, supported by cDNA: gi_20453169
  misc_feature (1)..(128): Homolog of NCBI NO: 15227551 NR Description: glutathione transferase, putative; protein id: supported by cDNA: 38727., supported by cDNA: gi_11095999, by cDNA: gi_16226389 [Arabidopsis thaliana]
  misc_feature (1)..(128): Homolog of NCBI NO: 14423534 NR Description: putative glutathione S-transferase [Arabidopsis
  misc_feature (1)..(128): Homolog of NCBI NO: 15227086 NR Description: glutathione transferase, putative; protein id: supported by cDNA: gi_11096005, supported by cDNA: gi_14423533
  misc_feature (1)..(128): Homolog of NCBI NO: 15227087 NR Description: glutathione transferase, putative; protein id: supported by cDNA: gi_11096003 [Arabidopsis thaliana]
  misc_feature (1)..(129): Homolog of NCBI NO: 15227085 NR Description: glutathione transferase (103-1A); protein id: supported by cDNA: 6528., supported by cDNA: gi_17065199,
  misc_feature (1)..(128): Homolog of NCBI NO: 15227084 NR Description: glutathione transferase, putative; protein id: supported by cDNA: gi_11096007 [Arabidopsis thaliana]
  misc_feature (1)..(125): Homolog of NCBI NO: 15227082 NR Description: glutathione transferase, putative; protein id: supported by cDNA: 24361., supported by cDNA: gi_11096009, by cDNA: gi_15010755 [Arabidopsis thaliana]
  misc_feature (1)..(123): Homolog of NCBI NO: 7595790 NR Description: glutathione S-transferase [Euphorbia esula]
MVRFWAKFVDEQILPVGFMPLVKAEKGIDVAIEEIREMLMFLEKEVTGKDFFGGKTIGFLDMVAGSMIPFCLARAWECLGIDMTPEDTFPELNRWIKNLNEVEIVRECIPPKEKHIERMKKIIERAKSTF

SEQ ID NO: 96799 - DNA, 2215 bp, Arabidopsis thaliana
  misc_feature (1)..(2215): Ceres Seq. ID no. 12734728
  misc_feature: MA Experiment ID: 20000173 Result: Down-regulated in Transcription
  misc_feature: MA Experiment 20000173 PARAMETER Experiment Name: At_42deg_Heat_P Parameter: Age (day) Value: 14
  misc_feature: MA Experiment 20000173 PARAMETER Experiment Name: At_42deg_Heat_P Parameter: Organism Value: A. thaliana
  misc_feature: MA Experiment 20000173 PARAMETER Experiment Name: At_42deg_Heat_P Parameter: Plant Line Value: WS
  misc_feature: MA Experiment 20000173 PARAMETER Experiment Name: At_42deg_Heat_P Parameter: Temperature (deg C) Value: 42 vs. 22
  misc_feature: MA Experiment 20000173 PARAMETER Experiment Name: At_42deg_Heat_P Parameter: Timepoint (hr) Value: 6
  misc_feature: MA Experiment 20000173 PARAMETER Experiment Name: At_42deg_Heat_P Parameter: Tissue Value: Aerial
  misc_feature: MA Experiment ID: 20000179 Result: Up-regulated in Transcription
  misc_feature: MA Experiment 20000179 PARAMETER Experiment Name: At_Germinating_Seeds_P Parameter: Age (hr) Value: 6 vs. 0
  misc_feature: MA Experiment 20000179 PARAMETER Experiment Name: At_Germinating_Seeds_P Parameter: Tissue Value: Germinating Seeds
  misc_feature: MA Experiment ID: 20000180 Result: Up-regulated in Transcription
  misc_feature: MA Experiment 20000180 PARAMETER Experiment Name: At_Germinating_Seeds_P Parameter: Age (hr) Value: 24 vs. 0
  misc_feature: MA Experiment 20000180 PARAMETER Experiment Name: At_Germinating_Seeds_P Parameter: Tissue Value: Germinating Seeds
  misc_feature: MA Experiment ID: 20000182 Result: Down-regulated in Transcription
  misc_feature: MA Experiment 20000182 PARAMETER Experiment Name: At_2mM_SA_P Parameter: Age (day) Value: 14
  misc_feature: MA Experiment 20000182 PARAMETER Experiment Name: At_2mM_SA_P Parameter: Organism Value: A. thaliana
  misc_feature: MA Experiment 20000182 PARAMETER Experiment Name: At_2mM_SA_P Parameter: Plant Line Value: WS
  misc_feature: MA Experiment 20000182 PARAMETER Experiment Name: At_2mM_SA_P Parameter: Timepoint (hr) Value: 6
  misc_feature: MA Experiment 20000182 PARAMETER Experiment Name: At_2mM_SA_P Parameter: Tissue Value: Aerial
  misc_feature: MA Experiment 20000182 PARAMETER Experiment Name: At_2mM_SA_P Parameter: Treatment Value: 2mM SA vs. No Treatment
  misc_feature: MA Experiment ID: 20000184 Result: Down-regulated in Transcription
  misc_feature: MA Experiment 20000184 PARAMETER Experiment Name: At_Shoots__P Parameter: Age (day) Value: 7
  misc_feature: MA Experiment 20000184 PARAMETER Experiment Name: At_Shoots__P Parameter: Tissue Value: Shoots vs. Whole Plant
  misc_feature: MA Experiment ID: 20000185 Result: Down-regulated in Transcription
  misc_feature: MA Experiment 20000185 PARAMETER Experiment Name: At_Roots__P Parameter: Age (day) Value: 7 vs. 21
  misc_feature: MA Experiment 20000185 PARAMETER Experiment Name: At_Roots__P Parameter: Organism Value: A. thaliana
  misc_feature: MA Experiment 20000185 PARAMETER Experiment Name: At_Roots__P Parameter: Tissue Value: Roots vs. Whole Plant
  misc_feature: MA Experiment ID: 20000264 Result: Down-regulated in Transcription
  misc_feature: MA Experiment 20000264 PARAMETER Experiment Name: At_Open_Flower_P Parameter: Age (day) Value: 21
  misc_feature: MA Experiment 20000264 PARAMETER Experiment Name: At_Open_Flower_P Parameter: Plant Line Value: WS
  misc_feature: MA Experiment 20000264 PARAMETER Experiment Name: At_Open_Flower_P Parameter: Tissue Value: Open Flower vs. Whole Plant
  misc_feature: MA Experiment ID: 20000286 Result: Down-regulated in Transcription
  misc_feature: MA Experiment 20000286 PARAMETER Experiment Name: At_Open_Flower_P Parameter: Age (day) Value: 21
  misc_feature: MA Experiment 20000286 PARAMETER Experiment Name: At_Open_Flower_P Parameter: Plant Line Value: WS
  misc_feature: MA Experiment 20000286 PARAMETER Experiment Name: At_Open_Flower_P Parameter: Tissue Value: Half Open vs. Whole Plant
  misc_feature: MA Experiment ID: 20000438 Result: Down-regulated in Transcription
  misc_feature: MA Experiment 20000438 PARAMETER Experiment Name: At_Shoots__P Parameter: Age (day) Value: 14
  misc_feature: MA Experiment 20000438 PARAMETER Experiment Name: At_Shoots__P Parameter: Tissue Value: Shoots vs. Whole Plant
  misc_feature: MA Experiment ID: 20000439 Result: Down-regulated in Transcription
  misc_feature: MA Experiment 20000439 PARAMETER Experiment Name: At_Roots__P Parameter: Age (day) Value: 14 vs. 21
  misc_feature: MA Experiment 20000439 PARAMETER Experiment Name: At_Roots__P Parameter: Organism Value: A. thaliana
  misc_feature: MA Experiment 20000439 PARAMETER Experiment Name: At_Roots__P Parameter: Tissue Value: Roots vs. Whole Plant
  misc_feature: MA Experiment ID: 20000794 Result: Down-regulated in Transcription
  misc_feature: MA Experiment 20000794 PARAMETER Experiment Name: At_Petals_P Parameter: Age (day) Value: 23-25 days
  misc_feature: MA Experiment 20000794 PARAMETER Experiment Name: At_Petals_P Parameter: Plant Line Value: WS
  misc_feature: MA Experiment 20000794 PARAMETER Experiment Name: At_Petals_P Parameter: Tissue Value: Petals vs. Whole plant
  misc_feature: MA Experiment ID: 20001247 Result: Down-regulated in Transcription
  misc_feature: MA Experiment 20001247 PARAMETER Experiment Name: At_Far-red-induction_P Parameter: Age (day) Value: 7
  misc_feature: MA Experiment 20001247 PARAMETER Experiment Name: At_Far-red-induction_P Parameter: Light Value: Far-red vs. White
  misc_feature: MA Experiment 20001247 PARAMETER Experiment Name: At_Far-red-induction_P Parameter: Organism Value: A. thaliana
  misc_feature: MA Experiment 20001247 PARAMETER Experiment Name: At_Far-red-induction_P Parameter: Plant Line Value: Columbia
  misc_feature: MA Experiment 20001247 PARAMETER Experiment Name: At_Far-red-induction_P Parameter: Timepoint (hr) Value: 1
  misc_feature: MA Experiment 20001247 PARAMETER Experiment Name: At_Far-red-induction_P Parameter: Tissue Value: Whole Plant
  misc_feature: MA Experiment ID: 20001451 Result: Down-regulated in Transcription
  misc_feature: MA Experiment 20001451 PARAMETER Experiment Name: At_Far-red-induction_P Parameter: Age (day) Value: 7
  misc_feature: MA Experiment 20001451 PARAMETER Experiment Name: At_Far-red-induction_P Parameter: Light Value: Far-red vs. White
  misc_feature: MA Experiment 20001451 PARAMETER Experiment Name: At_Far-red-induction_P Parameter: Organism Value: A. thaliana
  misc_feature: MA Experiment 20001451 PARAMETER Experiment Name: At_Far-red-induction_P Parameter: Plant Line Value: Columbia
  misc_feature: MA Experiment 20001451 PARAMETER Experiment Name: At_Far-red-induction_P Parameter: Timepoint (hr) Value: 24
  misc_feature: MA Experiment 20001451 PARAMETER Experiment Name: At_Far-red-induction_P Parameter: Tissue Value: Whole Plant
  misc_feature: MA Experiment ID: 20001557 Result: Down-regulated in Transcription
  misc_feature: MA Experiment 20001557 PARAMETER Experiment Name: At_Drought_Soil_Dry_P Parameter: Age (day) Value: 27
  misc_feature: MA Experiment 20001557 PARAMETER Experiment Name: At_Drought_Soil_Dry_P Parameter: Organism Value: A. thaliana
  misc_feature: MA Experiment 20001557 PARAMETER Experiment Name: At_Drought_Soil_Dry_P Parameter: Plant Line Value: WS
  misc_feature: MA Experiment 20001557 PARAMETER Experiment Name: At_Drought_Soil_Dry_P Parameter: Post Timepoint (hr) Value: 3
  misc_feature: MA Experiment 20001557 PARAMETER Experiment Name: At_Drought_Soil_Dry_P Parameter: Post-Treatment Value: Re-Water vs. No Drought
  misc_feature: MA Experiment 20001557 PARAMETER Experiment Name: At_Drought_Soil_Dry_P Parameter: Timepoint (day) Value: 13
  misc_feature: MA Experiment 20001557 PARAMETER Experiment Name: At_Drought_Soil_Dry_P Parameter: Treatment Value: Drought vs. No Drought
  misc_feature: MA Experiment ID: 20001558 Result: Down-regulated in Transcription
  misc_feature: MA Experiment 20001558 PARAMETER Experiment Name: At_Drought_Soil_Dry_P Parameter: Age (day) Value: 27
  misc_feature: MA Experiment 20001558 PARAMETER Experiment Name: At_Drought_Soil_Dry_P Parameter: Organism Value: A. thaliana
  misc_feature: MA Experiment 20001558 PARAMETER Experiment Name: At_Drought_Soil_Dry_P Parameter: Plant Line Value: WS
  misc_feature: MA Experiment 20001558 PARAMETER Experiment Name: At_Drought_Soil_Dry_P Parameter: Post Timepoint (hr) Value: 6
  misc_feature: MA Experiment 20001558 PARAMETER Experiment Name: At_Drought_Soil_Dry_P Parameter: Post-Treatment Value: Re-Water vs. No Drought
  misc_feature: MA Experiment 20001558 PARAMETER Experiment Name: At_Drought_Soil_Dry_P Parameter: Timepoint (day) Value: 13
  misc_feature: MA Experiment 20001558 PARAMETER Experiment Name: At_Drought_Soil_Dry_P Parameter: Treatment Value: Drought vs. No Drought
  misc_feature: MA Experiment ID: 20001560 Result: Down-regulated in Transcription
  misc_feature: MA Experiment 20001560 PARAMETER Experiment Name: At_Drought_Soil_Dry_P Parameter: Age (day) Value: 28
  misc_feature: MA Experiment 20001560 PARAMETER Experiment Name: At_Drought_Soil_Dry_P Parameter: Organism Value: A. thaliana
  misc_feature: MA Experiment 20001560 PARAMETER Experiment Name: At_Drought_Soil_Dry_P Parameter: Plant Line Value: WS
  misc_feature: MA Experiment 20001560 PARAMETER Experiment Name: At_Drought_Soil_Dry_P Parameter: Post Timepoint (hr) Value: None
  misc_feature: MA Experiment 20001560 PARAMETER Experiment Name: At_Drought_Soil_Dry_P Parameter: Post-Treatment Value: None
  misc_feature: MA Experiment 20001560 PARAMETER Experiment Name: At_Drought_Soil_Dry_P Parameter: Timepoint (day) Value: 14
  misc_feature: MA Experiment 20001560 PARAMETER Experiment Name: At_Drought_Soil_Dry_P Parameter: Treatment Value: Drought vs. No Drought
  misc_feature: MA Experiment ID: 20001906 Result: Down-regulated in Transcription
  misc_feature: MA Experiment 20001906 PARAMETER Experiment Name: At_Drought_Reproduction_P Parameter: Age (day) Value: 35
  misc_feature: MA Experiment 20001906 PARAMETER Experiment Name: At_Drought_Reproduction_P Parameter: Organism Value: A. thaliana
  misc_feature: MA Experiment 20001906 PARAMETER Experiment Name: At_Drought_Reproduction_P Parameter: Plant Line Value: WS
  misc_feature: MA Experiment 20001906 PARAMETER Experiment Name: At_Drought_Reproduction_P Parameter: Timepoint (day) Value: 5
  misc_feature: MA Experiment 20001906 PARAMETER Experiment Name: At_Drought_Reproduction_P Parameter: Tissue Value: Siliques
  misc_feature: MA Experiment 20001906 PARAMETER Experiment Name: At_Drought_Reproduction_P Parameter: Treatment Value: Drought vs. No Drought
  misc_feature: MA Experiment ID: 20001908 Result: Down-regulated in Transcription
  misc_feature: MA Experiment 20001908 PARAMETER Experiment Name: At_Drought_Reproduction_P Parameter: Age (day) Value: 40
  misc_feature: MA Experiment 20001908 PARAMETER Experiment Name: At_Drought_Reproduction_P Parameter: Organism Value: A. thaliana
  misc_feature: MA Experiment 20001908 PARAMETER Experiment Name: At_Drought_Reproduction_P Parameter: Plant Line Value: WS
  misc_feature: MA Experiment 20001908 PARAMETER Experiment Name: At_Drought_Reproduction_P Parameter: Timepoint (day) Value: 10
  misc_feature: MA Experiment 20001908 PARAMETER Experiment Name: At_Drought_Reproduction_P Parameter: Tissue Value: Siliques
  misc_feature: MA Experiment 20001908 PARAMETER Experiment Name: At_Drought_Reproduction_P Parameter: Treatment Value: Drought vs. No Drought
gactcactcagtgtgcgcgattcatttcaaaaacgagccagcctcttcttccttcgtctactagatcagatccaaagcttcctcttccagctatggctgcttcagtacactgtaccttgatgtccgtcgtatgcaacaacaagaatcactctgctcggccgaaacttccaaactcgtctttgttacctggattcgatgttgttgttcaagctgctgctactcgattcaagaaggaaacaacaaccacaagagccactttgacgtttgatccaccaaccactaattctgagagagctaagcagagaaaacacaccattgatccttcttctcctgattttcaaccaattccatcttttgaagaatgctttcctaagagcactaaagaacacaaggaagttgtccatgaagaatctggtcatgttcttaaagttccctttcgtcgtgttcatttgtctggtggtgagccagcttttgataattatgacactagtggtcctcaaaatgttaatgcacacattgggcttgctaagctaaggaaggagtggattgatcgtcgggagaagctaggaacaccaagatacactcaaatgtactacgctaagcaagggatcataactgaggaaatgctctactgtgctactagggagaagctagaccctgagtttgtaagatcagaagttgcacgaggacgggcgattatcccttccaacaagaagcatttggagctggaaccgatgattgttggtagaaagttcttggtcaaggtcaatgcgaatatcggaaactctgctgttgccagctctattgaagaggaagtctacaaggttcagtgggcaaccatgtggggagctgatacaatcatggatctctcaactggtcgtcacatccatgagacacgtgagtggatcctaaggaattcagctgtgcctgttggtacggtgcctatttatcaagcacttgagaaagtggatggaattgctgagaatcttaactgggaggttttcagagagactctgattgaacaagctgagcaaggtgtagactatttcacaatccatgctggagttttgctgcgttacattcccttaactgccaagcgtttgaccgggatcgtttcgcgtggaggatccattcatgctaaatggtgcttagcttaccacaaggagaactttgcttacgagcactgggatgacattctagacatctgtaaccagtatgatgtggctctttccattggagatggtctgagacctggctccatttatgatgctaacgacactgctcagtttgcagagctccttactcaaggtgaactaactcgccgagcgtgggaaaaagatgtgcaggtgatgaatgaagggccagggcatgtcccaatgcacaagattccagagaatatgcagaagcagttggagtggtgtaacgaggcaccattctacacccttggtcctttgactactgatattgcccctggatatgatcacattacctctgccattggagctgccaatattggagccttgggtacagctcttctttgctatgtaacaccaaaagaacaccttgggctaccaaacagggacgatgtgaaggccggggttatagcatacaagatcgccgctcatgcagctgatctagccaaacagcatccacatgctcaggcatgggacgatgcgctgagcaaagcgcggtttgagtttagatggatggaccaatttgctctgtcgttggaccccatgactgctatgtctttccatgatgaaactcttccagctgatggagccaaggttgcacacttttgctccatgtgtggaccaaaattctgctctatgaagataacagaagacatccgaaagtatgcagaggagaatggttatggcagtgctgaagaagcaatcagacaaggaatggatgctatgagtgaagaattcaacatcgcaaagaaaaccattagcggagaacagcacggtgaagtaggtggagaaatatatttgccagagagctatgtcaaagctgctcagaaataaaaggcaaatgttttaaacaagaccttgcttacccaagtcttggtgcctgttggactatacctggataaaggcacaaactgttggtaagcttagtagtctctatgtcatgttacttttagaactatctatgttgtctgttcatttgagtcagagtcagcaataaagacaatctaagttgatgtttcaat

SEQ ID NO: 96800 - protein, 674 aa, Arabidopsis thaliana
  peptide (1)..(674): Ceres Seq. ID no. 12734729
  misc_feature (194)..(617): Pfam Name: ThiC family Pfam Description: ThiC family
  misc_feature (54)..(668): Homolog of NCBI NO: 34897012 NR Description: putative thiamin biosynthesis protein [Oryza >gi|13435255|gb|AAK26130.1| putative thiamin biosynthesis protein
  misc_feature (28)..(669): Homolog of NCBI NO: 12240033 NR Description: putative thiamine biosythesis protein ThiC [Poa
  misc_feature (185)..(646): Homolog of NCBI NO: 15614496 NR Description: thiamin biosynthesis protein [Bacillus >gi|20140836|sp|Q9KBJ4|THIC_BACHD Thiamine biosynthesis protein
  misc_feature (215)..(643): Homolog of NCBI NO: 15600166 NR Description: thiamin biosynthesis protein ThiC [Pseudomonas PA01] >gi|24638284|sp|Q9HUJ2|THIC_PSEAE Thiamine biosynthesis thiC >gi|11352622|pir||C83024 thiamin biosynthesis protein ThiC
  misc_feature (184)..(224): Homolog of NCBI NO: 15600166 NR Description: thiamin biosynthesis protein ThiC [Pseudomonas PA01] >gi|24638284|sp|Q9HUJ2|THIC_PSEAE Thiamine biosynthesis thiC >gi|11352622|pir||C83024 thiamin biosynthesis protein ThiC
  misc_feature (91)..(643): Homolog of NCBI NO: 16077944 NR Description: thiA [Bacillus subtilis] Thiamine biosynthesis protein thiC >gi|7448740|pir||D69722
  misc_feature (215)..(643): Homolog of NCBI NO: 23103985 NR Description: hypothetical protein [Azotobacter vinelandii]
  misc_feature (184)..(217): Homolog of NCBI NO: 23103985 NR Description: hypothetical protein [Azotobacter vinelandii]
  misc_feature (185)..(646): Homolog of NCBI NO: 30023259 NR Description: Thiamine biosynthesis protein thiC [Bacillus ATCC 14579] >gi|29898819|gb|AAP12091.1| Thiamine biosynthesis
  misc_feature (215)..(643): Homolog of NCBI NO: 26991600 NR Description: thiamin biosynthesis protein ThiC [Pseudomonas KT2440] >gi|24986690|gb|AAN70489.1|AE016690_5 thiamin
LTQCARFISKTSQPLLPSSTRSDPKLPLPAMAASVHCTLMSVVCNNKNHSARPKLPNSSLLPGFDVVVQAAATRFKKETTTTRATLTFDPPTTNSERAKQRKHTIDPSSPDFQPIPSFEECFPKSTKEHKEVVHEESGHVLKVPFRRVHLSGGEPAFDNYDTSGPQNVNAHIGLAKLRKEWIDRREKLGTPRYTQMYYAKQGIITEEMLYCATREKLDPEFVRSEVARGRAIIPSNKKHLELEPMIVGRKFLVKVNANIGNSAVASSIEEEVYKVQWATMWGADTIMDLSTGRHIHETREWILRNSAVPVGTVPIYQALEKVDGIAENLNWEVFRETLIEQAEQGVDYFTIHAGVLLRYIPLTAKRLTGIVSRGGSIHAKWCLAYHKENFAYEHWDDILDICNQYDVALSIGDGLRPGSIYDANDTAQFAELLTQGELTRRAWEKDVQVMNEGPGHVPMHKIPENMQKQLEWCNEAPFYTLGPLTTDIAPGYDHITSAIGAANIGALGTALLCYVTPKEHLGLPNRDDVKAGVIAYKIAAHAADLAKQHPHAQAWDDALSKARFEFRWMDQFALSLDPMTAMSFHDETLPADGAKVAHFCSMCGPKFCSMKITEDIRKYAEENGYGSAEEAIRQGMDAMSEEFNIAKKTISGEQHGEVGGEIYLPESYVKAAQK

SEQ ID NO: 96801 - protein, 644 aa, Arabidopsis thaliana
  peptide (1)..(644): Ceres Seq. ID no. 12734730
  misc_feature (164)..(587): Pfam Name: ThiC family Pfam Description: ThiC family
  misc_feature (24)..(638): Homolog of NCBI NO: 34897012 NR Description: putative thiamin biosynthesis protein [Oryza >gi|13435255|gb|AAK26130.1| putative thiamin biosynthesis protein
  misc_feature (1)..(639): Homolog of NCBI NO: 12240033 NR Description: putative thiamine biosythesis protein ThiC [Poa
  misc_feature (155)..(616): Homolog of NCBI NO: 15614496 NR Description: thiamin biosynthesis protein [Bacillus >gi|20140836|sp|Q9KBJ4|THIC_BACHD Thiamine biosynthesis protein
  misc_feature (185)..(613): Homolog of NCBI NO: 15600166 NR Description: thiamin biosynthesis protein ThiC [Pseudomonas PA01] >gi|24638284|sp|Q9HUJ2|THIC_PSEAE Thiamine biosynthesis thiC >gi|11352622|pir||C83024 thiamin biosynthesis protein ThiC
  misc_feature (154)..(194): Homolog of NCBI NO: 15600166 NR Description: thiamin biosynthesis protein ThiC [Pseudomonas PA01] >gi|24638284|sp|Q9HUJ2|THIC_PSEAE Thiamine biosynthesis thiC >gi|11352622|pir||C83024 thiamin biosynthesis protein ThiC
  misc_feature (61)..(613): Homolog of NCBI NO: 16077944 NR Description: thiA [Bacillus subtilis] Thiamine biosynthesis protein thiC >gi|7448740|pir||D69722
  misc_feature (185)..(613): Homolog of NCBI NO: 23103985 NR Description: hypothetical protein [Azotobacter vinelandii]
  misc_feature (154)..(187): Homolog of NCBI NO: 23103985 NR Description: hypothetical protein [Azotobacter vinelandii]
  misc_feature (155)..(616): Homolog of NCBI NO: 30023259 NR Description: Thiamine biosynthesis protein thiC [Bacillus ATCC 14579] >gi|29898819|gb|AAP12091.1| Thiamine biosynthesis
  misc_feature (185)..(613): Homolog of NCBI NO: 26991600 NR Description: thiamin biosynthesis protein ThiC [Pseudomonas KT2440] >gi|24986690|gb|AAN70489.1|AE016690_5 thiamin
MAASVHCTLMSVVCNNKNHSARPKLPNSSLLPGFDVVVQAAATRFKKETTTTRATLTFDPPTTNSERAKQRKHTIDPSSPDFQPIPSFEECFPKSTKEHKEVVHEESGHVLKVPFRRVHLSGGEPAFDNYDTSGPQNVNAHIGLAKLRKEWIDRREKLGTPRYTQMYYAKQGIITEEMLYCATREKLDPEFVRSEVARGRAIIPSNKKHLELEPMIVGRKFLVKVNANIGNSAVASSIEEEVYKVQWATMWGADTIMDLSTGRHIHETREWILRNSAVPVGTVPIYQALEKVDGIAENLNWEVFRETLIEQAEQGVDYFTIHAGVLLRYIPLTAKRLTGIVSRGGSIHAKWCLAYHKENFAYEHWDDILDICNQYDVALSIGDGLRPGSIYDANDTAQFAELLTQGELTRRAWEKDVQVMNEGPGHVPMHKIPENMQKQLEWCNEAPFYTLGPLTTDIAPGYDHITSAIGAANIGALGTALLCYVTPKEHLGLPNRDDVKAGVIAYKIAAHAADLAKQHPHAQAWDDALSKARFEFRWMDQFALSLDPMTAMSFHDETLPADGAKVAHFCSMCGPKFCSMKITEDIRKYAEENGYGSAEEAIRQGMDAMSEEFNIAKKTISGEQHGEVGGEIYLPESYVKAAQK

SEQ ID NO: 96802 - protein, 635 aa, Arabidopsis thaliana
  peptide (1)..(635): Ceres Seq. ID no. 12734731
  misc_feature (155)..(578): Pfam Name: ThiC family Pfam Description: ThiC family
  misc_feature (15)..(629): Homolog of NCBI NO: 34897012 NR Description: putative thiamin biosynthesis protein [Oryza >gi|13435255|gb|AAK26130.1| putative thiamin biosynthesis protein
  misc_feature (1)..(630): Homolog of NCBI NO: 12240033 NR Description: putative thiamine biosythesis protein ThiC [Poa
  misc_feature (146)..(607): Homolog of NCBI NO: 15614496 NR Description: thiamin biosynthesis protein [Bacillus >gi|20140836|sp|Q9KBJ4|THIC_BACHD Thiamine biosynthesis protein
  misc_feature (176)..(604): Homolog of NCBI NO: 15600166 NR Description: thiamin biosynthesis protein ThiC [Pseudomonas PA01] >gi|24638284|sp|Q9HUJ2|THIC_PSEAE Thiamine biosynthesis thiC >gi|11352622|pir||C83024 thiamin biosynthesis protein ThiC
  misc_feature (145)..(185): Homolog of NCBI NO: 15600166 NR Description: thiamin biosynthesis protein ThiC [Pseudomonas PA01] >gi|24638284|sp|Q9HUJ2|THIC_PSEAE Thiamine biosynthesis thiC >gi|11352622|pir||C83024 thiamin biosynthesis protein ThiC
  misc_feature (52)..(604): Homolog of NCBI NO: 16077944 NR Description: thiA [Bacillus subtilis] Thiamine biosynthesis protein thiC >gi|7448740|pir||D69722
  misc_feature (176)..(604): Homolog of NCBI NO: 23103985 NR Description: hypothetical protein [Azotobacter vinelandii]
  misc_feature (145)..(178): Homolog of NCBI NO: 23103985 NR Description: hypothetical protein [Azotobacter vinelandii]
  misc_feature (146)..(607): Homolog of NCBI NO: 30023259 NR Description: Thiamine biosynthesis protein thiC [Bacillus ATCC 14579] >gi|29898819|gb|AAP12091.1| Thiamine biosynthesis
  misc_feature (176)..(604): Homolog of NCBI NO: 26991600 NR Description: thiamin biosynthesis protein ThiC [Pseudomonas KT2440] >gi|24986690|gb|AAN70489.1|AE016690_5 thiamin
MSVVCNNKNHSARPKLPNSSLLPGFDVVVQAAATRFKKETTTTRATLTFDPPTTNSERAKQRKHTIDPSSPDFQPIPSFEECFPKSTKEHKEVVHEESGHVLKVPFRRVHLSGGEPAFDNYDTSGPQNVNAHIGLAKLRKEWIDRREKLGTPRYTQMYYAKQGIITEEMLYCATREKLDPEFVRSEVARGRAIIPSNKKHLELEPMIVGRKFLVKVNANIGNSAVASSIEEEVYKVQWATMWGADTIMDLSTGRHIHETREWILRNSAVPVGTVPIYQALEKVDGIAENLNWEVFRETLIEQAEQGVDYFTIHAGVLLRYIPLTAKRLTGIVSRGGSIHAKWCLAYHKENFAYEHWDDILDICNQYDVALSIGDGLRPGSIYDANDTAQFAELLTQGELTRRAWEKDVQVMNEGPGHVPMHKIPENMQKQLEWCNEAPFYTLGPLTTDIAPGYDHITSAIGAANIGALGTALLCYVTPKEHLGLPNRDDVKAGVIAYKIAAHAADLAKQHPHAQAWDDALSKARFEFRWMDQFALSLDPMTAMSFHDETLPADGAKVAHFCSMCGPKFCSMKITEDIRKYAEENGYGSAEEAIRQGMDAMSEEFNIAKKTISGEQHGEVGGEIYLPESYVKAAQK

SEQ ID NO: 96803 - DNA, 1446 bp, Arabidopsis thaliana
  misc_feature (1)..(1446): Ceres Seq. ID no. 12734740
  misc_feature: MA Experiment ID: 20000307 Result: Up-regulated in Transcription
  misc_feature: MA Experiment 20000307 PARAMETER Experiment Name: At_Germinating_Seeds_Sub_P Parameter: Age (hr) Value: 24 vs. 0
  misc_feature: MA Experiment 20000307 PARAMETER Experiment Name: At_Germinating_Seeds_Sub_P Parameter: Organism Value: A. thaliana
  misc_feature: MA Experiment 20000307 PARAMETER Experiment Name: At_Germinating_Seeds_Sub_P Parameter: Plant Line Value: WS
  misc_feature: MA Experiment 20000307 PARAMETER Experiment Name: At_Germinating_Seeds_Sub_P Parameter: Tissue Value: Germinating Seeds
  misc_feature: MA Experiment ID: 20000314 Result: Up-regulated in Transcription
  misc_feature: MA Experiment 20000314 PARAMETER Experiment Name: At_14day_Shoots-Roots_Sub_P Parameter: Age (day) Value: 14
  misc_feature: MA Experiment 20000314 PARAMETER Experiment Name: At_14day_Shoots-Roots_Sub_P Parameter: Organism Value: A. thaliana
  misc_feature: MA Experiment 20000314 PARAMETER Experiment Name: At_14day_Shoots-Roots_Sub_P Parameter: Plant Line Value: WS
  misc_feature: MA Experiment 20000314 PARAMETER Experiment Name: At_14day_Shoots-Roots_Sub_P Parameter: Tissue Value: Roots vs. Whole Plant
  misc_feature: MA Experiment ID: 20000315 Result: Up-regulated in Transcription
  misc_feature: MA Experiment 20000315 PARAMETER Experiment Name: At_14day_Shoots-Roots_Sub_P Parameter: Age (day) Value: 14
  misc_feature: MA Experiment 20000315 PARAMETER Experiment Name: At_14day_Shoots-Roots_Sub_P Parameter: Organism Value: A. thaliana
  misc_feature: MA Experiment 20000315 PARAMETER Experiment Name: At_14day_Shoots-Roots_Sub_P Parameter: Plant Line Value: WS
  misc_feature: MA Experiment 20000315 PARAMETER Experiment Name: At_14day_Shoots-Roots_Sub_P Parameter: Tissue Value: Shoots vs. Whole Plant
  misc_feature: MA Experiment ID: 20000329 Result: Up-regulated in Transcription
  misc_feature: MA Experiment 20000329 PARAMETER Experiment Name: At_4deg_Cold_Sub_P Parameter: Age (day) Value: 14
  misc_feature: MA Experiment 20000329 PARAMETER Experiment Name: At_4deg_Cold_Sub_P Parameter: Organism Value: A. thaliana
  misc_feature: MA Experiment 20000329 PARAMETER Experiment Name: At_4deg_Cold_Sub_P Parameter: Plant Line Value: WS
  misc_feature: MA Experiment 20000329 PARAMETER Experiment Name: At_4deg_Cold_Sub_P Parameter: Temperature (deg C) Value: 4 vs. 22
  misc_feature: MA Experiment 20000329 PARAMETER Experiment Name: At_4deg_Cold_Sub_P Parameter: Timepoint (hr) Value: 6
  misc_feature: MA Experiment 20000329 PARAMETER Experiment Name: At_4deg_Cold_Sub_P Parameter: Tissue Value: Aerial
atggggaagcaagaagatgcagagctcgtcatcatacctttccctttctccggacacattctcgcaacaatcgaactcgccaaacgtctcataagtcaagacaatcctcggatccacaccatcaccatcctctattggggattaccttttattcctcaagctgacacaatcgctttcctccgatccctagtcaaaaatgagcctcgtatccgtctcgttacgttgcccgaagtccaagaccctccaccaatggaactctttgtggaatttgccgaatcttacattcttgaatacgtcaagaaaatggttcccatcatcagagaagctctctccactctcttgtcttcccgcgatgaatcgggttcagttcgtgtggctggattggttcttgacttcttctgcgtccctatgatcgatgtaggaaacgagtttaatctcccttcttacattttcttgacgtgtagcgcagggttcttgggtatgatgaagtatcttccagagagacaccgcgaaatcaaatcggaattcaaccggagcttcaacgaggagttgaatctcattcctggttatgtcaactctgttcctactaaggttttgccgtcaggtctattcatgaaagagacctacgagccttgggtcgaactagcagagaggtttcctgaagctaagggtattttggttaattcatacacagctctcgagccaaacggttttaaatatttcgatcgttgtccggataactacccaaccatttacccaatcgggccgatattatgctccaacgaccgtccgaatttggactcatcggaacgagatcggatcataacttggctagatgaccaacccgagtcatcggtcgtgttcctctgtttcgggagcttgaagaatctcagcgctactcagatcaacgagatagctcaagccttagagatcgttgactgcaaattcatctggtcgtttcgaaccaacccgaaggagtacgcgagcccttacgaggctctaccacacgggttcatggaccgggtcatggatcaaggcattgtttgtggttgggctcctcaagttgaaatcctagcccataaagctgtgggaggattcgtatctcattgtggttggaactcgatattggagagtttgggtttcggcgttccaatcgccacgtggccgatgtacgcggaacaacaactaaacgcgttcacgatggtgaaggagcttggtttagccttggagatgcggttggattacgtgtcggaagatggagatatagtgaaagctgatgagatcgcaggaaccgttagatctttaatggacggtgtggatgtgccgaagagtaaagtgaaggagattgctgaggcgggaaaagaagctgtggacggtggatcttcgtttcttgcggttaaaagattcatcggtgacttgatcgacggcgtttctataagtaagtag

SEQ ID NO: 96804 - protein, 481 aa, Arabidopsis thaliana
  peptide (1)..(481): Ceres Seq. ID no. 12734741
  misc_feature (1)..(481): Homolog of NCBI NO: 15227616 NR Description: UDP-glycosyltransferase family; protein id:
  misc_feature (1)..(473): Homolog of NCBI NO: 15227613 NR Description: putative flavonol 3-O-glucosyltransferase;
  misc_feature (6)..(476): Homolog of NCBI NO: 15222348 NR Description: UDP-glucose glucosyltransferase, putative; id: At1g07260.1 [Arabidopsis thaliana] >gi|25286813|pir||H86207
  misc_feature (5)..(478): Homolog of NCBI NO: 30680040 NR Description: glycosyltransferase family [Arabidopsis thaliana]
  misc_feature (20)..(478): Homolog of NCBI NO: 21954072 NR Description: putative UDP-glucose glucosyltransferase
  misc_feature (7)..(474): Homolog of NCBI NO: 15222344 NR Description: UDP-glucose glucosyltransferase, putative; id: At1g07240.1, supported by cDNA: 6797., supported by cDNA: supported by cDNA: gi_17473893, supported by cDNA: gi_20259789
  misc_feature (6)..(474): Homolog of NCBI NO: 15227610 NR Description: putative flavonol 3-O-glucosyltransferase; id: At2g29730.1, supported by cDNA: 29796., supported by cDNA:
  misc_feature (6)..(474): Homolog of NCBI NO: 15227606 NR Description: putative flavonol 3-O-glucosyltransferase; id: At2g29710.1, supported by cDNA: 270102. [Arabidopsis
  misc_feature (6)..(474): Homolog of NCBI NO: 21555082 NR Description: putative flavonol 3-O-glucosyltransferase
  misc_feature (8)..(481): Homolog of NCBI NO: 11994646 NR Description: UTP-glucose glucosyltransferase [Arabidopsis
MGKQEDAELVIIPFPFSGHILATIELAKRLISQDNPRIHTITILYWGLPFIPQADTIAFLRSLVKNEPRIRLVTLPEVQDPPPMELFVEFAESYILEYVKKMVPIIREALSTLLSSRDESGSVRVAGLVLDFFCVPMIDVGNEFNLPSYIFLTCSAGFLGMMKYLPERHREIKSEFNRSFNEELNLIPGYVNSVPTKVLPSGLFMKETYEPWVELAERFPEAKGILVNSYTALEPNGFKYFDRCPDNYPTIYPIGPILCSNDRPNLDSSERDRIITWLDDQPESSVVFLCFGSLKNLSATQINEIAQALEIVDCKFIWSFRTNPKEYASPYEALPHGFMDRVMDQGIVCGWAPQVEILAHKAVGGFVSHCGWNSILESLGFGVPIATWPMYAEQQLNAFTMVKELGLALEMRLDYVSEDGDIVKADEIAGTVRSLMDGVDVPKSKVKEIAEAGKEAVDGGSSFLAVKRFIGDLIDGVSISK

SEQ ID NO: 96805 - protein, 398 aa, Arabidopsis thaliana
  peptide (1)..(398): Ceres Seq. ID no. 12734742
  misc_feature (1)..(398): Homolog of NCBI NO: 15227616 NR Description: UDP-glycosyltransferase family; protein id:
  misc_feature (1)..(390): Homolog of NCBI NO: 15227613 NR Description: putative flavonol 3-O-glucosyltransferase;
  misc_feature (1)..(393): Homolog of NCBI NO: 15222348 NR Description: UDP-glucose glucosyltransferase, putative; id: At1g07260.1 [Arabidopsis thaliana] >gi|25286813|pir||H86207
  misc_feature (1)..(395): Homolog of NCBI NO: 30680040 NR Description: glycosyltransferase family [Arabidopsis thaliana]
  misc_feature (1)..(395): Homolog of NCBI NO: 21954072 NR Description: putative UDP-glucose glucosyltransferase
  misc_feature (1)..(391): Homolog of NCBI NO: 15222344 NR Description: UDP-glucose glucosyltransferase, putative; id: At1g07240.1, supported by cDNA: 6797., supported by cDNA: supported by cDNA: gi_17473893, supported by cDNA: gi_20259789
  misc_feature (1)..(391): Homolog of NCBI NO: 15227610 NR Description: putative flavonol 3-O-glucosyltransferase; id: At2g29730.1, supported by cDNA: 29796., supported by cDNA:
  misc_feature (1)..(391): Homolog of NCBI NO: 15227606 NR Description: putative flavonol 3-O-glucosyltransferase; id: At2g29710.1, supported by cDNA: 270102. [Arabidopsis
  misc_feature (1)..(391): Homolog of NCBI NO: 21555082 NR Description: putative flavonol 3-O-glucosyltransferase
  misc_feature (1)..(398): Homolog of NCBI NO: 11994646 NR Description: UTP-glucose glucosyltransferase [Arabidopsis
MELFVEFAESYILEYVKKMVPIIREALSTLLSSRDESGSVRVAGLVLDFFCVPMIDVGNEFNLPSYIFLTCSAGFLGMMKYLPERHREIKSEFNRSFNEELNLIPGYVNSVPTKVLPSGLFMKETYEPWVELAERFPEAKGILVNSYTALEPNGFKYFDRCPDNYPTIYPIGPILCSNDRPNLDSSERDRIITWLDDQPESSVVFLCFGSLKNLSATQINEIAQALEIVDCKFIWSFRTNPKEYASPYEALPHGFMDRVMDQGIVCGWAPQVEILAHKAVGGFVSHCGWNSILESLGFGVPIATWPMYAEQQLNAFTMVKELGLALEMRLDYVSEDGDIVKADEIAGTVRSLMDGVDVPKSKVKEIAEAGKEAVDGGSSFLAVKRFIGDLIDGVSISK

SEQ ID NO: 96806 - protein, 380 aa, Arabidopsis thaliana
  peptide (1)..(380): Ceres Seq. ID no. 12734743
  misc_feature (1)..(380): Homolog of NCBI NO: 15227616 NR Description: UDP-glycosyltransferase family; protein id:
  misc_feature (1)..(372): Homolog of NCBI NO: 15227613 NR Description: putative flavonol 3-O-glucosyltransferase;
  misc_feature (1)..(375): Homolog of NCBI NO: 15222348 NR Description: UDP-glucose glucosyltransferase, putative; id: At1g07260.1 [Arabidopsis thaliana] >gi|25286813|pir||H86207
  misc_feature (1)..(377): Homolog of NCBI NO: 30680040 NR Description: glycosyltransferase family [Arabidopsis thaliana]
  misc_feature (1)..(377): Homolog of NCBI NO: 21954072 NR Description: putative UDP-glucose glucosyltransferase
  misc_feature (1)..(373): Homolog of NCBI NO: 15222344 NR Description: UDP-glucose glucosyltransferase, putative; id: At1g07240.1, supported by cDNA: 6797., supported by cDNA: supported by cDNA: gi_17473893, supported by cDNA: gi_20259789
  misc_feature (1)..(373): Homolog of NCBI NO: 15227610 NR Description: putative flavonol 3-O-glucosyltransferase; id: At2g29730.1, supported by cDNA: 29796., supported by cDNA:
  misc_feature (1)..(373): Homolog of NCBI NO: 15227606 NR Description: putative flavonol 3-O-glucosyltransferase; id: At2g29710.1, supported by cDNA: 270102. [Arabidopsis
  misc_feature (1)..(373): Homolog of NCBI NO: 21555082 NR Description: putative flavonol 3-O-glucosyltransferase
  misc_feature (1)..(380): Homolog of NCBI NO: 11994646 NR Description: UTP-glucose glucosyltransferase [Arabidopsis
MVPIIREALSTLLSSRDESGSVRVAGLVLDFFCVPMIDVGNEFNLPSYIFLTCSAGFLGMMKYLPERHREIKSEFNRSFNEELNLIPGYVNSVPTKVLPSGLFMKETYEPWVELAERFPEAKGILVNSYTALEPNGFKYFDRCPDNYPTIYPIGPILCSNDRPNLDSSERDRIITWLDDQPESSVVFLCFGSLKNLSATQINEIAQALEIVDCKFIWSFRTNPKEYASPYEALPHGFMDRVMDQGIVCGWAPQVEILAHKAVGGFVSHCGWNSILESLGFGVPIATWPMYAEQQLNAFTMVKELGLALEMRLDYVSEDGDIVKADEIAGTVRSLMDGVDVPKSKVKEIAEAGKEAVDGGSSFLAVKRFIGDLIDGVSISK

SEQ ID NO: 96807 - DNA, 2217 bp, Arabidopsis thaliana
  misc_feature (1)..(2217): Ceres Seq. ID no. 12734744
  misc_feature: MA Experiment ID: 20000307 Result: Down-regulated in Transcription
  misc_feature: MA Experiment 20000307 PARAMETER Experiment Name: At_Germinating_Seeds_Sub_P Parameter: Age (hr) Value: 24 vs. 0
  misc_feature: MA Experiment 20000307 PARAMETER Experiment Name: At_Germinating_Seeds_Sub_P Parameter: Organism Value: A. thaliana
  misc_feature: MA Experiment 20000307 PARAMETER Experiment Name: At_Germinating_Seeds_Sub_P Parameter: Plant Line Value: WS
  misc_feature: MA Experiment 20000307 PARAMETER Experiment Name: At_Germinating_Seeds_Sub_P Parameter: Tissue Value: Germinating Seeds
  misc_feature: MA Experiment ID: 20000315 Result: Down-regulated in Transcription
  misc_feature: MA Experiment 20000315 PARAMETER Experiment Name: At_14day_Shoots-Roots_Sub_P Parameter: Age (day) Value: 14
  misc_feature: MA Experiment 20000315 PARAMETER Experiment Name: At_14day_Shoots-Roots_Sub_P Parameter: Organism Value: A. thaliana
  misc_feature: MA Experiment 20000315 PARAMETER Experiment Name: At_14day_Shoots-Roots_Sub_P Parameter: Plant Line Value: WS
  misc_feature: MA Experiment 20000315 PARAMETER Experiment Name: At_14day_Shoots-Roots_Sub_P Parameter: Tissue Value: Shoots vs. Whole Plant
  misc_feature: MA Experiment ID: 20000328 Result: Down-regulated in Transcription
  misc_feature: MA Experiment 20000328 PARAMETER Experiment Name: At_42deg_Heat_Sub_P Parameter: Age (day) Value: 14
  misc_feature: MA Experiment 20000328 PARAMETER Experiment Name: At_42deg_Heat_Sub_P Parameter: Organism Value: A. thaliana
  misc_feature: MA Experiment 20000328 PARAMETER Experiment Name: At_42deg_Heat_Sub_P Parameter: Plant Line Value: WS
  misc_feature: MA Experiment 20000328 PARAMETER Experiment Name: At_42deg_Heat_Sub_P Parameter: Temperature (deg C) Value: 42 vs. 22
  misc_feature: MA Experiment 20000328 PARAMETER Experiment Name: At_42deg_Heat_Sub_P Parameter: Timepoint (hr) Value: 6
  misc_feature: MA Experiment 20000328 PARAMETER Experiment Name: At_42deg_Heat_Sub_P Parameter: Tissue Value: Aerial
atggctatcttctccacagcacaacctctctctctgccacgtcatccaaacttctccaatccgaatcaaccaactaccaataacgaacgctcccgccacatttctctcatcgaacgatgtgtgtctctccgacaactaaagcaaacccatggtcacatgatccgtaccggtacgttttccgatccttactcagctagcaagctattcgcaatggctgcgctctcttccttcgctagtctcgagtatgcacgcaaggtgtttgatgaaattcctaaaccaaattctttcgcttggaatactcttatccgtgcttacgcttctggaccagaccctgttcttagcatctgggctttcttggatatggtttcggagagtcagtgttatccaaataagtacactttccctttcctcattaaggcagctgcagaagtttcatctttgtctttgggtcaatctcttcatgggatggctgttaagtcagcagttggaagtgatgttttcgttgctaattctttgatacattgttatttctcttgtggggatttagattcagcttgtaaagtgtttactacgatcaaagaaaaggatgttgtttcatggaattcgatgattaatgggtttgtgcaaaagggttctccagataaagctttggagctttttaagaagatggagtcagaggacgttaaggcaagtcatgtgacaatggttggtgtcttgtctgcttgtgcaaagatacggaatttagagtttgggaggcaggtttgttcttatatcgaagaaaacagggttaacgtgaacttgacattggctaatgcgatgcttgatatgtacacaaagtgtggaagcatagaagatgctaaaagactgtttgatgcaatggaggagaaagataacgttacatggacaacaatgcttgatgggtatgcaatttcagaagactacgaagcagctagagaggttcttaattctatgcctcagaaagatattgttgcttggaatgctcttatatctgcttatgagcagaatggtaaacctaatgaggcattaatagtgttccatgagctgcaacttcagaagaacatgaagctgaaccagatcacactggtaagtactttatcagcttgtgctcaggtaggggcactggaattaggtagatggatccatagctacatcaaaaagcacggtattaggatgaattttcatgttacaagcgcactgattcatatgtattcgaaatgcggagatcttgaaaagtcccgtgaagtgtttaattctgtagagaagagagatgtgtttgtgtggagtgcaatgattggtggcttggcaatgcacggatgtggaaatgaagctgttgatatgttttataaaatgcaagaggctaatgtaaagcctaatggtgtgaccttcaccaatgtcttctgtgcttgtagccataccggtttggtggatgaagctgagtctttattccaccagatggaatcgaattatggtattgtccctgaggaaaagcattatgcttgcatagttgatgttctcggccgctcgggttatttggaaaaagcagtgaagttcatagaggcgatgccgattcctccaagcacttctgtctggggagcgcttctaggagcttgtaagatccatgccaatctgaatcttgctgaaatggcttgtacccgtttgcttgaactggaacctaggaatgatggcgcgcatgtgctcctatcaaacatatatgctaaattgggtaagtgggaaaacgtttctgagctgagaaagcatatgagagtcactggacttaagaaagaaccaggatgcagctcaattgaaatcgatggcatgattcatgagtttctctctggagataacgctcatcctatgtctgagaaggtttacgggaagttacacgaggttatggagaaactgaaatcaaatggttatgagccagagatatctcaggttctgcagatcatcgaggaagaagaaatgaaggaacaatctctaaatctccacagcgagaagctggctatttgttatggactgatatcaacagaggctccaaaggtgatccgagttattaagaatctaagggtgtgtggagattgtcattcagtggctaaactaatatctcagctttatgatagagagattatagtgagggaccggtataggtttcatcatttcagaaatgggcagtgttcctgtaacgatttctggtga

SEQ ID NO: 96808 - protein, 738 aa, Arabidopsis thaliana
  peptide (1)..(738): Ceres Seq. ID no. 12734745
  misc_feature (432)..(466): Pfam Name: PPR repeat Pfam Description: PPR repeat
  misc_feature (24)..(738): Homolog of NCBI NO: 15233584 NR Description: hypothetical protein; protein id: At4g14820.1
  misc_feature (6)..(738): Homolog of NCBI NO: 15223099 NR Description: unknown protein; protein id: At1g08070.1 thaliana] >gi|8778839|gb|AAF79838.1|AC026875_18 T6D22.15
  misc_feature (79)..(738): Homolog of NCBI NO: 34910298 NR Description: P0013F10.8 [Oryza sativa (japonica
  misc_feature (48)..(738): Homolog of NCBI NO: 9279687 NR Description: gb|AAC35225.1~gene_id:MWI23.6~strong similarity
  misc_feature (48)..(737): Homolog of NCBI NO: 15228829 NR Description: hypothetical protein; protein id: At3g22690.1
  misc_feature (297)..(738): Homolog of NCBI NO: 18483237 NR Description: putative vegetative storage protein [Sorghum
  misc_feature (80)..(324): Homolog of NCBI NO: 18483237 NR Description: putative vegetative storage protein [Sorghum
  misc_feature (295)..(738): Homolog of NCBI NO: 30694644 NR Description: pentatricopeptide (PPR) repeat-containing protein
  misc_feature (295)..(738): Homolog of NCBI NO: 30794008 NR Description: unknown protein [Arabidopsis thaliana]
  misc_feature (98)..(324): Homolog of NCBI NO: 30694644 NR Description: pentatricopeptide (PPR) repeat-containing protein
MAIFSTAQPLSLPRHPNFSNPNQPTTNNERSRHISLIERCVSLRQLKQTHGHMIRTGTFSDPYSASKLFAMAALSSFASLEYARKVFDEIPKPNSFAWNTLIRAYASGPDPVLSIWAFLDMVSESQCYPNKYTFPFLIKAAAEVSSLSLGQSLHGMAVKSAVGSDVFVANSLIHCYFSCGDLDSACKVFTTIKEKDVVSWNSMINGFVQKGSPDKALELFKKMESEDVKASHVTMVGVLSACAKIRNLEFGRQVCSYIEENRVNVNLTLANAMLDMYTKCGSIEDAKRLFDAMEEKDNVTWTTMLDGYAISEDYEAAREVLNSMPQKDIVAWNALISAYEQNGKPNEALIVFHELQLQKNMKLNQITLVSTLSACAQVGALELGRWIHSYIKKHGIRMNFHVTSALIHMYSKCGDLEKSREVFNSVEKRDVFVWSAMIGGLAMHGCGNEAVDMFYKMQEANVKPNGVTFTNVFCACSHTGLVDEAESLFHQMESNYGIVPEEKHYACIVDVLGRSGYLEKAVKFIEAMPIPPSTSVWGALLGACKIHANLNLAEMACTRLLELEPRNDGAHVLLSNIYAKLGKWENVSELRKHMRVTGLKKEPGCSSIEIDGMIHEFLSGDNAHPMSEKVYGKLHEVMEKLKSNGYEPEISQVLQIIEEEEMKEQSLNLHSEKLAICYGLISTEAPKVIRVIKNLRVCGDCHSVAKLISQLYDREIIVRDRYRFHHFRNGQCSCNDFW

SEQ ID NO: 96809 - protein, 686 aa, Arabidopsis thaliana
  peptide (1)..(686): Ceres Seq. ID no. 12734746
  misc_feature (380)..(414): Pfam Name: PPR repeat Pfam Description: PPR repeat
  misc_feature (1)..(686): Homolog of NCBI NO: 15233584 NR Description: hypothetical protein; protein id: At4g14820.1
  misc_feature (1)..(686): Homolog of NCBI NO: 15223099 NR Description: unknown protein; protein id: At1g08070.1 thaliana] >gi|8778839|gb|AAF79838.1|AC026875_18 T6D22.15
  misc_feature (27)..(686): Homolog of NCBI NO: 34910298 NR Description: P0013F10.8 [Oryza sativa (japonica
  misc_feature (1)..(686): Homolog of NCBI NO: 9279687 NR Description: gb|AAC35225.1~gene_id:MWI23.6~strong similarity
  misc_feature (1)..(685): Homolog of NCBI NO: 15228829 NR Description: hypothetical protein; protein id: At3g22690.1
  misc_feature (245)..(686): Homolog of NCBI NO: 18483237 NR Description: putative vegetative storage protein [Sorghum
  misc_feature (28)..(272): Homolog of NCBI NO: 18483237 NR Description: putative vegetative storage protein [Sorghum
  misc_feature (243)..(686): Homolog of NCBI NO: 30694644 NR Description: pentatricopeptide (PPR) repeat-containing protein
  misc_feature (243)..(686): Homolog of NCBI NO: 30794008 NR Description: unknown protein [Arabidopsis thaliana]
  misc_feature (46)..(272): Homolog of NCBI NO: 30694644 NR Description: pentatricopeptide (PPR) repeat-containing protein
MIRTGTFSDPYSASKLFAMAALSSFASLEYARKVFDEIPKPNSFAWNTLIRAYASGPDPVLSIWAFLDMVSESQCYPNKYTFPFLIKAAAEVSSLSLGQSLHGMAVKSAVGSDVFVANSLIHCYFSCGDLDSACKVFTTIKEKDVVSWNSMINGFVQKGSPDKALELFKKMESEDVKASHVTMVGVLSACAKIRNLEFGRQVCSYIEENRVNVNLTLANAMLDMYTKCGSIEDAKRLFDAMEEKDNVTWTTMLDGYAISEDYEAAREVLNSMPQKDIVAWNALISAYEQNGKPNEALIVFHELQLQKNMKLNQITLVSTLSACAQVGALELGRWIHSYIKKHGIRMNFHVTSALIHMYSKCGDLEKSREVFNSVEKRDVFVWSAMIGGLAMHGCGNEAVDMFYKMQEANVKPNGVTFTNVFCACSHTGLVDEAESLFHQMESNYGIVPEEKHYACIVDVLGRSGYLEKAVKFIEAMPIPPSTSVWGALLGACKIHANLNLAEMACTRLLELEPRNDGAHVLLSNIYAKLGKWENVSELRKHMRVTGLKKEPGCSSIEIDGMIHEFLSGDNAHPMSEKVYGKLHEVMEKLKSNGYEPEISQVLQIIEEEEMKEQSLNLHSEKLAICYGLISTEAPKVIRVIKNLRVCGDCHSVAKLISQLYDREIIVRDRYRFHHFRNGQCSCNDFW

SEQ ID NO: 96810 - protein, 668 aa, Arabidopsis thaliana
  peptide (1)..(668): Ceres Seq. ID no. 12734747
  misc_feature (362)..(396): Pfam Name: PPR repeat Pfam Description: PPR repeat
  misc_feature (1)..(668): Homolog of NCBI NO: 15233584 NR Description: hypothetical protein; protein id: At4g14820.1
  misc_feature (1)..(668): Homolog of NCBI NO: 15223099 NR Description: unknown protein; protein id: At1g08070.1 thaliana] >gi|8778839|gb|AAF79838.1|AC026875_18 T6D22.15
  misc_feature (9)..(668): Homolog of NCBI NO: 34910298 NR Description: P0013F10.8 [Oryza sativa (japonica
  misc_feature (1)..(668): Homolog of NCBI NO: 9279687 NR Description: gb|AAC35225.1~gene_id:MWI23.6~strong similarity
  misc_feature (1)..(667): Homolog of NCBI NO: 15228829 NR Description: hypothetical protein; protein id: At3g22690.1
  misc_feature (227)..(668): Homolog of NCBI NO: 18483237 NR Description: putative vegetative storage protein [Sorghum
  misc_feature (10)..(254): Homolog of NCBI NO: 18483237 NR Description: putative vegetative storage protein [Sorghum
  misc_feature (225)..(668): Homolog of NCBI NO: 30694644 NR Description: pentatricopeptide (PPR) repeat-containing protein
  misc_feature (225)..(668): Homolog of NCBI NO: 30794008 NR Description: unknown protein [Arabidopsis thaliana]
  misc_feature (28)..(254): Homolog of NCBI NO: 30694644 NR Description: pentatricopeptide (PPR) repeat-containing protein
MAALSSFASLEYARKVFDEIPKPNSFAWNTLIRAYASGPDPVLSIWAFLDMVSESQCYPNKYTFPFLIKAAAEVSSLSLGQSLHGMAVKSAVGSDVFVANSLIHCYFSCGDLDSACKVFTTIKEKDVVSWNSMINGFVQKGSPDKALELFKKMESEDVKASHVTMVGVLSACAKIRNLEFGRQVCSYIEENRVNVNLTLANAMLDMYTKCGSIEDAKRLFDAMEEKDNVTWTTMLDGYAISEDYEAAREVLNSMPQKDIVAWNALISAYEQNGKPNEALIVFHELQLQKNMKLNQITLVSTLSACAQVGALELGRWIHSYIKKHGIRMNFHVTSALIHMYSKCGDLEKSREVFNSVEKRDVFVWSAMIGGLAMHGCGNEAVDMFYKMQEANVKPNGVTFTNVFCACSHTGLVDEAESLFHQMESNYGIVPEEKHYACIVDVLGRSGYLEKAVKFIEAMPIPPSTSVWGALLGACKIHANLNLAEMACTRLLELEPRNDGAHVLLSNIYAKLGKWENVSELRKHMRVTGLKKEPGCSSIEIDGMIHEFLSGDNAHPMSEKVYGKLHEVMEKLKSNGYEPEISQVLQIIEEEEMKEQSLNLHSEKLAICYGLISTEAPKVIRVIKNLRVCGDCHSVAKLISQLYDREIIVRDRYRFHHFRNGQCSCNDFW
